United States Patent Application Publication US 2025/0152746 A1 - sequence listing, part 2

SEQ ID NO: 1837 - RNA, 103 nt, synthetic construct; identical to SEQ ID NO: 1796
  source 1..103: mol_type = other RNA; note = Description of Artificial Sequence: Synthetic polynucleotide
  modified_base 1: mod_base = OTHER; note = 2'-O-Methyl-guanosine phosphorothioate
  modified_base 2: mod_base = OTHER; note = 2'-O-Methyl-adenosine phosphorothioate
  modified_base 3: mod_base = OTHER; note = 2'-O-Methyl-guanosine
  modified_base 21: mod_base = OTHER; note = 2'-O-Methyl-guanosine
  modified_base 25: mod_base = OTHER; note = uridine phosphorothioate
  modified_base 28: mod_base = OTHER; note = 2'-O-Methyl-adenosine
  modified_base 29: mod_base = OTHER; note = 2'-O-Methyl-guanosine
  modified_base 30: mod_base = OTHER; note = 2'-O-Methyl-cytidine
  modified_base 31: mod_base = OTHER; note = 2'-O-Methyl-uridine
  modified_base 32: mod_base = OTHER; note = 2'-O-Methyl-adenosine
  modified_base 34: mod_base = OTHER; note = 2'-O-Methyl-adenosine
  modified_base 35: mod_base = OTHER; note = 2'-O-Methyl-adenosine
  modified_base 36: mod_base = OTHER; note = 2'-O-Methyl-adenosine
  modified_base 37: mod_base = OTHER; note = 2'-O-Methyl-uridine
  modified_base 38: mod_base = OTHER; note = 2'-O-Methyl-adenosine
  modified_base 39: mod_base = OTHER; note = 2'-O-Methyl-guanosine
  modified_base 40: mod_base = OTHER; note = 2'-O-Methyl-cytidine
  modified_base 41: mod_base = OTHER; note = 2'-O-Methyl-adenosine
  modified_base 42: mod_base = OTHER; note = 2'-O-Methyl-adenosine
  modified_base 45: mod_base = OTHER; note = uridine phosphorothioate
  modified_base 46: mod_base = OTHER; note = 2'-O-Methyl-adenosine
  modified_base 48: mod_base = OTHER; note = 2'-O-Methyl-adenosine
  modified_base 50: mod_base = OTHER; note = 2'-O-Methyl-uridine
  modified_base 52: mod_base = OTHER; note = 2'-O-Methyl-adenosine
  modified_base 53: mod_base = OTHER; note = 2'-O-Methyl-guanosine
  modified_base 54: mod_base = OTHER; note = 2'-O-Methyl-guanosine
  modified_base 57: mod_base = OTHER; note = 2'-O-Methyl-adenosine
  modified_base 61: mod_base = OTHER; note = 2'-O-Methyl-cytidine
  modified_base 66: mod_base = OTHER; note = 2'-O-Methyl-uridine
  modified_base 67: mod_base = OTHER; note = 2'-O-Methyl-cytidine
  modified_base 70: mod_base = OTHER; note = 2'-O-Methyl-cytidine
  modified_base 71: mod_base = OTHER; note = 2'-O-Methyl-uridine
  modified_base 72: mod_base = OTHER; note = 2'-O-Methyl-uridine
  modified_base 74: mod_base = OTHER; note = 2'-O-Methyl-adenosine
  modified_base 75: mod_base = OTHER; note = 2'-O-Methyl-adenosine
  modified_base 76: mod_base = OTHER; note = 2'-O-Methyl-adenosine
  modified_base 77: mod_base = OTHER; note = 2'-O-Methyl-adenosine
  modified_base 78: mod_base = OTHER; note = 2'-O-Methyl-adenosine
  modified_base 79: mod_base = OTHER; note = 2'-O-Methyl-guanosine
  modified_base 80: mod_base = OTHER; note = 2'-O-Methyl-uridine
  modified_base 82: mod_base = OTHER; note = 2'-O-Methyl-guanosine
  modified_base 83: mod_base = OTHER; note = 2'-O-Methyl-cytidine
  modified_base 84: mod_base = OTHER; note = 2'-O-Methyl-adenosine
  modified_base 85: mod_base = OTHER; note = 2'-O-Methyl-cytidine
  modified_base 86: mod_base = OTHER; note = 2'-O-Methyl-cytidine
  modified_base 87: mod_base = OTHER; note = 2'-O-Methyl-guanosine
  modified_base 89: mod_base = OTHER; note = 2'-O-Methyl-guanosine
  modified_base 92: mod_base = OTHER; note = 2'-O-Methyl-guanosine
  modified_base 93: mod_base = OTHER; note = 2'-O-Methyl-guanosine
  modified_base 94: mod_base = OTHER; note = 2'-O-Methyl-uridine
  modified_base 95: mod_base = OTHER; note = 2'-O-Methyl-guanosine
  modified_base 96: mod_base = OTHER; note = 2'-O-Methyl-cytidine
  modified_base 97: mod_base = OTHER; note = 2'-O-Methyl-uridine phosphorothioate
  modified_base 98: mod_base = OTHER; note = 2'-O-Methyl-uridine phosphorothioate
  modified_base 99: mod_base = OTHER; note = 2'-O-Methyl-uridine phosphorothioate
  modified_base 100: mod_base = OTHER; note = 2'-O-Methyl-uridine
  misc_difference 101: note = modified_base - a, c, u, g, unknown or other - a, c, g, inosine, u, deoxyadenosine, deoxyguanosine, deoxycytidine, deoxyinosine, thymine, ribonebularine, 2'-O-methylnebularine, or 2'-deoxynebularine
  misc_difference 102: note = modified_base - a, c, u, g, unknown or other - a, c, g, inosine, u, deoxyadenosine, deoxyguanosine, deoxycytidine, deoxyinosine, thymine, ribonebularine, 2'-O-methylnebularine, or 2'-deoxynebularine
  misc_difference 103: note = modified_base - a, c, u, g, unknown or other - a, c, g, inosine, u, deoxyadenosine, deoxyguanosine, deoxycytidine, deoxyinosine, thymine, ribonebularine, 2'-O-methylnebularine, or 2'-deoxynebularine

SEQ ID NO: 1838 - RNA, 103 nt, synthetic construct; identical to SEQ ID NO: 1797
  source 1..103: mol_type = other RNA; note = Description of Artificial Sequence: Synthetic polynucleotide
  modified_base 1: mod_base = OTHER; note = 2'-O-Methyl-cytidine phosphorothioate
  modified_base 2: mod_base = OTHER; note = 2'-O-Methyl-adenosine phosphorothioate
  modified_base 3: mod_base = OTHER; note = 2'-O-Methyl-guanosine
  modified_base 21: mod_base = OTHER; note = 2'-O-Methyl-guanosine
  modified_base 25: mod_base = OTHER; note = uridine phosphorothioate
  modified_base 28: mod_base = OTHER; note = 2'-O-Methyl-adenosine
  modified_base 29: mod_base = OTHER; note = 2'-O-Methyl-guanosine
  modified_base 30: mod_base = OTHER; note = 2'-O-Methyl-cytidine
  modified_base 31: mod_base = OTHER; note = 2'-O-Methyl-uridine
  modified_base 32: mod_base = OTHER; note = 2'-O-Methyl-adenosine
  modified_base 34: mod_base = OTHER; note = 2'-O-Methyl-adenosine
  modified_base 35: mod_base = OTHER; note = 2'-O-Methyl-adenosine
  modified_base 36: mod_base = OTHER; note = 2'-O-Methyl-adenosine
  modified_base 37: mod_base = OTHER; note = 2'-O-Methyl-uridine
  modified_base 38: mod_base = OTHER; note = 2'-O-Methyl-adenosine
  modified_base 39: mod_base = OTHER; note = 2'-O-Methyl-guanosine
  modified_base 40: mod_base = OTHER; note = 2'-O-Methyl-cytidine
  modified_base 41: mod_base = OTHER; note = 2'-O-Methyl-adenosine
  modified_base 42: mod_base = OTHER; note = 2'-O-Methyl-adenosine
  modified_base 45: mod_base = OTHER; note = uridine phosphorothioate
  modified_base 46: mod_base = OTHER; note = 2'-O-Methyl-adenosine
  modified_base 48: mod_base = OTHER; note = 2'-O-Methyl-adenosine
  modified_base 50: mod_base = OTHER; note = 2'-O-Methyl-uridine
  modified_base 52: mod_base = OTHER; note = 2'-O-Methyl-adenosine
  modified_base 53: mod_base = OTHER; note = 2'-O-Methyl-guanosine
  modified_base 54: mod_base = OTHER; note = 2'-O-Methyl-guanosine
  modified_base 55: mod_base = OTHER; note = 2'-O-Methyl-cytidine
  modified_base 56: mod_base = OTHER; note = 2'-O-Methyl-uridine
  modified_base 57: mod_base = OTHER; note = 2'-O-Methyl-adenosine
  modified_base 60: mod_base = OTHER; note = 2'-O-Methyl-cytidine
  modified_base 61: mod_base = OTHER; note = 2'-O-Methyl-cytidine
  modified_base 66: mod_base = OTHER; note = 2'-O-Methyl-uridine
  modified_base 67: mod_base = OTHER; note = 2'-O-Methyl-cytidine
  modified_base 70: mod_base = OTHER; note = 2'-O-Methyl-cytidine
  modified_base 71: mod_base = OTHER; note = 2'-O-Methyl-uridine
  modified_base 72: mod_base = OTHER; note = 2'-O-Methyl-uridine
  modified_base 74: mod_base = OTHER; note = 2'-O-Methyl-adenosine
  modified_base 75: mod_base = OTHER; note = 2'-O-Methyl-adenosine
  modified_base 76: mod_base = OTHER; note = 2'-O-Methyl-adenosine
  modified_base 77: mod_base = OTHER; note = 2'-O-Methyl-adenosine
  modified_base 78: mod_base = OTHER; note = 2'-O-Methyl-adenosine
  modified_base 79: mod_base = OTHER; note = 2'-O-Methyl-guanosine
  modified_base 80: mod_base = OTHER; note = 2'-O-Methyl-uridine
  modified_base 81: mod_base = OTHER; note = 2'-O-Methyl-guanosine
  modified_base 83: mod_base = OTHER; note = 2'-O-Methyl-cytidine
  modified_base 84: mod_base = OTHER; note = 2'-O-Methyl-adenosine
  modified_base 85: mod_base = OTHER; note = 2'-O-Methyl-cytidine
  modified_base 86: mod_base = OTHER; note = 2'-O-Methyl-cytidine
  modified_base 87: mod_base = OTHER; note = 2'-O-Methyl-guanosine
  modified_base 88: mod_base = OTHER; note = 2'-O-Methyl-adenosine
  modified_base 89: mod_base = OTHER; note = 2'-O-Methyl-guanosine
  modified_base 90: mod_base = OTHER; note = 2'-O-Methyl-uridine
  modified_base 91: mod_base = OTHER; note = 2'-O-Methyl-cytidine
  modified_base 92: mod_base = OTHER; note = 2'-O-Methyl-guanosine
  modified_base 93: mod_base = OTHER; note = 2'-O-Methyl-guanosine
  modified_base 94: mod_base = OTHER; note = 2'-O-Methyl-uridine
  modified_base 95: mod_base = OTHER; note = 2'-O-Methyl-guanosine
  modified_base 96: mod_base = OTHER; note = 2'-O-Methyl-cytidine
  modified_base 97: mod_base = OTHER; note = 2'-O-Methyl-uridine phosphorothioate
  modified_base 98: mod_base = OTHER; note = 2'-O-Methyl-uridine phosphorothioate
  modified_base 99: mod_base = OTHER; note = 2'-O-Methyl-uridine phosphorothioate
  modified_base 100: mod_base = OTHER; note = 2'-O-Methyl-uridine
  misc_difference 101: note = modified_base - a, c, u, g, unknown or other - a, c, g, inosine, u, deoxyadenosine, deoxyguanosine, deoxycytidine, deoxyinosine, thymine, ribonebularine, 2'-O-methylnebularine, or 2'-deoxynebularine
  misc_difference 102: note = modified_base - a, c, u, g, unknown or other - a, c, g, inosine, u, deoxyadenosine, deoxyguanosine, deoxycytidine, deoxyinosine, thymine, ribonebularine, 2'-O-methylnebularine, or 2'-deoxynebularine
  misc_difference 103: note = modified_base - a, c, u, g, unknown or other - a, c, g, inosine, u, deoxyadenosine, deoxyguanosine, deoxycytidine, deoxyinosine, thymine, ribonebularine, 2'-O-methylnebularine, or 2'-deoxynebularine

SEQ ID NO: 1839 - RNA, 103 nt, synthetic construct; identical to SEQ ID NO: 1795
  source 1..103: mol_type = other RNA; note = Description of Artificial Sequence: Synthetic polynucleotide
  modified_base 1: mod_base = OTHER; note = 2'-O-Methyl-cytidine phosphorothioate
  modified_base 2: mod_base = OTHER; note = 2'-O-Methyl-cytidine phosphorothioate
  modified_base 3: mod_base = OTHER; note = 2'-O-Methyl-cytidine
  modified_base 21: mod_base = OTHER; note = 2'-O-Methyl-guanosine
  modified_base 25: mod_base = OTHER; note = uridine phosphorothioate
  modified_base 28: mod_base = OTHER; note = 2'-O-Methyl-adenosine
  modified_base 29: mod_base = OTHER; note = 2'-O-Methyl-guanosine
  modified_base 30: mod_base = OTHER; note = 2'-O-Methyl-cytidine
  modified_base 31: mod_base = OTHER; note = 2'-O-Methyl-uridine
  modified_base 32: mod_base = OTHER; note = 2'-O-Methyl-adenosine
  modified_base 34: mod_base = OTHER; note = 2'-O-Methyl-adenosine
  modified_base 35: mod_base = OTHER; note = 2'-O-Methyl-adenosine
  modified_base 36: mod_base = OTHER; note = 2'-O-Methyl-adenosine
  modified_base 37: mod_base = OTHER; note = 2'-O-Methyl-uridine
  modified_base 38: mod_base = OTHER; note = 2'-O-Methyl-adenosine
  modified_base 39: mod_base = OTHER; note = 2'-O-Methyl-guanosine
  modified_base 40: mod_base = OTHER; note = 2'-O-Methyl-cytidine
  modified_base 41: mod_base = OTHER; note = 2'-O-Methyl-adenosine
  modified_base 42: mod_base = OTHER; note = 2'-O-Methyl-adenosine
  modified_base 46: mod_base = OTHER; note = 2'-O-Methyl-adenosine
  modified_base 48: mod_base = OTHER; note = 2'-O-Methyl-adenosine
  modified_base 50: mod_base = OTHER; note = 2'-O-Methyl-uridine
  modified_base 52: mod_base = OTHER; note = 2'-O-Methyl-adenosine
  modified_base 53: mod_base = OTHER; note = 2'-O-Methyl-guanosine
  modified_base 54: mod_base = OTHER; note = 2'-O-Methyl-guanosine
  modified_base 57: mod_base = OTHER; note = 2'-O-Methyl-adenosine
  modified_base 61: mod_base = OTHER; note = 2'-O-Methyl-cytidine
  modified_base 64: mod_base = OTHER; note = uridine phosphorothioate
  modified_base 66: mod_base = OTHER; note = 2'-O-Methyl-uridine
  modified_base 67: mod_base = OTHER; note = 2'-O-Methyl-cytidine
  modified_base 70: mod_base = OTHER; note = 2'-O-Methyl-cytidine
  modified_base 71: mod_base = OTHER; note = 2'-O-Methyl-uridine
  modified_base 72: mod_base = OTHER; note = 2'-O-Methyl-uridine
  modified_base 74: mod_base = OTHER; note = 2'-O-Methyl-adenosine
  modified_base 75: mod_base = OTHER; note = 2'-O-Methyl-adenosine
  modified_base 76: mod_base = OTHER; note = 2'-O-Methyl-adenosine
  modified_base 77: mod_base = OTHER; note = 2'-O-Methyl-adenosine
  modified_base 78: mod_base = OTHER; note = 2'-O-Methyl-adenosine
  modified_base 79: mod_base = OTHER; note = 2'-O-Methyl-guanosine
  modified_base 80: mod_base = OTHER; note = 2'-O-Methyl-uridine
  modified_base 82: mod_base = OTHER; note = 2'-O-Methyl-guanosine
  modified_base 83: mod_base = OTHER; note = 2'-O-Methyl-cytidine
  modified_base 84: mod_base = OTHER; note = 2'-O-Methyl-adenosine
  modified_base 85: mod_base = OTHER; note = 2'-O-Methyl-cytidine
  modified_base 86: mod_base = OTHER; note = 2'-O-Methyl-cytidine
  modified_base 87: mod_base = OTHER; note = 2'-O-Methyl-guanosine
  modified_base 89: mod_base = OTHER; note = 2'-O-Methyl-guanosine
  modified_base 92: mod_base = OTHER; note = 2'-O-Methyl-guanosine
  modified_base 93: mod_base = OTHER; note = 2'-O-Methyl-guanosine
  modified_base 94: mod_base = OTHER; note = 2'-O-Methyl-uridine
  modified_base 95: mod_base = OTHER; note = 2'-O-Methyl-guanosine
  modified_base 96: mod_base = OTHER; note = 2'-O-Methyl-cytidine
  modified_base 97: mod_base = OTHER; note = 2'-O-Methyl-uridine phosphorothioate
  modified_base 98: mod_base = OTHER; note = 2'-O-Methyl-uridine phosphorothioate
  modified_base 99: mod_base = OTHER; note = 2'-O-Methyl-uridine phosphorothioate
  modified_base 100: mod_base = OTHER; note = 2'-O-Methyl-uridine
  misc_difference 101: note = modified_base - a, c, u, g, unknown or other - a, c, g, inosine, u, deoxyadenosine, deoxyguanosine, deoxycytidine, deoxyinosine, thymine, ribonebularine, 2'-O-methylnebularine, or 2'-deoxynebularine
  misc_difference 102: note = modified_base - a, c, u, g, unknown or other - a, c, g, inosine, u, deoxyadenosine, deoxyguanosine, deoxycytidine, deoxyinosine, thymine, ribonebularine, 2'-O-methylnebularine, or 2'-deoxynebularine
  misc_difference 103: note = modified_base - a, c, u, g, unknown or other - a, c, g, inosine, u, deoxyadenosine, deoxyguanosine, deoxycytidine, deoxyinosine, thymine, ribonebularine, 2'-O-methylnebularine, or 2'-deoxynebularine

SEQ ID NO: 1840 - RNA, 103 nt, synthetic construct; identical to SEQ ID NO: 1796
  source 1..103: mol_type = other RNA; note = Description of Artificial Sequence: Synthetic polynucleotide
  modified_base 1: mod_base = OTHER; note = 2'-O-Methyl-guanosine phosphorothioate
  modified_base 2: mod_base = OTHER; note = 2'-O-Methyl-adenosine phosphorothioate
  modified_base 3: mod_base = OTHER; note = 2'-O-Methyl-guanosine
  modified_base 21: mod_base = OTHER; note = 2'-O-Methyl-guanosine
  modified_base 25: mod_base = OTHER; note = uridine phosphorothioate
  modified_base 28: mod_base = OTHER; note = 2'-O-Methyl-adenosine
  modified_base 29: mod_base = OTHER; note = 2'-O-Methyl-guanosine
  modified_base 30: mod_base = OTHER; note = 2'-O-Methyl-cytidine
  modified_base 31: mod_base = OTHER; note = 2'-O-Methyl-uridine
  modified_base 32: mod_base = OTHER; note = 2'-O-Methyl-adenosine
  modified_base 34: mod_base = OTHER; note = 2'-O-Methyl-adenosine
  modified_base 35: mod_base = OTHER; note = 2'-O-Methyl-adenosine
  modified_base 36: mod_base = OTHER; note = 2'-O-Methyl-adenosine
  modified_base 37: mod_base = OTHER; note = 2'-O-Methyl-uridine
  modified_base 38: mod_base = OTHER; note = 2'-O-Methyl-adenosine
  modified_base 39: mod_base = OTHER; note = 2'-O-Methyl-guanosine
  modified_base 40: mod_base = OTHER; note = 2'-O-Methyl-cytidine
  modified_base 41: mod_base = OTHER; note = 2'-O-Methyl-adenosine
  modified_base 42: mod_base = OTHER; note = 2'-O-Methyl-adenosine
  modified_base 46: mod_base = OTHER; note = 2'-O-Methyl-adenosine
  modified_base 48: mod_base = OTHER; note = 2'-O-Methyl-adenosine
  modified_base 50: mod_base = OTHER; note = 2'-O-Methyl-uridine
  modified_base 52: mod_base = OTHER; note = 2'-O-Methyl-adenosine
  modified_base 53: mod_base = OTHER; note = 2'-O-Methyl-guanosine
  modified_base 54: mod_base = OTHER; note = 2'-O-Methyl-guanosine
  modified_base 57: mod_base = OTHER; note = 2'-O-Methyl-adenosine
  modified_base 61: mod_base = OTHER; note = 2'-O-Methyl-cytidine
  modified_base 64: mod_base = OTHER; note = uridine phosphorothioate
  modified_base 66: mod_base = OTHER; note = 2'-O-Methyl-uridine
  modified_base 67: mod_base = OTHER; note = 2'-O-Methyl-cytidine
  modified_base 70: mod_base = OTHER; note = 2'-O-Methyl-cytidine
  modified_base 71: mod_base = OTHER; note = 2'-O-Methyl-uridine
  modified_base 72: mod_base = OTHER; note = 2'-O-Methyl-uridine
  modified_base 74: mod_base = OTHER; note = 2'-O-Methyl-adenosine
  modified_base 75: mod_base = OTHER; note = 2'-O-Methyl-adenosine
  modified_base 76: mod_base = OTHER; note = 2'-O-Methyl-adenosine
  modified_base 77: mod_base = OTHER; note = 2'-O-Methyl-adenosine
  modified_base 78: mod_base = OTHER; note = 2'-O-Methyl-adenosine
  modified_base 79: mod_base = OTHER; note = 2'-O-Methyl-guanosine
  modified_base 80: mod_base = OTHER; note = 2'-O-Methyl-uridine
  modified_base 82: mod_base = OTHER; note = 2'-O-Methyl-guanosine
  modified_base 83: mod_base = OTHER; note = 2'-O-Methyl-cytidine
  modified_base 84: mod_base = OTHER; note = 2'-O-Methyl-adenosine
  modified_base 85: mod_base = OTHER; note = 2'-O-Methyl-cytidine
  modified_base 86: mod_base = OTHER; note = 2'-O-Methyl-cytidine
  modified_base 87: mod_base = OTHER; note = 2'-O-Methyl-guanosine
  modified_base 89: mod_base = OTHER; note = 2'-O-Methyl-guanosine
  modified_base 92: mod_base = OTHER; note = 2'-O-Methyl-guanosine
  modified_base 93: mod_base = OTHER; note = 2'-O-Methyl-guanosine
  modified_base 94: mod_base = OTHER; note = 2'-O-Methyl-uridine
  modified_base 95: mod_base = OTHER; note = 2'-O-Methyl-guanosine
  modified_base 96: mod_base = OTHER; note = 2'-O-Methyl-cytidine
  modified_base 97: mod_base = OTHER; note = 2'-O-Methyl-uridine phosphorothioate
  modified_base 98: mod_base = OTHER; note = 2'-O-Methyl-uridine phosphorothioate
  modified_base 99: mod_base = OTHER; note = 2'-O-Methyl-uridine phosphorothioate
  modified_base 100: mod_base = OTHER; note = 2'-O-Methyl-uridine
  misc_difference 101: note = modified_base - a, c, u, g, unknown or other - a, c, g, inosine, u, deoxyadenosine, deoxyguanosine, deoxycytidine, deoxyinosine, thymine, ribonebularine, 2'-O-methylnebularine, or 2'-deoxynebularine
  misc_difference 102: note = modified_base - a, c, u, g, unknown or other - a, c, g, inosine, u, deoxyadenosine, deoxyguanosine, deoxycytidine, deoxyinosine, thymine, ribonebularine, 2'-O-methylnebularine, or 2'-deoxynebularine
  misc_difference 103: note = modified_base - a, c, u, g, unknown or other - a, c, g, inosine, u, deoxyadenosine, deoxyguanosine, deoxycytidine, deoxyinosine, thymine, ribonebularine, 2'-O-methylnebularine, or 2'-deoxynebularine

SEQ ID NO: 1841 - RNA, 103 nt, synthetic construct; identical to SEQ ID NO: 1797
  source 1..103: mol_type = other RNA; note = Description of Artificial Sequence: Synthetic polynucleotide
  modified_base 1: mod_base = OTHER; note = 2'-O-Methyl-cytidine phosphorothioate
  modified_base 2: mod_base = OTHER; note = 2'-O-Methyl-adenosine phosphorothioate
  modified_base 3: mod_base = OTHER; note = 2'-O-Methyl-guanosine
  modified_base 21: mod_base = OTHER; note = 2'-O-Methyl-guanosine
  modified_base 25: mod_base = OTHER; note = uridine phosphorothioate
  modified_base 28: mod_base = OTHER; note = 2'-O-Methyl-adenosine
  modified_base 29: mod_base = OTHER; note = 2'-O-Methyl-guanosine
  modified_base 30: mod_base = OTHER; note = 2'-O-Methyl-cytidine
  modified_base 31: mod_base = OTHER; note = 2'-O-Methyl-uridine
  modified_base 32: mod_base = OTHER; note = 2'-O-Methyl-adenosine
  modified_base 34: mod_base = OTHER; note = 2'-O-Methyl-adenosine
  modified_base 35: mod_base = OTHER; note = 2'-O-Methyl-adenosine
  modified_base 36: mod_base = OTHER; note = 2'-O-Methyl-adenosine
  modified_base 37: mod_base = OTHER; note = 2'-O-Methyl-uridine
  modified_base 38: mod_base = OTHER; note = 2'-O-Methyl-adenosine
  modified_base 39: mod_base = OTHER; note = 2'-O-Methyl-guanosine
  modified_base 40: mod_base = OTHER; note = 2'-O-Methyl-cytidine
  modified_base 41: mod_base = OTHER; note = 2'-O-Methyl-adenosine
  modified_base 42: mod_base = OTHER; note = 2'-O-Methyl-adenosine
  modified_base 46: mod_base = OTHER; note = 2'-O-Methyl-adenosine
  modified_base 48: mod_base = OTHER; note = 2'-O-Methyl-adenosine
  modified_base 50: mod_base = OTHER; note = 2'-O-Methyl-uridine
  modified_base 52: mod_base = OTHER; note = 2'-O-Methyl-adenosine
  modified_base 53: mod_base = OTHER; note = 2'-O-Methyl-guanosine
  modified_base 54: mod_base = OTHER; note = 2'-O-Methyl-guanosine
  modified_base 55: mod_base = OTHER; note = 2'-O-Methyl-cytidine
  modified_base 56: mod_base = OTHER; note = 2'-O-Methyl-uridine
  modified_base 57: mod_base = OTHER; note = 2'-O-Methyl-adenosine
  modified_base 60: mod_base = OTHER; note = 2'-O-Methyl-cytidine
  modified_base 61: mod_base = OTHER; note = 2'-O-Methyl-cytidine
  modified_base 64: mod_base = OTHER; note = uridine phosphorothioate
  modified_base 66: mod_base = OTHER; note = 2'-O-Methyl-uridine
  modified_base 67: mod_base = OTHER; note = 2'-O-Methyl-cytidine
  modified_base 70: mod_base = OTHER; note = 2'-O-Methyl-cytidine
  modified_base 71: mod_base = OTHER; note = 2'-O-Methyl-uridine
  modified_base 72: mod_base = OTHER; note = 2'-O-Methyl-uridine
  modified_base 74: mod_base = OTHER; note = 2'-O-Methyl-adenosine
  modified_base 75: mod_base = OTHER; note = 2'-O-Methyl-adenosine
  modified_base 76: mod_base = OTHER; note = 2'-O-Methyl-adenosine
  modified_base 77: mod_base = OTHER; note = 2'-O-Methyl-adenosine
  modified_base 78: mod_base = OTHER; note = 2'-O-Methyl-adenosine
  modified_base 79: mod_base = OTHER; note = 2'-O-Methyl-guanosine
  modified_base 80: mod_base = OTHER; note = 2'-O-Methyl-uridine
  modified_base 81: mod_base = OTHER; note = 2'-O-Methyl-guanosine
  modified_base 83: mod_base = OTHER; note = 2'-O-Methyl-cytidine
  modified_base 84: mod_base = OTHER; note = 2'-O-Methyl-adenosine
  modified_base 85: mod_base = OTHER; note = 2'-O-Methyl-cytidine
  modified_base 86: mod_base = OTHER; note = 2'-O-Methyl-cytidine
  modified_base 87: mod_base = OTHER; note = 2'-O-Methyl-guanosine
  modified_base 88: mod_base = OTHER; note = 2'-O-Methyl-adenosine
  modified_base 89: mod_base = OTHER; note = 2'-O-Methyl-guanosine
  modified_base 90: mod_base = OTHER; note = 2'-O-Methyl-uridine
  modified_base 91: mod_base = OTHER; note = 2'-O-Methyl-cytidine
  modified_base 92: mod_base = OTHER; note = 2'-O-Methyl-guanosine
  modified_base 93: mod_base = OTHER; note = 2'-O-Methyl-guanosine
  modified_base 94: mod_base = OTHER; note = 2'-O-Methyl-uridine
  modified_base 95: mod_base = OTHER; note = 2'-O-Methyl-guanosine
  modified_base 96: mod_base = OTHER; note = 2'-O-Methyl-cytidine
  modified_base 97: mod_base = OTHER; note = 2'-O-Methyl-uridine phosphorothioate
  modified_base 98: mod_base = OTHER; note = 2'-O-Methyl-uridine phosphorothioate
  modified_base 99: mod_base = OTHER; note = 2'-O-Methyl-uridine phosphorothioate
  modified_base 100: mod_base = OTHER; note = 2'-O-Methyl-uridine
  misc_difference 101: note = modified_base - a, c, u, g, unknown or other - a, c, g, inosine, u, deoxyadenosine, deoxyguanosine, deoxycytidine, deoxyinosine, thymine, ribonebularine, 2'-O-methylnebularine, or 2'-deoxynebularine
  misc_difference 102: note = modified_base - a, c, u, g, unknown or other - a, c, g, inosine, u, deoxyadenosine, deoxyguanosine, deoxycytidine, deoxyinosine, thymine, ribonebularine, 2'-O-methylnebularine, or 2'-deoxynebularine
  misc_difference 103: note = modified_base - a, c, u, g, unknown or other - a, c, g, inosine, u, deoxyadenosine, deoxyguanosine, deoxycytidine, deoxyinosine, thymine, ribonebularine, 2'-O-methylnebularine, or 2'-deoxynebularine

SEQ ID NO: 1842 - RNA, 103 nt, synthetic construct; identical to SEQ ID NO: 1795
  source 1..103: mol_type = other RNA; note = Description of Artificial Sequence: Synthetic polynucleotide
  modified_base 1: mod_base = OTHER; note = 2'-O-Methyl-cytidine phosphorothioate
  modified_base 2: mod_base = OTHER; note = 2'-O-Methyl-cytidine phosphorothioate
  modified_base 3: mod_base = OTHER; note = 2'-O-Methyl-cytidine
  modified_base 21: mod_base = OTHER; note = 2'-O-Methyl-guanosine
  modified_base 25: mod_base = OTHER; note = uridine phosphorothioate
  modified_base 28: mod_base = OTHER; note = 2'-O-Methyl-adenosine
  modified_base 29: mod_base = OTHER; note = 2'-O-Methyl-guanosine
  modified_base 30: mod_base = OTHER; note = 2'-O-Methyl-cytidine
  modified_base 31: mod_base = OTHER; note = 2'-O-Methyl-uridine
  modified_base 32: mod_base = OTHER; note = 2'-O-Methyl-adenosine
  modified_base 34: mod_base = OTHER; note = 2'-O-Methyl-adenosine
  modified_base 35: mod_base = OTHER; note = 2'-O-Methyl-adenosine
  modified_base 36: mod_base = OTHER; note = 2'-O-Methyl-adenosine
  modified_base 37: mod_base = OTHER; note = 2'-O-Methyl-uridine
  modified_base 38: mod_base = OTHER; note = 2'-O-Methyl-adenosine
  modified_base 39: mod_base = OTHER; note = 2'-O-Methyl-guanosine
  modified_base 40: mod_base = OTHER; note = 2'-O-Methyl-cytidine
  modified_base 41: mod_base = OTHER; note = 2'-O-Methyl-adenosine
  modified_base 42: mod_base = OTHER; note = 2'-O-Methyl-adenosine
  modified_base 45: mod_base = OTHER; note = uridine phosphorothioate
  modified_base 46: mod_base = OTHER; note = 2'-O-Methyl-adenosine
  modified_base 48: mod_base = OTHER; note = 2'-O-Methyl-adenosine
  modified_base 50: mod_base = OTHER; note = 2'-O-Methyl-uridine
  modified_base 52: mod_base = OTHER; note = 2'-O-Methyl-adenosine
  modified_base 53: mod_base = OTHER; note = 2'-O-Methyl-guanosine
  modified_base 54: mod_base = OTHER; note = 2'-O-Methyl-guanosine
  modified_base 57: mod_base = OTHER; note = 2'-O-Methyl-adenosine
  modified_base 61: mod_base = OTHER; note = 2'-O-Methyl-cytidine
  modified_base 64: mod_base = OTHER; note = uridine phosphorothioate
  modified_base 66: mod_base = OTHER; note = 2'-O-Methyl-uridine
  modified_base 67: mod_base = OTHER; note = 2'-O-Methyl-cytidine
  modified_base 70: mod_base = OTHER; note = 2'-O-Methyl-cytidine
  modified_base 71: mod_base = OTHER; note = 2'-O-Methyl-uridine
  modified_base 72: mod_base = OTHER; note = 2'-O-Methyl-uridine
  modified_base 74: mod_base = OTHER; note = 2'-O-Methyl-adenosine
  modified_base 75: mod_base = OTHER; note = 2'-O-Methyl-adenosine
  modified_base 76: mod_base = OTHER; note = 2'-O-Methyl-adenosine
  modified_base 77: mod_base = OTHER; note = 2'-O-Methyl-adenosine
  modified_base 78: mod_base = OTHER; note = 2'-O-Methyl-adenosine
  modified_base 79: mod_base = OTHER; note = 2'-O-Methyl-guanosine
  modified_base 80: mod_base = OTHER; note = 2'-O-Methyl-uridine
  modified_base 82: mod_base = OTHER; note = 2'-O-Methyl-guanosine
  modified_base 83: mod_base = OTHER; note = 2'-O-Methyl-cytidine
  modified_base 84: mod_base = OTHER; note = 2'-O-Methyl-adenosine
  modified_base 85: mod_base = OTHER; note = 2'-O-Methyl-cytidine
  modified_base 86: mod_base = OTHER; note = 2'-O-Methyl-cytidine
  modified_base 87: mod_base = OTHER; note = 2'-O-Methyl-guanosine
  modified_base 89: mod_base = OTHER; note = 2'-O-Methyl-guanosine
  modified_base 92: mod_base = OTHER; note = 2'-O-Methyl-guanosine
  modified_base 93: mod_base = OTHER; note = 2'-O-Methyl-guanosine
  modified_base 94: mod_base = OTHER; note = 2'-O-Methyl-uridine
  modified_base 95: mod_base = OTHER; note = 2'-O-Methyl-guanosine
  modified_base 96: mod_base = OTHER; note = 2'-O-Methyl-cytidine
  modified_base 97: mod_base = OTHER; note = 2'-O-Methyl-uridine phosphorothioate
  modified_base 98: mod_base = OTHER; note = 2'-O-Methyl-uridine phosphorothioate
  modified_base 99: mod_base = OTHER; note = 2'-O-Methyl-uridine phosphorothioate
  modified_base 100: mod_base = OTHER; note = 2'-O-Methyl-uridine
  misc_difference 101: note = modified_base - a, c, u, g, unknown or other - a, c, g, inosine, u, deoxyadenosine, deoxyguanosine, deoxycytidine, deoxyinosine, thymine, ribonebularine, 2'-O-methylnebularine, or 2'-deoxynebularine
  misc_difference 102: note = modified_base - a, c, u, g, unknown or other - a, c, g, inosine, u, deoxyadenosine, deoxyguanosine, deoxycytidine, deoxyinosine, thymine, ribonebularine, 2'-O-methylnebularine, or 2'-deoxynebularine
  misc_difference 103: note = modified_base - a, c, u, g, unknown or other - a, c, g, inosine, u, deoxyadenosine, deoxyguanosine, deoxycytidine, deoxyinosine, thymine, ribonebularine, 2'-O-methylnebularine, or 2'-deoxynebularine

SEQ ID NO: 1843 - RNA, 103 nt, synthetic construct; identical to SEQ ID NO: 1796
  source 1..103: mol_type = other RNA; note = Description of Artificial Sequence: Synthetic polynucleotide
  modified_base 1: mod_base = OTHER; note = 2'-O-Methyl-guanosine phosphorothioate
  modified_base 2: mod_base = OTHER; note = 2'-O-Methyl-adenosine phosphorothioate
  modified_base 3: mod_base = OTHER; note = 2'-O-Methyl-guanosine
  modified_base 21: mod_base = OTHER; note = 2'-O-Methyl-guanosine
  modified_base 25: mod_base = OTHER; note = uridine phosphorothioate
  modified_base 28: mod_base = OTHER; note = 2'-O-Methyl-adenosine
  modified_base 29: mod_base = OTHER; note = 2'-O-Methyl-guanosine
  modified_base 30: mod_base = OTHER; note = 2'-O-Methyl-cytidine
  modified_base 31: mod_base = OTHER; note = 2'-O-Methyl-uridine
  modified_base 32: mod_base = OTHER; note = 2'-O-Methyl-adenosine
  modified_base 34: mod_base = OTHER; note = 2'-O-Methyl-adenosine
  modified_base 35: mod_base = OTHER; note = 2'-O-Methyl-adenosine
  modified_base 36: mod_base = OTHER; note = 2'-O-Methyl-adenosine
  modified_base 37: mod_base = OTHER; note = 2'-O-Methyl-uridine
  modified_base 38: mod_base = OTHER; note = 2'-O-Methyl-adenosine
  modified_base 39: mod_base = OTHER; note = 2'-O-Methyl-guanosine
  modified_base 40: mod_base = OTHER; note = 2'-O-Methyl-cytidine
  modified_base 41: mod_base = OTHER; note = 2'-O-Methyl-adenosine
  modified_base 42: mod_base = OTHER; note = 2'-O-Methyl-adenosine
  modified_base 45: mod_base = OTHER; note = uridine phosphorothioate
  modified_base 46: mod_base = OTHER; note = 2'-O-Methyl-adenosine
  modified_base 48: mod_base = OTHER; note = 2'-O-Methyl-adenosine
  modified_base 50: mod_base = OTHER; note = 2'-O-Methyl-uridine
  modified_base 52: mod_base = OTHER; note = 2'-O-Methyl-adenosine
  modified_base 53: mod_base = OTHER; note = 2'-O-Methyl-guanosine
  modified_base 54: mod_base = OTHER; note = 2'-O-Methyl-guanosine
  modified_base 57: mod_base = OTHER; note = 2'-O-Methyl-adenosine
  modified_base 61: mod_base = OTHER; note = 2'-O-Methyl-cytidine
  modified_base 64: mod_base = OTHER; note = uridine phosphorothioate
  modified_base 66: mod_base = OTHER; note = 2'-O-Methyl-uridine
  modified_base 67: mod_base = OTHER; note = 2'-O-Methyl-cytidine
  modified_base 70: mod_base = OTHER; note = 2'-O-Methyl-cytidine
  modified_base 71: mod_base = OTHER; note = 2'-O-Methyl-uridine
  modified_base 72: mod_base = OTHER; note = 2'-O-Methyl-uridine
  modified_base 74: mod_base = OTHER; note = 2'-O-Methyl-adenosine
  modified_base 75: mod_base = OTHER; note = 2'-O-Methyl-adenosine
  modified_base 76: mod_base = OTHER; note = 2'-O-Methyl-adenosine
  modified_base 77: mod_base = OTHER; note = 2'-O-Methyl-adenosine
  modified_base 78: mod_base = OTHER; note = 2'-O-Methyl-adenosine
  modified_base 79: mod_base = OTHER; note = 2'-O-Methyl-guanosine
  modified_base 80: mod_base = OTHER; note = 2'-O-Methyl-uridine
  modified_base 82: mod_base = OTHER; note = 2'-O-Methyl-guanosine
  modified_base 83: mod_base = OTHER; note = 2'-O-Methyl-cytidine
  modified_base 84: mod_base = OTHER; note = 2'-O-Methyl-adenosine
  modified_base 85: mod_base = OTHER; note = 2'-O-Methyl-cytidine
  modified_base 86: mod_base = OTHER; note = 2'-O-Methyl-cytidine
  modified_base 87: mod_base = OTHER; note = 2'-O-Methyl-guanosine
  modified_base 89: mod_base = OTHER; note = 2'-O-Methyl-guanosine
  modified_base 92: mod_base = OTHER; note = 2'-O-Methyl-guanosine
  modified_base 93: mod_base = OTHER; note = 2'-O-Methyl-guanosine
  modified_base 94: mod_base = OTHER; note = 2'-O-Methyl-uridine
  modified_base 95: mod_base = OTHER; note = 2'-O-Methyl-guanosine
  modified_base 96: mod_base = OTHER; note = 2'-O-Methyl-cytidine
  modified_base 97: mod_base = OTHER; note = 2'-O-Methyl-uridine phosphorothioate
  modified_base 98: mod_base = OTHER; note = 2'-O-Methyl-uridine phosphorothioate
  modified_base 99: mod_base = OTHER; note = 2'-O-Methyl-uridine phosphorothioate
  modified_base 100: mod_base = OTHER; note = 2'-O-Methyl-uridine
  misc_difference 101: note = modified_base - a, c, u, g, unknown or other - a, c, g, inosine, u, deoxyadenosine, deoxyguanosine, deoxycytidine, deoxyinosine, thymine, ribonebularine, 2'-O-methylnebularine, or 2'-deoxynebularine
  misc_difference 102: note = modified_base - a, c, u, g, unknown or other - a, c, g, inosine, u, deoxyadenosine, deoxyguanosine, deoxycytidine, deoxyinosine, thymine, ribonebularine, 2'-O-methylnebularine, or 2'-deoxynebularine
  misc_difference 103: note = modified_base - a, c, u, g, unknown or other - a, c, g, inosine, u, deoxyadenosine, deoxyguanosine, deoxycytidine, deoxyinosine, thymine, ribonebularine, 2'-O-methylnebularine, or 2'-deoxynebularine

SEQ ID NO: 1844 - RNA, 102 nt, synthetic construct
  source 1..102: mol_type = other RNA; note = Description of Artificial Sequence: Synthetic polynucleotide
  modified_base 1: mod_base = OTHER; note = 2'-O-Methyl-guanosine phosphorothioate
  modified_base 2: mod_base = OTHER; note = 2'-O-Methyl-adenosine phosphorothioate
  modified_base 20: mod_base = OTHER; note = 2'-O-Methyl-guanosine
  modified_base 24: mod_base = OTHER; note = uridine phosphorothioate
  modified_base 27: mod_base = OTHER; note = 2'-O-Methyl-adenosine
  modified_base 28: mod_base = OTHER; note = 2'-O-Methyl-guanosine
  modified_base 29: mod_base = OTHER; note = 2'-O-Methyl-cytidine
  modified_base 30: mod_base = OTHER; note = 2'-O-Methyl-uridine
  modified_base 31: mod_base = OTHER; note = 2'-O-Methyl-adenosine
  modified_base 32: mod_base = OTHER; note = 2'-O-Methyl-guanosine
  modified_base 33: mod_base = OTHER; note = 2'-O-Methyl-adenosine
  modified_base 34: mod_base = OTHER; note = 2'-O-Methyl-adenosine
  modified_base 35: mod_base = OTHER; note = 2'-O-Methyl-adenosine
  modified_base 36: mod_base = OTHER; note = 2'-O-Methyl-uridine
  modified_base 37: mod_base = OTHER; note = 2'-O-Methyl-adenosine
  modified_base 38: mod_base = OTHER; note = 2'-O-Methyl-guanosine
  modified_base 39: mod_base = OTHER; note = 2'-O-Methyl-cytidine
  modified_base 40: mod_base = OTHER; note = 2'-O-Methyl-adenosine
  modified_base 41: mod_base = OTHER; note = 2'-O-Methyl-adenosine
  modified_base 44: mod_base = OTHER; note = uridine phosphorothioate
  modified_base 45: mod_base = OTHER; note = 2'-O-Methyl-adenosine
  modified_base 47: mod_base = OTHER; note = 2'-O-Methyl-adenosine
  modified_base 49: mod_base = OTHER; note = 2'-O-Methyl-uridine
  modified_base 51: mod_base = OTHER; note = 2'-O-Methyl-adenosine
  modified_base 52: mod_base = OTHER; note = 2'-O-Methyl-guanosine
  modified_base 53: mod_base = OTHER; note = 2'-O-Methyl-guanosine
  modified_base 54: mod_base = OTHER; note = 2'-O-Methyl-cytidine
  modified_base 55: mod_base = OTHER; note = 2'-O-Methyl-uridine
  modified_base 56: mod_base = OTHER; note = 2'-O-Methyl-adenosine
  modified_base 59: mod_base = OTHER; note = 2'-O-Methyl-cytidine
  modified_base 60: mod_base = OTHER; note = 2'-O-Methyl-cytidine
  modified_base 63: mod_base = OTHER; note = uridine phosphorothioate
  modified_base 65: mod_base = OTHER; note = 2'-O-Methyl-uridine
  modified_base 66: mod_base = OTHER; note = 2'-O-Methyl-cytidine
  modified_base 69: mod_base = OTHER; note = 2'-O-Methyl-cytidine
  modified_base 70: mod_base = OTHER; note = 2'-O-Methyl-uridine
  modified_base 71: mod_base = OTHER; note = 2'-O-Methyl-uridine
  modified_base 72: mod_base = OTHER; note = 2'-O-Methyl-guanosine
  modified_base 73: mod_base = OTHER; note = 2'-O-Methyl-adenosine
  modified_base 74: mod_base = OTHER; note = 2'-O-Methyl-adenosine
  modified_base 75: mod_base = OTHER; note = 2'-O-Methyl-adenosine
  modified_base 76: mod_base = OTHER; note = 2'-O-Methyl-adenosine
  modified_base 77: mod_base = OTHER; note = 2'-O-Methyl-adenosine
  modified_base 78: mod_base = OTHER; note = 2'-O-Methyl-guanosine
  modified_base 79: mod_base = OTHER; note = 2'-O-Methyl-uridine
  modified_base 80: mod_base = OTHER; note = 2'-O-Methyl-guanosine
  modified_base 82: mod_base = OTHER; note = 2'-O-Methyl-cytidine
  modified_base 83: mod_base = OTHER; note = 2'-O-Methyl-adenosine
  modified_base 84: mod_base = OTHER; note = 2'-O-Methyl-cytidine
  modified_base 85: mod_base = OTHER; note = 2'-O-Methyl-cytidine
  modified_base 86: mod_base = OTHER; note = 2'-O-Methyl-guanosine
  modified_base 87: mod_base = OTHER; note = 2'-O-Methyl-adenosine
  modified_base 88: mod_base = OTHER; note = 2'-O-Methyl-guanosine
  modified_base 89: mod_base = OTHER; note = 2'-O-Methyl-uridine
  modified_base 90: mod_base = OTHER; note = 2'-O-Methyl-cytidine
  modified_base 91: mod_base = OTHER; note = 2'-O-Methyl-guanosine
  modified_base 92: mod_base = OTHER; note = 2'-O-Methyl-guanosine
  modified_base 93: mod_base = OTHER; note = 2'-O-Methyl-uridine
  modified_base 94: mod_base = OTHER; note = 2'-O-Methyl-guanosine
  modified_base 95: mod_base = OTHER; note = 2'-O-Methyl-cytidine
  modified_base 96: mod_base = OTHER; note = 2'-O-Methyl-uridine phosphorothioate
  modified_base 97: mod_base = OTHER; note = 2'-O-Methyl-uridine phosphorothioate
  modified_base 98: mod_base = OTHER; note = 2'-O-Methyl-uridine phosphorothioate
  modified_base 99: mod_base = OTHER; note = 2'-O-Methyl-uridine
  misc_difference 100: note = modified_base - a, c, u, g, unknown or other - a, c, g, inosine, u, deoxyadenosine, deoxyguanosine, deoxycytidine, deoxyinosine, thymine, ribonebularine, 2'-O-methylnebularine, or 2'-deoxynebularine
  misc_difference 101: note = modified_base - a, c, u, g, unknown or other - a, c, g, inosine, u, deoxyadenosine, deoxyguanosine, deoxycytidine, deoxyinosine, thymine, ribonebularine, 2'-O-methylnebularine, or 2'-deoxynebularine
  misc_difference 102: note = modified_base - a, c, u, g, unknown or other - a, c, g, inosine, u, deoxyadenosine, deoxyguanosine, deoxycytidine, deoxyinosine, thymine, ribonebularine, 2'-O-methylnebularine, or 2'-deoxynebularine
gaatacctgagtaactttcgttttagagctagaaatagcaagttaaaataaggctagtccgttatcaacttgaaaaagtggcaccgagtcggtgcttttnnn

SEQ ID NO: 1845 - RNA, 103 nt, synthetic construct; identical to SEQ ID NO: 1797
  source 1..103: mol_type = other RNA; note = Description of Artificial Sequence: Synthetic polynucleotide
  modified_base 1: mod_base = OTHER; note = 2'-O-Methyl-cytidine phosphorothioate
  modified_base 2: mod_base = OTHER; note = 2'-O-Methyl-adenosine phosphorothioate
  modified_base 3: mod_base = OTHER; note = 2'-O-Methyl-guanosine
  modified_base 21: mod_base = OTHER; note = 2'-O-Methyl-guanosine
  modified_base 25: mod_base = OTHER; note = uridine phosphorothioate
  modified_base 28: mod_base = OTHER; note = 2'-O-Methyl-adenosine
  modified_base 29: mod_base = OTHER; note = 2'-O-Methyl-guanosine
  modified_base 30: mod_base = OTHER; note = 2'-O-Methyl-cytidine
  modified_base 31: mod_base = OTHER; note = 2'-O-Methyl-uridine
  modified_base 32: mod_base = OTHER; note = 2'-O-Methyl-adenosine
  modified_base 34: mod_base = OTHER; note = 2'-O-Methyl-adenosine
  modified_base 35: mod_base = OTHER; note = 2'-O-Methyl-adenosine
  modified_base 36: mod_base = OTHER; note = 2'-O-Methyl-adenosine
  modified_base 37: mod_base = OTHER; note = 2'-O-Methyl-uridine
  modified_base 38: mod_base = OTHER; note = 2'-O-Methyl-adenosine
  modified_base 39: mod_base = OTHER; note = 2'-O-Methyl-guanosine
  modified_base 40: mod_base = OTHER; note = 2'-O-Methyl-cytidine
  modified_base 41: mod_base = OTHER; note = 2'-O-Methyl-adenosine
  modified_base 42: mod_base = OTHER; note = 2'-O-Methyl-adenosine
  modified_base 45: mod_base = OTHER; note = uridine phosphorothioate
  modified_base 46: mod_base = OTHER; note = 2'-O-Methyl-adenosine
  modified_base 48: mod_base = OTHER; note = 2'-O-Methyl-adenosine
  modified_base 50: mod_base = OTHER; note = 2'-O-Methyl-uridine
  modified_base 52: mod_base = OTHER; note = 2'-O-Methyl-adenosine
  modified_base 53: mod_base = OTHER; note = 2'-O-Methyl-guanosine
  modified_base 54: mod_base = OTHER; note = 2'-O-Methyl-guanosine
  modified_base 55: mod_base = OTHER; note = 2'-O-Methyl-cytidine
  modified_base 56: mod_base = OTHER; note = 2'-O-Methyl-uridine
  modified_base 57: mod_base = OTHER; note = 2'-O-Methyl-adenosine
  modified_base 60: mod_base = OTHER; note = 2'-O-Methyl-cytidine
  modified_base 61: mod_base = OTHER; note = 2'-O-Methyl-cytidine
  modified_base 64: mod_base = OTHER; note = uridine phosphorothioate
  modified_base 66: mod_base = OTHER; note = 2'-O-Methyl-uridine
  modified_base 67: mod_base = OTHER; note = 2'-O-Methyl-cytidine
  modified_base 70: mod_base = OTHER; note = 2'-O-Methyl-cytidine
  modified_base 71: mod_base = OTHER; note = 2'-O-Methyl-uridine
  modified_base 72: mod_base = OTHER; note = 2'-O-Methyl-uridine
  modified_base 74: mod_base = OTHER; note = 2'-O-Methyl-adenosine
  modified_base 75: mod_base = OTHER; note = 2'-O-Methyl-adenosine
  modified_base 76: mod_base = OTHER; note = 2'-O-Methyl-adenosine
  modified_base 77: mod_base = OTHER; note = 2'-O-Methyl-adenosine
  modified_base 78: mod_base = OTHER; note = 2'-O-Methyl-adenosine
  modified_base 79: mod_base = OTHER; note = 2'-O-Methyl-guanosine
  modified_base 80: mod_base = OTHER; note = 2'-O-Methyl-uridine
  modified_base 81: mod_base = OTHER; note = 2'-O-Methyl-guanosine
  modified_base 83: mod_base = OTHER; note = 2'-O-Methyl-cytidine
  modified_base 84: mod_base = OTHER; note = 2'-O-Methyl-adenosine
  modified_base 85: mod_base = OTHER; note = 2'-O-Methyl-cytidine
  modified_base 86: mod_base = OTHER; note = 2'-O-Methyl-cytidine
  modified_base 87: mod_base = OTHER; note = 2'-O-Methyl-guanosine
  modified_base 88: mod_base = OTHER; note = 2'-O-Methyl-adenosine
  modified_base 89: mod_base = OTHER; note = 2'-O-Methyl-guanosine
  modified_base 90: mod_base = OTHER; note = 2'-O-Methyl-uridine
  modified_base 91: mod_base = OTHER; note = 2'-O-Methyl-cytidine
  modified_base 92: mod_base = OTHER; note = 2'-O-Methyl-guanosine
  modified_base 93: mod_base = OTHER; note = 2'-O-Methyl-guanosine
  modified_base 94: mod_base = OTHER; note = 2'-O-Methyl-uridine
  modified_base 95: mod_base = OTHER; note = 2'-O-Methyl-guanosine
  modified_base 96: mod_base = OTHER; note = 2'-O-Methyl-cytidine
  modified_base 97: mod_base = OTHER; note = 2'-O-Methyl-uridine phosphorothioate
  modified_base 98: mod_base = OTHER; note = 2'-O-Methyl-uridine phosphorothioate
  modified_base 99: mod_base = OTHER; note = 2'-O-Methyl-uridine phosphorothioate
  modified_base 100: mod_base = OTHER; note = 2'-O-Methyl-uridine
  misc_difference 101: note = modified_base - a, c, u, g, unknown or other - a, c, g, inosine, u, deoxyadenosine, deoxyguanosine, deoxycytidine, deoxyinosine, thymine, ribonebularine, 2'-O-methylnebularine, or 2'-deoxynebularine
  misc_difference 102: note = modified_base - a, c, u, g, unknown or other - a, c, g, inosine, u, deoxyadenosine, deoxyguanosine, deoxycytidine, deoxyinosine, thymine, ribonebularine, 2'-O-methylnebularine, or 2'-deoxynebularine
  misc_difference 103: note = modified_base - a, c, u, g, unknown or other - a, c, g, inosine, u, deoxyadenosine, deoxyguanosine, deoxycytidine, deoxyinosine, thymine, ribonebularine, 2'-O-methylnebularine, or 2'-deoxynebularine

SEQ ID NO: 1846 - RNA, 103 nt, synthetic construct; identical to SEQ ID NO: 1797
  source 1..103: mol_type = other RNA; note = Description of Artificial Sequence: Synthetic polynucleotide
  modified_base 1: mod_base = OTHER; note = 2'-O-Methyl-cytidine phosphorothioate
  modified_base 2: mod_base = OTHER; note = 2'-O-Methyl-adenosine phosphorothioate
  modified_base 3: mod_base = OTHER; note = 2'-O-Methyl-guanosine phosphorothioate
  modified_base 21: mod_base = OTHER; note = 2'-O-Methyl-guanosine
  modified_base 28: mod_base = OTHER; note = 2'-O-Methyl-adenosine
  modified_base 29: mod_base = OTHER; note = 2'-O-Methyl-guanosine
  modified_base 30: mod_base = OTHER; note = 2'-O-Methyl-cytidine
  modified_base 31: mod_base = OTHER; note = 2'-O-Methyl-uridine
  modified_base 32: mod_base = OTHER; note = 2'-O-Methyl-adenosine
  modified_base 34: mod_base = OTHER; note = 2'-O-Methyl-adenosine
  modified_base 35: mod_base = OTHER; note = 2'-O-Methyl-adenosine
  modified_base 36: mod_base = OTHER; note = 2'-O-Methyl-adenosine
  modified_base 37: mod_base = OTHER; note = 2'-O-Methyl-uridine
  modified_base 38: mod_base = OTHER; note = 2'-O-Methyl-adenosine
  modified_base 39: mod_base = OTHER; note = 2'-O-Methyl-guanosine
  modified_base 40: mod_base = OTHER; note = 2'-O-Methyl-cytidine
  modified_base 41: mod_base = OTHER; note = 2'-O-Methyl-adenosine
  modified_base 42: mod_base = OTHER; note = 2'-O-Methyl-adenosine
  modified_base 46: mod_base = OTHER; note = 2'-O-Methyl-adenosine
  modified_base 48: mod_base = OTHER; note = 2'-O-Methyl-adenosine
  modified_base 50: mod_base = OTHER; note = 2'-O-Methyl-uridine
  modified_base 52: mod_base = OTHER; note = 2'-O-Methyl-adenosine
  modified_base 53: mod_base = OTHER; note = 2'-O-Methyl-guanosine
  modified_base 54: mod_base = OTHER; note = 2'-O-Methyl-guanosine
  modified_base 57: mod_base = OTHER; note = 2'-O-Methyl-adenosine
  modified_base 61: mod_base = OTHER; note = 2'-O-Methyl-cytidine
  modified_base 66: mod_base = OTHER; note = 2'-O-Methyl-uridine
  modified_base 67: mod_base = OTHER; note = 2'-O-Methyl-cytidine
  modified_base 70: mod_base = OTHER; note = 2'-O-Methyl-cytidine
  modified_base 71: mod_base = OTHER; note = 2'-O-Methyl-uridine
  modified_base 72: mod_base = OTHER; note = 2'-O-Methyl-uridine
  modified_base 74: mod_base = OTHER; note = 2'-O-Methyl-adenosine
  modified_base 75: mod_base = OTHER; note = 2'-O-Methyl-adenosine
  modified_base 76: mod_base = OTHER; note = 2'-O-Methyl-adenosine
  modified_base 77: mod_base = OTHER; note = 2'-O-Methyl-adenosine
  modified_base 78: mod_base = OTHER; note = 2'-O-Methyl-adenosine
  modified_base 79: mod_base = OTHER; note = 2'-O-Methyl-guanosine
  modified_base 80: mod_base = OTHER; note = 2'-O-Methyl-uridine
  modified_base 82: mod_base = OTHER; note = 2'-O-Methyl-guanosine
  modified_base 83: mod_base = OTHER; note = 2'-O-Methyl-cytidine
  modified_base 84: mod_base = OTHER; note = 2'-O-Methyl-adenosine
  modified_base 85: mod_base = OTHER; note = 2'-O-Methyl-cytidine
  modified_base 86: mod_base = OTHER; note = 2'-O-Methyl-cytidine
  modified_base 87: mod_base = OTHER; note = 2'-O-Methyl-guanosine
  modified_base 89: mod_base = OTHER; note = 2'-O-Methyl-guanosine
  modified_base 92: mod_base = OTHER; note = 2'-O-Methyl-guanosine
  modified_base 93: mod_base = OTHER; note = 2'-O-Methyl-guanosine
  modified_base 94: mod_base = OTHER; note = 2'-O-Methyl-uridine
  modified_base 95: mod_base = OTHER; note = 2'-O-Methyl-guanosine
  modified_base 96: mod_base = OTHER; note = 2'-O-Methyl-cytidine
  modified_base 97: mod_base = OTHER; note = 2'-O-Methyl-uridine
  modified_base 98: mod_base = OTHER; note = 2'-O-Methyl-uridine phosphorothioate
  modified_base 99: mod_base = OTHER; note = 2'-O-Methyl-uridine phosphorothioate
  modified_base 100: mod_base = OTHER; note = 2'-O-Methyl-uridine
  misc_difference 101: note = modified_base - a, c, u, g, unknown or other - a, c, g, inosine, u, deoxyadenosine, deoxyguanosine, deoxycytidine, deoxyinosine, thymine, ribonebularine, 2'-O-methylnebularine, or 2'-deoxynebularine
  misc_difference 102: note = modified_base - a, c, u, g, unknown or other - a, c, g, inosine, u, deoxyadenosine, deoxyguanosine, deoxycytidine, deoxyinosine, thymine, ribonebularine, 2'-O-methylnebularine, or 2'-deoxynebularine
  misc_difference 103: note = modified_base - a, c, u, g, unknown or other - a, c, g, inosine, u, deoxyadenosine, deoxyguanosine, deoxycytidine, deoxyinosine, thymine, ribonebularine, 2'-O-methylnebularine, or 2'-deoxynebularine

SEQ ID NO: 1847 - RNA, 103 nt, synthetic construct; identical to SEQ ID NO: 1797
  source 1..103: mol_type = other RNA; note = Description of Artificial Sequence: Synthetic polynucleotide
  modified_base 1: mod_base = OTHER; note = 2'-O-Methyl-cytidine phosphorothioate
  modified_base 2: mod_base = OTHER; note = 2'-O-Methyl-adenosine phosphorothioate
  modified_base 3: mod_base = OTHER; note = 2'-O-Methyl-guanosine phosphorothioate
  modified_base 21: mod_base = OTHER; note = 2'-O-Methyl-guanosine
  modified_base 28: mod_base = OTHER; note = 2'-O-Methyl-adenosine
  modified_base 29: mod_base = OTHER; note = 2'-O-Methyl-guanosine
  modified_base 30: mod_base = OTHER; note = 2'-O-Methyl-cytidine
  modified_base 31: mod_base = OTHER; note = 2'-O-Methyl-uridine
  modified_base 32: mod_base = OTHER; note = 2'-O-Methyl-adenosine
  modified_base 33: mod_base = OTHER; note = 2'-O-Methyl-guanosine
  modified_base 34: mod_base = OTHER; note = 2'-O-Methyl-adenosine
  modified_base 35: mod_base = OTHER; note = 2'-O-Methyl-adenosine
  modified_base 36: mod_base = OTHER; note = 2'-O-Methyl-adenosine
  modified_base 37: mod_base = OTHER; note = 2'-O-Methyl-uridine
  modified_base 38: mod_base = OTHER; note = 2'-O-Methyl-adenosine
  modified_base 39: mod_base = OTHER; note = 2'-O-Methyl-guanosine
  modified_base 40: mod_base = OTHER; note = 2'-O-Methyl-cytidine
  modified_base 41: mod_base = OTHER; note = 2'-O-Methyl-adenosine
  modified_base 42: mod_base = OTHER; note = 2'-O-Methyl-adenosine
  modified_base 46: mod_base = OTHER; note = 2'-O-Methyl-adenosine
  modified_base 48: mod_base = OTHER; note = 2'-O-Methyl-adenosine
  modified_base 50: mod_base = OTHER; note = 2'-O-Methyl-uridine
  modified_base 52: mod_base = OTHER; note = 2'-O-Methyl-adenosine
  modified_base 53: mod_base = OTHER; note = 2'-O-Methyl-guanosine
  modified_base 54: mod_base = OTHER; note = 2'-O-Methyl-guanosine
  modified_base 55: mod_base = OTHER; note = 2'-O-Methyl-cytidine
  modified_base 56: mod_base = OTHER; note = 2'-O-Methyl-uridine
  modified_base 57: mod_base = OTHER; note = 2'-O-Methyl-adenosine
  modified_base 60: mod_base = OTHER; note = 2'-O-Methyl-cytidine
  modified_base 61: mod_base = OTHER; note = 2'-O-Methyl-cytidine
  modified_base 66: mod_base = OTHER; note = 2'-O-Methyl-uridine
  modified_base 67: mod_base = OTHER; note = 2'-O-Methyl-cytidine
  modified_base 70: mod_base = OTHER; note = 2'-O-Methyl-cytidine
  modified_base 71: mod_base = OTHER; note = 2'-O-Methyl-uridine
  modified_base 72: mod_base = OTHER; note = 2'-O-Methyl-uridine
  modified_base 73: mod_base = OTHER; note = 2'-O-Methyl-guanosine
  modified_base 74: mod_base = OTHER; note = 2'-O-Methyl-adenosine
  modified_base 75: mod_base = OTHER; note = 2'-O-Methyl-adenosine
  modified_base 76: mod_base = OTHER; note = 2'-O-Methyl-adenosine
  modified_base 77: mod_base = OTHER; note = 2'-O-Methyl-adenosine
  modified_base 78: mod_base = OTHER; note = 2'-O-Methyl-adenosine
  modified_base 79: mod_base = OTHER; note = 2'-O-Methyl-guanosine
  modified_base 80: mod_base = OTHER; note = 2'-O-Methyl-uridine
  modified_base 81: mod_base = OTHER; note = 2'-O-Methyl-guanosine
  modified_base 83: mod_base = OTHER; note = 2'-O-Methyl-cytidine
  modified_base 84: mod_base = OTHER; note = 2'-O-Methyl-adenosine
  modified_base 85: mod_base = OTHER; note = 2'-O-Methyl-cytidine
  modified_base 86: mod_base = OTHER; note = 2'-O-Methyl-cytidine
  modified_base 87: mod_base = OTHER; note = 2'-O-Methyl-guanosine
  modified_base 88: mod_base = OTHER; note = 2'-O-Methyl-adenosine
  modified_base 89: mod_base = OTHER; note = 2'-O-Methyl-guanosine
  modified_base 90: mod_base = OTHER; note = 2'-O-Methyl-uridine
  modified_base 91: mod_base = OTHER; note = 2'-O-Methyl-cytidine
  modified_base 92: mod_base = OTHER; note = 2'-O-Methyl-guanosine
  modified_base 93: mod_base = OTHER; note = 2'-O-Methyl-guanosine
  modified_base 94: mod_base = OTHER; note = 2'-O-Methyl-uridine
  modified_base 95: mod_base = OTHER; note = 2'-O-Methyl-guanosine
  modified_base 96: mod_base = OTHER; note = 2'-O-Methyl-cytidine
  modified_base 97: mod_base = OTHER; note = 2'-O-Methyl-uridine
  modified_base 98: mod_base = OTHER; note = 2'-O-Methyl-uridine phosphorothioate
  modified_base 99: mod_base = OTHER; note = 2'-O-Methyl-uridine phosphorothioate
  modified_base 100: mod_base = OTHER; note = 2'-O-Methyl-uridine
  misc_difference 101: note = modified_base - a, c, u, g, unknown or other - a, c, g, inosine, u, deoxyadenosine, deoxyguanosine, deoxycytidine, deoxyinosine, thymine, ribonebularine, 2'-O-methylnebularine, or 2'-deoxynebularine
  misc_difference 102: note = modified_base - a, c, u, g, unknown or other - a, c, g, inosine, u, deoxyadenosine, deoxyguanosine, deoxycytidine, deoxyinosine, thymine, ribonebularine, 2'-O-methylnebularine, or 2'-deoxynebularine
  misc_difference 103: note = modified_base - a, c, u, g, unknown or other - a, c, g, inosine, u, deoxyadenosine, deoxyguanosine, deoxycytidine, deoxyinosine, thymine, ribonebularine, 2'-O-methylnebularine, or 2'-deoxynebularine

SEQ ID NO: 1848 - RNA, 103 nt, synthetic construct; identical to SEQ ID NO: 1795
  source 1..103: mol_type = other RNA; note = Description of Artificial Sequence: Synthetic polynucleotide
  modified_base 1: mod_base = OTHER; note = 2'-O-Methyl-cytidine phosphorothioate
  modified_base 2: mod_base = OTHER; note = 2'-O-Methyl-cytidine phosphorothioate
  modified_base 3: mod_base = OTHER; note = 2'-O-Methyl-cytidine phosphorothioate
  modified_base 21: mod_base = OTHER; note = 2'-O-Methyl-guanosine
  modified_base 28: mod_base = OTHER; note = 2'-O-Methyl-adenosine
  modified_base 29: mod_base = OTHER; note = 2'-O-Methyl-guanosine
  modified_base 30: mod_base = OTHER; note = 2'-O-Methyl-cytidine
  modified_base 31: mod_base = OTHER; note = 2'-O-Methyl-uridine
  modified_base 32: mod_base = OTHER; note = 2'-O-Methyl-adenosine
  modified_base 34: mod_base = OTHER; note = 2'-O-Methyl-adenosine
  modified_base 35: mod_base = OTHER; note = 2'-O-Methyl-adenosine
  modified_base 36: mod_base = OTHER; note = 2'-O-Methyl-adenosine
  modified_base 37: mod_base = OTHER; note = 2'-O-Methyl-uridine
  modified_base 38: mod_base = OTHER; note = 2'-O-Methyl-adenosine
  modified_base 39: mod_base = OTHER; note = 2'-O-Methyl-guanosine
  modified_base 40: mod_base = OTHER; note = 2'-O-Methyl-cytidine
  modified_base 41: mod_base = OTHER; note = 2'-O-Methyl-adenosine
  modified_base 42: mod_base = OTHER; note = 2'-O-Methyl-adenosine
  modified_base 46: mod_base = OTHER; note = 2'-O-Methyl-adenosine
  modified_base 48: mod_base = OTHER; note = 2'-O-Methyl-adenosine
  modified_base 50: mod_base = OTHER; note = 2'-O-Methyl-uridine
  modified_base 52: mod_base = OTHER; note = 2'-O-Methyl-adenosine
  modified_base 53: mod_base = OTHER; note = 2'-O-Methyl-guanosine
  modified_base 54: mod_base = OTHER; note = 2'-O-Methyl-guanosine
  modified_base 57: mod_base = OTHER; note = 2'-O-Methyl-adenosine
  modified_base 61: mod_base = OTHER; note = 2'-O-Methyl-cytidine
  modified_base 66: mod_base = OTHER; note = 2'-O-Methyl-uridine
  modified_base 67: mod_base = OTHER; note = 2'-O-Methyl-cytidine
  modified_base 70: mod_base = OTHER; note = 2'-O-Methyl-cytidine
  modified_base 71: mod_base = OTHER; note = 2'-O-Methyl-uridine
  modified_base 72: mod_base = OTHER; note = 2'-O-Methyl-uridine
  modified_base 74: mod_base = OTHER; note = 2'-O-Methyl-adenosine
  modified_base 75: mod_base = OTHER; note = 2'-O-Methyl-adenosine
  modified_base 76: mod_base = OTHER; note = 2'-O-Methyl-adenosine
  modified_base 77: mod_base = OTHER; note = 2'-O-Methyl-adenosine
  modified_base 78: mod_base = OTHER; note = 2'-O-Methyl-adenosine
  modified_base 79: mod_base = OTHER; note = 2'-O-Methyl-guanosine
  modified_base 80: mod_base = OTHER; note = 2'-O-Methyl-uridine
  modified_base 82: mod_base = OTHER; note = 2'-O-Methyl-guanosine
  modified_base 83: mod_base = OTHER; note = 2'-O-Methyl-cytidine
  modified_base 84: mod_base = OTHER; note = 2'-O-Methyl-adenosine
  modified_base 85: mod_base = OTHER; note = 2'-O-Methyl-cytidine
  modified_base 86: mod_base = OTHER; note = 2'-O-Methyl-cytidine
  modified_base 87: mod_base = OTHER; note = 2'-O-Methyl-guanosine
  modified_base 89: mod_base = OTHER; note = 2'-O-Methyl-guanosine
  modified_base 92: mod_base = OTHER; note = 2'-O-Methyl-guanosine
  modified_base 93: mod_base = OTHER; note = 2'-O-Methyl-guanosine
  modified_base 94: mod_base = OTHER; note = 2'-O-Methyl-uridine
  modified_base 95: mod_base = OTHER; note = 2'-O-Methyl-guanosine
  modified_base 96: mod_base = OTHER; note = 2'-O-Methyl-cytidine
  modified_base 97: mod_base = OTHER; note = 2'-O-Methyl-uridine
  modified_base 98: mod_base = OTHER; note = 2'-O-Methyl-uridine phosphorothioate
  modified_base 99: mod_base = OTHER; note = 2'-O-Methyl-uridine phosphorothioate
  modified_base 100: mod_base = OTHER; note = 2'-O-Methyl-uridine
  misc_difference 101: note = modified_base - a, c, u, g, unknown or other - a, c, g, inosine, u, deoxyadenosine, deoxyguanosine, deoxycytidine, deoxyinosine, thymine, ribonebularine, 2'-O-methylnebularine, or 2'-deoxynebularine
  misc_difference 102: note = modified_base - a, c, u, g, unknown or other - a, c, g, inosine, u, deoxyadenosine, deoxyguanosine, deoxycytidine, deoxyinosine, thymine, ribonebularine, 2'-O-methylnebularine, or 2'-deoxynebularine
  misc_difference 103: note = modified_base - a, c, u, g, unknown or other - a, c, g, inosine, u, deoxyadenosine, deoxyguanosine, deoxycytidine, deoxyinosine, thymine, ribonebularine, 2'-O-methylnebularine, or 2'-deoxynebularine

SEQ ID NO: 1849 - RNA, 103 nt, synthetic construct; identical to SEQ ID NO: 1796
  source 1..103: mol_type = other RNA; note = Description of Artificial Sequence: Synthetic polynucleotide
  modified_base 1: mod_base = OTHER; note = 2'-O-Methyl-guanosine phosphorothioate
  modified_base 2: mod_base = OTHER; note = 2'-O-Methyl-adenosine phosphorothioate
  modified_base 3: mod_base = OTHER; note = 2'-O-Methyl-guanosine phosphorothioate
  modified_base 21: mod_base = OTHER; note = 2'-O-Methyl-guanosine
  modified_base 28: mod_base = OTHER; note = 2'-O-Methyl-adenosine
  modified_base 29: mod_base = OTHER; note = 2'-O-Methyl-guanosine
  modified_base 30: mod_base = OTHER; note = 2'-O-Methyl-cytidine
  modified_base 31: mod_base = OTHER; note = 2'-O-Methyl-uridine
  modified_base 32: mod_base = OTHER; note = 2'-O-Methyl-adenosine
  modified_base 34: mod_base = OTHER; note = 2'-O-Methyl-adenosine
  modified_base 35: mod_base = OTHER; note = 2'-O-Methyl-adenosine
  modified_base 36: mod_base = OTHER; note = 2'-O-Methyl-adenosine
  modified_base 37: mod_base = OTHER; note = 2'-O-Methyl-uridine
  modified_base 38: mod_base = OTHER; note = 2'-O-Methyl-adenosine
  modified_base 39: mod_base = OTHER; note = 2'-O-Methyl-guanosine
  modified_base 40: mod_base = OTHER; note = 2'-O-Methyl-cytidine
  modified_base 41: mod_base = OTHER; note = 2'-O-Methyl-adenosine
  modified_base 42: mod_base = OTHER; note = 2'-O-Methyl-adenosine
  modified_base 46: mod_base = OTHER; note = 2'-O-Methyl-adenosine
  modified_base 48: mod_base = OTHER; note = 2'-O-Methyl-adenosine
  modified_base 50: mod_base = OTHER; note = 2'-O-Methyl-uridine
  modified_base 52: mod_base = OTHER; note = 2'-O-Methyl-adenosine
  modified_base 53: mod_base = OTHER; note = 2'-O-Methyl-guanosine
  modified_base 54: mod_base = OTHER; note = 2'-O-Methyl-guanosine
  modified_base 57: mod_base = OTHER; note = 2'-O-Methyl-adenosine
  modified_base 61: mod_base = OTHER; note = 2'-O-Methyl-cytidine
  modified_base 66: mod_base = OTHER; note = 2'-O-Methyl-uridine
  modified_base 67: mod_base = OTHER; note = 2'-O-Methyl-cytidine
  modified_base 70: mod_base = OTHER; note = 2'-O-Methyl-cytidine
  modified_base 71: mod_base = OTHER; note = 2'-O-Methyl-uridine
  modified_base 72: mod_base = OTHER; note = 2'-O-Methyl-uridine
  modified_base 74: mod_base = OTHER; note = 2'-O-Methyl-adenosine
  modified_base 75: mod_base = OTHER; note = 2'-O-Methyl-adenosine
  modified_base 76: mod_base = OTHER; note = 2'-O-Methyl-adenosine
  modified_base 77: mod_base = OTHER; note = 2'-O-Methyl-adenosine
  modified_base 78: mod_base = OTHER; note = 2'-O-Methyl-adenosine
  modified_base 79: mod_base = OTHER; note = 2'-O-Methyl-guanosine
  modified_base 80: mod_base = OTHER; note = 2'-O-Methyl-uridine
  modified_base 82: mod_base = OTHER; note = 2'-O-Methyl-guanosine
  modified_base 83: mod_base = OTHER; note = 2'-O-Methyl-cytidine
  modified_base 84: mod_base = OTHER; note = 2'-O-Methyl-adenosine
  modified_base 85: mod_base = OTHER; note = 2'-O-Methyl-cytidine
  modified_base 86: mod_base = OTHER; note = 2'-O-Methyl-cytidine
  modified_base 87: mod_base = OTHER; note = 2'-O-Methyl-guanosine
  modified_base 89: mod_base = OTHER; note = 2'-O-Methyl-guanosine
  modified_base 92: mod_base = OTHER; note = 2'-O-Methyl-guanosine
  modified_base 93: mod_base = OTHER; note = 2'-O-Methyl-guanosine
  modified_base 94: mod_base = OTHER; note = 2'-O-Methyl-uridine
  modified_base 95: mod_base = OTHER; note = 2'-O-Methyl-guanosine
  modified_base 96: mod_base = OTHER; note = 2'-O-Methyl-cytidine
  modified_base 97: mod_base = OTHER; note = 2'-O-Methyl-uridine
  modified_base 98: mod_base = OTHER; note = 2'-O-Methyl-uridine phosphorothioate
  modified_base 99: mod_base = OTHER; note = 2'-O-Methyl-uridine phosphorothioate
  modified_base 100: mod_base = OTHER; note = 2'-O-Methyl-uridine
  misc_difference 101: note = modified_base - a, c, u, g, unknown or other - a, c, g, inosine, u, deoxyadenosine, deoxyguanosine, deoxycytidine, deoxyinosine, thymine, ribonebularine, 2'-O-methylnebularine, or 2'-deoxynebularine
  misc_difference 102: note = modified_base - a, c, u, g, unknown or other - a, c, g, inosine, u, deoxyadenosine, deoxyguanosine, deoxycytidine, deoxyinosine, thymine, ribonebularine, 2'-O-methylnebularine, or 2'-deoxynebularine
  misc_difference 103: note = modified_base - a, c, u, g, unknown or other - a, c, g, inosine, u, deoxyadenosine, deoxyguanosine, deoxycytidine, deoxyinosine, thymine, ribonebularine, 2'-O-methylnebularine, or 2'-deoxynebularine

SEQ ID NO: 1850 - RNA, 103 nt, synthetic construct; identical to SEQ ID NO: 1795
  source 1..103: mol_type = other RNA; note = Description of Artificial Sequence: Synthetic polynucleotide
  modified_base 1: mod_base = OTHER; note = 2'-O-Methyl-cytidine phosphorothioate
  modified_base 2: mod_base = OTHER; note = 2'-O-Methyl-cytidine phosphorothioate
  modified_base 3: mod_base = OTHER; note = 2'-O-Methyl-cytidine phosphorothioate
  modified_base 21: mod_base = OTHER; note = 2'-O-Methyl-guanosine
  modified_base 28: mod_base = OTHER; note = 2'-O-Methyl-adenosine
  modified_base 29: mod_base = OTHER; note = 2'-O-Methyl-guanosine
  modified_base 30: mod_base = OTHER; note = 2'-O-Methyl-cytidine
  modified_base 31: mod_base = OTHER; note = 2'-O-Methyl-uridine
  modified_base 32: mod_base = OTHER; note = 2'-O-Methyl-adenosine
  modified_base 34: mod_base = OTHER; note = 2'-O-Methyl-adenosine
  modified_base 35: mod_base = OTHER; note = 2'-O-Methyl-adenosine
  modified_base 36: mod_base = OTHER; note = 2'-O-Methyl-adenosine
  modified_base 37: mod_base = OTHER; note = 2'-O-Methyl-uridine
  modified_base 38: mod_base = OTHER; note = 2'-O-Methyl-adenosine
  modified_base 39: mod_base = OTHER; note = 2'-O-Methyl-guanosine
  modified_base 40: mod_base = OTHER; note = 2'-O-Methyl-cytidine
  modified_base 41: mod_base = OTHER; note = 2'-O-Methyl-adenosine
  modified_base 42: mod_base = OTHER; note = 2'-O-Methyl-adenosine
  modified_base 46: mod_base = OTHER; note = 2'-O-Methyl-adenosine
  modified_base 48: mod_base = OTHER; note = 2'-O-Methyl-adenosine
  modified_base 50: mod_base = OTHER; note = 2'-O-Methyl-uridine
  modified_base 52: mod_base = OTHER; note = 2'-O-Methyl-adenosine
  modified_base 53: mod_base = OTHER; note = 2'-O-Methyl-guanosine
  modified_base 54: mod_base = OTHER; note = 2'-O-Methyl-guanosine
  modified_base 57: mod_base = OTHER; note = 2'-O-Methyl-adenosine
  modified_base 61: mod_base = OTHER; note = 2'-O-Methyl-cytidine
  modified_base 64: mod_base = OTHER; note = uridine phosphorothioate
  modified_base 66: mod_base = OTHER; note = 2'-O-Methyl-uridine
  modified_base 67: mod_base = OTHER; note = 2'-O-Methyl-cytidine
  modified_base 70: mod_base = OTHER; note = 2'-O-Methyl-cytidine
  modified_base 71: mod_base = OTHER; note = 2'-O-Methyl-uridine
  modified_base 72: mod_base = OTHER; note = 2'-O-Methyl-uridine
  modified_base 74: mod_base = OTHER; note = 2'-O-Methyl-adenosine
  modified_base 75: mod_base = OTHER; note = 2'-O-Methyl-adenosine
  modified_base 76: mod_base = OTHER; note = 2'-O-Methyl-adenosine
  modified_base 77: mod_base = OTHER; note = 2'-O-Methyl-adenosine
  modified_base 78: mod_base = OTHER; note = 2'-O-Methyl-adenosine
  modified_base 79: mod_base = OTHER; note = 2'-O-Methyl-guanosine
  modified_base 80: mod_base = OTHER; note = 2'-O-Methyl-uridine
  modified_base 82: mod_base = OTHER; note = 2'-O-Methyl-guanosine
  modified_base 83: mod_base = OTHER; note = 2'-O-Methyl-cytidine
  modified_base 84: mod_base = OTHER; note = 2'-O-Methyl-adenosine
  modified_base 85: mod_base = OTHER; note = 2'-O-Methyl-cytidine
  modified_base 86: mod_base = OTHER; note = 2'-O-Methyl-cytidine
  modified_base 87: mod_base = OTHER; note = 2'-O-Methyl-guanosine
  modified_base 89: mod_base = OTHER; note = 2'-O-Methyl-guanosine
  modified_base 92: mod_base = OTHER; note = 2'-O-Methyl-guanosine
  modified_base 93: mod_base = OTHER; note = 2'-O-Methyl-guanosine
  modified_base 94: mod_base = OTHER; note = 2'-O-Methyl-uridine
  modified_base 95: mod_base = OTHER; note = 2'-O-Methyl-guanosine
  modified_base 96: mod_base = OTHER; note = 2'-O-Methyl-cytidine
  modified_base 97: mod_base = OTHER; note = 2'-O-Methyl-uridine
  modified_base 98: mod_base = OTHER; note = 2'-O-Methyl-uridine phosphorothioate
  modified_base 99: mod_base = OTHER; note = 2'-O-Methyl-uridine phosphorothioate
  modified_base 100: mod_base = OTHER; note = 2'-O-Methyl-uridine
  misc_difference 101: note = modified_base - a, c, u, g, unknown or other - a, c, g, inosine, u, deoxyadenosine, deoxyguanosine, deoxycytidine, deoxyinosine, thymine, ribonebularine, 2'-O-methylnebularine, or 2'-deoxynebularine
  misc_difference 102: note = modified_base - a, c, u, g, unknown or other - a, c, g, inosine, u, deoxyadenosine, deoxyguanosine, deoxycytidine, deoxyinosine, thymine, ribonebularine, 2'-O-methylnebularine, or 2'-deoxynebularine
  misc_difference 103: note = modified_base - a, c, u, g, unknown or other - a, c, g, inosine, u, deoxyadenosine, deoxyguanosine, deoxycytidine, deoxyinosine, thymine, ribonebularine, 2'-O-methylnebularine, or 2'-deoxynebularine

SEQ ID NO: 1851 - RNA, 103 nt, synthetic construct; identical to SEQ ID NO: 1796
  source 1..103: mol_type = other RNA; note = Description of Artificial Sequence: Synthetic polynucleotide
  modified_base 1: mod_base = OTHER; note = 2'-O-Methyl-guanosine phosphorothioate
  modified_base 2: mod_base = OTHER; note = 2'-O-Methyl-adenosine phosphorothioate
  modified_base 3: mod_base = OTHER; note = 2'-O-Methyl-guanosine phosphorothioate
  modified_base 21: mod_base = OTHER; note = 2'-O-Methyl-guanosine
  modified_base 28: mod_base = OTHER; note = 2'-O-Methyl-adenosine
  modified_base 29: mod_base = OTHER; note = 2'-O-Methyl-guanosine
  modified_base 30: mod_base = OTHER; note = 2'-O-Methyl-cytidine
  modified_base 31: mod_base = OTHER; note = 2'-O-Methyl-uridine
  modified_base 32: mod_base = OTHER; note = 2'-O-Methyl-adenosine
  modified_base 34: mod_base = OTHER; note = 2'-O-Methyl-adenosine
  modified_base 35: mod_base = OTHER; note = 2'-O-Methyl-adenosine
  modified_base 36: mod_base = OTHER; note = 2'-O-Methyl-adenosine
  modified_base 37: mod_base = OTHER; note = 2'-O-Methyl-uridine
  modified_base 38: mod_base = OTHER; note = 2'-O-Methyl-adenosine
  modified_base 39: mod_base = OTHER; note = 2'-O-Methyl-guanosine
  modified_base 40: mod_base = OTHER; note = 2'-O-Methyl-cytidine
  modified_base 41: mod_base = OTHER; note = 2'-O-Methyl-adenosine
  modified_base 42: mod_base = OTHER; note = 2'-O-Methyl-adenosine
  modified_base 46: mod_base = OTHER; note = 2'-O-Methyl-adenosine
  modified_base 48: mod_base = OTHER; note = 2'-O-Methyl-adenosine
  modified_base 50: mod_base = OTHER; note = 2'-O-Methyl-uridine
  modified_base 52: mod_base = OTHER; note = 2'-O-Methyl-adenosine
  modified_base 53: mod_base = OTHER; note = 2'-O-Methyl-guanosine
  modified_base 54: mod_base = OTHER; note = 2'-O-Methyl-guanosine
  modified_base 57: mod_base = OTHER; note = 2'-O-Methyl-adenosine
  modified_base 61: mod_base = OTHER; note = 2'-O-Methyl-cytidine
  modified_base 64: mod_base = OTHER; note = uridine phosphorothioate
  modified_base 66: mod_base = OTHER; note = 2'-O-Methyl-uridine
  modified_base 67: mod_base = OTHER; note = 2'-O-Methyl-cytidine
  modified_base 70: mod_base = OTHER; note = 2'-O-Methyl-cytidine
  modified_base 71: mod_base = OTHER; note = 2'-O-Methyl-uridine
  modified_base 72: mod_base = OTHER; note = 2'-O-Methyl-uridine
  modified_base 74: mod_base = OTHER; note = 2'-O-Methyl-adenosine
  modified_base 75: mod_base = OTHER; note = 2'-O-Methyl-adenosine
  modified_base 76: mod_base = OTHER; note = 2'-O-Methyl-adenosine
  modified_base 77: mod_base = OTHER; note = 2'-O-Methyl-adenosine
  modified_base 78: mod_base = OTHER; note = 2'-O-Methyl-adenosine
  modified_base 79: mod_base = OTHER; note = 2'-O-Methyl-guanosine
  modified_base 80: mod_base = OTHER; note = 2'-O-Methyl-uridine
  modified_base 82: mod_base = OTHER; note = 2'-O-Methyl-guanosine
  modified_base 83: mod_base = OTHER; note = 2'-O-Methyl-cytidine
  modified_base 84: mod_base = OTHER; note = 2'-O-Methyl-adenosine
  modified_base 85: mod_base = OTHER; note = 2'-O-Methyl-cytidine
  modified_base 86: mod_base = OTHER; note = 2'-O-Methyl-cytidine
  modified_base 87: mod_base = OTHER; note = 2'-O-Methyl-guanosine
  modified_base 89: mod_base = OTHER; note = 2'-O-Methyl-guanosine
  modified_base 92: mod_base = OTHER; note = 2'-O-Methyl-guanosine
  modified_base 93: mod_base = OTHER; note = 2'-O-Methyl-guanosine
  modified_base 94: mod_base = OTHER; note = 2'-O-Methyl-uridine
  modified_base 95: mod_base = OTHER; note = 2'-O-Methyl-guanosine
  modified_base 96: mod_base = OTHER; note = 2'-O-Methyl-cytidine
  modified_base 97: mod_base = OTHER; note = 2'-O-Methyl-uridine
  modified_base 98: mod_base = OTHER; note = 2'-O-Methyl-uridine phosphorothioate
  modified_base 99: mod_base = OTHER; note = 2'-O-Methyl-uridine phosphorothioate
  modified_base 100: mod_base = OTHER; note = 2'-O-Methyl-uridine
  misc_difference 101: note = modified_base - a, c, u, g, unknown or other - a, c, g, inosine, u, deoxyadenosine, deoxyguanosine, deoxycytidine, deoxyinosine, thymine, ribonebularine, 2'-O-methylnebularine, or 2'-deoxynebularine
  misc_difference 102: note = modified_base - a, c, u, g, unknown or other - a, c, g, inosine, u, deoxyadenosine, deoxyguanosine, deoxycytidine, deoxyinosine, thymine, ribonebularine, 2'-O-methylnebularine, or 2'-deoxynebularine
  misc_difference 103: note = modified_base - a, c, u, g, unknown or other - a, c, g, inosine, u, deoxyadenosine, deoxyguanosine, deoxycytidine, deoxyinosine, thymine, ribonebularine, 2'-O-methylnebularine, or 2'-deoxynebularine

SEQ ID NO: 1852 - RNA, 103 nt, synthetic construct; identical to SEQ ID NO: 1797
  source 1..103: mol_type = other RNA; note = Description of Artificial Sequence: Synthetic polynucleotide
  modified_base 1: mod_base = OTHER; note = 2'-O-Methyl-cytidine phosphorothioate
  modified_base 2: mod_base = OTHER; note = 2'-O-Methyl-adenosine phosphorothioate
  modified_base 3: mod_base = OTHER; note = 2'-O-Methyl-guanosine phosphorothioate
  modified_base 21: mod_base = OTHER; note = 2'-O-Methyl-guanosine
  modified_base 28: mod_base = OTHER; note = 2'-O-Methyl-adenosine
  modified_base 29: mod_base = OTHER; note = 2'-O-Methyl-guanosine
  modified_base 30: mod_base = OTHER; note = 2'-O-Methyl-cytidine
  modified_base 31: mod_base = OTHER; note = 2'-O-Methyl-uridine
  modified_base 32: mod_base = OTHER; note = 2'-O-Methyl-adenosine
  modified_base 34: mod_base = OTHER; note = 2'-O-Methyl-adenosine
  modified_base 35: mod_base = OTHER; note = 2'-O-Methyl-adenosine
  modified_base 36: mod_base = OTHER; note = 2'-O-Methyl-adenosine
  modified_base 37: mod_base = OTHER; note = 2'-O-Methyl-uridine
  modified_base 38: mod_base = OTHER; note = 2'-O-Methyl-adenosine
  modified_base 39: mod_base = OTHER; note = 2'-O-Methyl-guanosine
  modified_base 40: mod_base = OTHER; note = 2'-O-Methyl-cytidine
  modified_base 41: mod_base = OTHER; note = 2'-O-Methyl-adenosine
  modified_base 42: mod_base = OTHER; note = 2'-O-Methyl-adenosine
  modified_base 46: mod_base = OTHER; note = 2'-O-Methyl-adenosine
  modified_base 48: mod_base = OTHER; note = 2'-O-Methyl-adenosine
  modified_base 50: mod_base = OTHER; note = 2'-O-Methyl-uridine
  modified_base 52: mod_base = OTHER; note = 2'-O-Methyl-adenosine
  modified_base 53: mod_base = OTHER; note = 2'-O-Methyl-guanosine
  modified_base 54: mod_base = OTHER; note = 2'-O-Methyl-guanosine
  modified_base 55: mod_base = OTHER; note = 2'-O-Methyl-cytidine
  modified_base 56: mod_base = OTHER; note = 2'-O-Methyl-uridine
  modified_base 57: mod_base = OTHER; note = 2'-O-Methyl-adenosine
  modified_base 60: mod_base = OTHER; note = 2'-O-Methyl-cytidine
  modified_base 61: mod_base = OTHER; note = 2'-O-Methyl-cytidine
  modified_base 64: mod_base = OTHER; note = uridine phosphorothioate
  modified_base 66: mod_base = OTHER; note = 2'-O-Methyl-uridine
  modified_base 67: mod_base = OTHER; note = 2'-O-Methyl-cytidine
  modified_base 70: mod_base = OTHER; note = 2'-O-Methyl-cytidine
  modified_base 71: mod_base = OTHER; note = 2'-O-Methyl-uridine
  modified_base 72: mod_base = OTHER; note = 2'-O-Methyl-uridine
  modified_base 74: mod_base = OTHER; note = 2'-O-Methyl-adenosine
  modified_base 75: mod_base = OTHER; note = 2'-O-Methyl-adenosine
  modified_base 76: mod_base = OTHER; note = 2'-O-Methyl-adenosine
  modified_base 77: mod_base = OTHER; note = 2'-O-Methyl-adenosine
  modified_base 78: mod_base = OTHER; note = 2'-O-Methyl-adenosine
  modified_base 79: mod_base = OTHER; note = 2'-O-Methyl-guanosine
  modified_base 80: mod_base = OTHER; note = 2'-O-Methyl-uridine
  modified_base 81: mod_base = OTHER; note = 2'-O-Methyl-guanosine
  modified_base 83: mod_base = OTHER; note = 2'-O-Methyl-cytidine
  modified_base 84: mod_base = OTHER; note = 2'-O-Methyl-adenosine
  modified_base 85: mod_base = OTHER; note = 2'-O-Methyl-cytidine
  modified_base 86: mod_base = OTHER; note = 2'-O-Methyl-cytidine
  modified_base 87: mod_base = OTHER; note = 2'-O-Methyl-guanosine
  modified_base 88: mod_base = OTHER; note = 2'-O-Methyl-adenosine
  modified_base 89: mod_base = OTHER; note = 2'-O-Methyl-guanosine
  modified_base 90: mod_base = OTHER; note = 2'-O-Methyl-uridine
  modified_base 91: mod_base = OTHER; note = 2'-O-Methyl-cytidine
  modified_base 92: mod_base = OTHER; note = 2'-O-Methyl-guanosine
  modified_base 93: mod_base = OTHER; note = 2'-O-Methyl-guanosine
  modified_base 94: mod_base = OTHER; note = 2'-O-Methyl-uridine
  modified_base 95: mod_base = OTHER; note = 2'-O-Methyl-guanosine
  modified_base 96: mod_base = OTHER; note = 2'-O-Methyl-cytidine
  modified_base 97: mod_base = OTHER; note = 2'-O-Methyl-uridine
  modified_base 98: mod_base = OTHER; note = 2'-O-Methyl-uridine phosphorothioate
  modified_base 99: mod_base = OTHER; note = 2'-O-Methyl-uridine phosphorothioate
  modified_base 100: mod_base = OTHER; note = 2'-O-Methyl-uridine
  misc_difference 101: note = modified_base - a, c, u, g, unknown or other - a, c, g, inosine, u, deoxyadenosine, deoxyguanosine, deoxycytidine, deoxyinosine, thymine, ribonebularine, 2'-O-methylnebularine, or 2'-deoxynebularine
  misc_difference 102: note = modified_base - a, c, u, g, unknown or other - a, c, g, inosine, u, deoxyadenosine, deoxyguanosine, deoxycytidine, deoxyinosine, thymine, ribonebularine, 2'-O-methylnebularine, or 2'-deoxynebularine
  misc_difference 103: note = modified_base - a, c, u, g, unknown or other - a, c, g, inosine, u, deoxyadenosine, deoxyguanosine, deoxycytidine, deoxyinosine, thymine, ribonebularine, 2'-O-methylnebularine, or 2'-deoxynebularine

SEQ ID NO: 1853 - RNA, 103 nt, synthetic construct; identical to SEQ ID NO: 1795
  source 1..103: mol_type = other RNA; note = Description of Artificial Sequence: Synthetic polynucleotide
  modified_base 1: mod_base = OTHER; note = 2'-O-Methyl-cytidine phosphorothioate
  modified_base 2: mod_base = OTHER; note = 2'-O-Methyl-cytidine phosphorothioate
  modified_base 3: mod_base = OTHER; note = 2'-O-Methyl-cytidine phosphorothioate
  modified_base 21: mod_base = OTHER; note = 2'-O-Methyl-guanosine
  modified_base 28: mod_base = OTHER; note = 2'-O-Methyl-adenosine
  modified_base 29: mod_base = OTHER; note = 2'-O-Methyl-guanosine
  modified_base 30: mod_base = OTHER; note = 2'-O-Methyl-cytidine
  modified_base 31: mod_base = OTHER; note = 2'-O-Methyl-uridine
  modified_base 32: mod_base = OTHER; note = 2'-O-Methyl-adenosine
  modified_base 34: mod_base = OTHER; note = 2'-O-Methyl-adenosine
  modified_base 35: mod_base = OTHER; note = 2'-O-Methyl-adenosine
  modified_base 36: mod_base = OTHER; note = 2'-O-Methyl-adenosine
  modified_base 37: mod_base = OTHER; note = 2'-O-Methyl-uridine
  modified_base 38: mod_base = OTHER; note = 2'-O-Methyl-adenosine
  modified_base 39: mod_base = OTHER; note = 2'-O-Methyl-guanosine
  modified_base 40: mod_base = OTHER; note = 2'-O-Methyl-cytidine
  modified_base 41: mod_base = OTHER; note = 2'-O-Methyl-adenosine
  modified_base 42: mod_base = OTHER; note = 2'-O-Methyl-adenosine
  modified_base 45: mod_base = OTHER; note = uridine phosphorothioate
  modified_base 46: mod_base = OTHER; note = 2'-O-Methyl-adenosine
  modified_base 48: mod_base = OTHER; note = 2'-O-Methyl-adenosine
  modified_base 50: mod_base = OTHER; note = 2'-O-Methyl-uridine
  modified_base 52: mod_base = OTHER; note = 2'-O-Methyl-adenosine
  modified_base 53: mod_base = OTHER; note = 2'-O-Methyl-guanosine
  modified_base 54: mod_base = OTHER; note = 2'-O-Methyl-guanosine
  modified_base 57: mod_base = OTHER; note = 2'-O-Methyl-adenosine
  modified_base 61: mod_base = OTHER; note = 2'-O-Methyl-cytidine
  modified_base 66: mod_base = OTHER; note = 2'-O-Methyl-uridine
  modified_base 67: mod_base = OTHER; note = 2'-O-Methyl-cytidine
  modified_base 70: mod_base = OTHER; note = 2'-O-Methyl-cytidine
  modified_base 71: mod_base = OTHER; note = 2'-O-Methyl-uridine
  modified_base 72: mod_base = OTHER; note = 2'-O-Methyl-uridine
  modified_base 74: mod_base = OTHER; note = 2'-O-Methyl-adenosine
  modified_base 75: mod_base = OTHER; note = 2'-O-Methyl-adenosine
  modified_base 76: mod_base = OTHER; note = 2'-O-Methyl-adenosine
  modified_base 77: mod_base = OTHER; note = 2'-O-Methyl-adenosine
  modified_base 78: mod_base = OTHER; note = 2'-O-Methyl-adenosine
  modified_base 79: mod_base = OTHER; note = 2'-O-Methyl-guanosine
  modified_base 80: mod_base = OTHER; note = 2'-O-Methyl-uridine
  modified_base 82: mod_base = OTHER; note = 2'-O-Methyl-guanosine
  modified_base 83: mod_base = OTHER; note = 2'-O-Methyl-cytidine
  modified_base 84: mod_base = OTHER; note = 2'-O-Methyl-adenosine
  modified_base 85: mod_base = OTHER; note = 2'-O-Methyl-cytidine
  modified_base 86: mod_base = OTHER; note = 2'-O-Methyl-cytidine
  modified_base 87: mod_base = OTHER; note = 2'-O-Methyl-guanosine
  modified_base 89: mod_base = OTHER; note = 2'-O-Methyl-guanosine
  modified_base 92: mod_base = OTHER; note = 2'-O-Methyl-guanosine
  modified_base 93: mod_base = OTHER; note = 2'-O-Methyl-guanosine
  modified_base 94: mod_base = OTHER; note = 2'-O-Methyl-uridine
  modified_base 95: mod_base = OTHER; note = 2'-O-Methyl-guanosine
  modified_base 96: mod_base = OTHER; note = 2'-O-Methyl-cytidine
  modified_base 97: mod_base = OTHER; note = 2'-O-Methyl-uridine
  modified_base 98: mod_base = OTHER; note = 2'-O-Methyl-uridine phosphorothioate
  modified_base 99: mod_base = OTHER; note = 2'-O-Methyl-uridine phosphorothioate
  modified_base 100: mod_base = OTHER; note = 2'-O-Methyl-uridine
  misc_difference 101: note = modified_base - a, c, u, g, unknown or other - a, c, g, inosine, u, deoxyadenosine, deoxyguanosine, deoxycytidine, deoxyinosine, thymine, ribonebularine, 2'-O-methylnebularine, or 2'-deoxynebularine
  misc_difference 102: note = modified_base - a, c, u, g, unknown or other - a, c, g, inosine, u, deoxyadenosine, deoxyguanosine, deoxycytidine, deoxyinosine, thymine, ribonebularine, 2'-O-methylnebularine, or 2'-deoxynebularine
  misc_difference 103: note = modified_base - a, c, u, g, unknown or other - a, c, g, inosine, u, deoxyadenosine, deoxyguanosine, deoxycytidine, deoxyinosine, thymine, ribonebularine, 2'-O-methylnebularine, or 2'-deoxynebularine

SEQ ID NO: 1854 - RNA, 103 nt, synthetic construct; identical to SEQ ID NO: 1796
  source 1..103: mol_type = other RNA; note = Description of Artificial Sequence: Synthetic polynucleotide
  modified_base 1: mod_base = OTHER; note = 2'-O-Methyl-guanosine phosphorothioate
  modified_base 2: mod_base = OTHER; note = 2'-O-Methyl-adenosine phosphorothioate
  modified_base 3: mod_base = OTHER; note = 2'-O-Methyl-guanosine phosphorothioate
  modified_base 21: mod_base = OTHER; note = 2'-O-Methyl-guanosine
  modified_base 28: mod_base = OTHER; note = 2'-O-Methyl-adenosine
  modified_base 29: mod_base = OTHER; note = 2'-O-Methyl-guanosine
  modified_base 30: mod_base = OTHER; note = 2'-O-Methyl-cytidine
  modified_base 31: mod_base = OTHER; note = 2'-O-Methyl-uridine
  modified_base 32: mod_base = OTHER; note = 2'-O-Methyl-adenosine
  modified_base 34: mod_base = OTHER; note = 2'-O-Methyl-adenosine
  modified_base 35: mod_base = OTHER; note = 2'-O-Methyl-adenosine
  modified_base 36: mod_base = OTHER; note = 2'-O-Methyl-adenosine
  modified_base 37: mod_base = OTHER; note = 2'-O-Methyl-uridine
  modified_base 38: mod_base = OTHER; note = 2'-O-Methyl-adenosine
  modified_base 39: mod_base = OTHER; note = 2'-O-Methyl-guanosine
  modified_base 40: mod_base = OTHER; note = 2'-O-Methyl-cytidine
  modified_base 41: mod_base = OTHER; note = 2'-O-Methyl-adenosine
  modified_base 42: mod_base = OTHER; note = 2'-O-Methyl-adenosine
  modified_base 45: mod_base = OTHER; note = uridine phosphorothioate
  modified_base 46: mod_base = OTHER; note = 2'-O-Methyl-adenosine
  modified_base 48: mod_base = OTHER; note = 2'-O-Methyl-adenosine
  modified_base 50: mod_base = OTHER; note = 2'-O-Methyl-uridine
  modified_base 52: mod_base = OTHER; note = 2'-O-Methyl-adenosine
  modified_base 53: mod_base = OTHER; note = 2'-O-Methyl-guanosine
  modified_base 54: mod_base = OTHER; note = 2'-O-Methyl-guanosine
  modified_base 57: mod_base = OTHER; note = 2'-O-Methyl-adenosine
  modified_base 61: mod_base = OTHER; note = 2'-O-Methyl-cytidine
  modified_base 66: mod_base = OTHER; note = 2'-O-Methyl-uridine
  modified_base 67: mod_base = OTHER; note = 2'-O-Methyl-cytidine
  modified_base 70: mod_base = OTHER; note = 2'-O-Methyl-cytidine
  modified_base 71: mod_base = OTHER; note = 2'-O-Methyl-uridine
  modified_base 72: mod_base = OTHER; note = 2'-O-Methyl-uridine
  modified_base 74: mod_base = OTHER; note = 2'-O-Methyl-adenosine
  modified_base 75: mod_base = OTHER; note = 2'-O-Methyl-adenosine
  modified_base 76: mod_base = OTHER; note = 2'-O-Methyl-adenosine
  modified_base 77: mod_base = OTHER; note = 2'-O-Methyl-adenosine
  modified_base 78: mod_base = OTHER; note = 2'-O-Methyl-adenosine
  modified_base 79: mod_base = OTHER; note = 2'-O-Methyl-guanosine
  modified_base 80: mod_base = OTHER; note = 2'-O-Methyl-uridine
  modified_base 82: mod_base = OTHER; note = 2'-O-Methyl-guanosine
  modified_base 83: mod_base = OTHER; note = 2'-O-Methyl-cytidine
  modified_base 84: mod_base = OTHER; note = 2'-O-Methyl-adenosine
  modified_base 85: mod_base = OTHER; note = 2'-O-Methyl-cytidine
  modified_base 86: mod_base = OTHER; note = 2'-O-Methyl-cytidine
  modified_base 87: mod_base = OTHER; note = 2'-O-Methyl-guanosine
  modified_base 89: mod_base = OTHER; note = 2'-O-Methyl-guanosine
  modified_base 92: mod_base = OTHER; note = 2'-O-Methyl-guanosine
  modified_base 93: mod_base = OTHER; note = 2'-O-Methyl-guanosine
  modified_base 94: mod_base = OTHER; note = 2'-O-Methyl-uridine
  modified_base 95: mod_base = OTHER; note = 2'-O-Methyl-guanosine
  modified_base 96: mod_base = OTHER; note = 2'-O-Methyl-cytidine
  modified_base 97: mod_base = OTHER; note = 2'-O-Methyl-uridine
  modified_base 98: mod_base = OTHER; note = 2'-O-Methyl-uridine phosphorothioate
  modified_base 99: mod_base = OTHER; note = 2'-O-Methyl-uridine phosphorothioate
  modified_base 100: mod_base = OTHER; note = 2'-O-Methyl-uridine
  misc_difference 101: note = modified_base - a, c, u, g, unknown or other - a, c, g, inosine, u, deoxyadenosine, deoxyguanosine, deoxycytidine, deoxyinosine, thymine, ribonebularine, 2'-O-methylnebularine, or 2'-deoxynebularine
  misc_difference 102: note = modified_base - a, c, u, g, unknown or other - a, c, g, inosine, u, deoxyadenosine, deoxyguanosine, deoxycytidine, deoxyinosine, thymine, ribonebularine, 2'-O-methylnebularine, or 2'-deoxynebularine
  misc_difference 103: note = modified_base - a, c, u, g, unknown or other - a, c, g, inosine, u, deoxyadenosine, deoxyguanosine, deoxycytidine, deoxyinosine, thymine, ribonebularine, 2'-O-methylnebularine, or 2'-deoxynebularine

SEQ ID NO: 1855 - RNA, 103 nt, synthetic construct; identical to SEQ ID NO: 1797
  source 1..103: mol_type = other RNA; note = Description of Artificial Sequence: Synthetic polynucleotide
  modified_base 1: mod_base = OTHER; note = 2'-O-Methyl-cytidine phosphorothioate
  modified_base 2: mod_base = OTHER; note = 2'-O-Methyl-adenosine phosphorothioate
  modified_base 3: mod_base = OTHER; note = 2'-O-Methyl-guanosine phosphorothioate
  modified_base 21: mod_base = OTHER; note = 2'-O-Methyl-guanosine
  modified_base 28: mod_base = OTHER; note = 2'-O-Methyl-adenosine
  modified_base 29: mod_base = OTHER; note = 2'-O-Methyl-guanosine
  modified_base 30: mod_base = OTHER; note = 2'-O-Methyl-cytidine
  modified_base 31: mod_base = OTHER; note = 2'-O-Methyl-uridine
  modified_base 32: mod_base = OTHER; note = 2'-O-Methyl-adenosine
  modified_base 34: mod_base = OTHER; note = 2'-O-Methyl-adenosine
  modified_base 35: mod_base = OTHER; note = 2'-O-Methyl-adenosine
  modified_base 36: mod_base = OTHER; note = 2'-O-Methyl-adenosine
  modified_base 37: mod_base = OTHER; note = 2'-O-Methyl-uridine
  modified_base 38: mod_base = OTHER; note = 2'-O-Methyl-adenosine
  modified_base 39: mod_base = OTHER; note = 2'-O-Methyl-guanosine
  modified_base 40: mod_base = OTHER; note = 2'-O-Methyl-cytidine
  modified_base 41: mod_base = OTHER; note = 2'-O-Methyl-adenosine
  modified_base 42: mod_base = OTHER; note = 2'-O-Methyl-adenosine
  modified_base 45: mod_base = OTHER; note = uridine phosphorothioate
  modified_base 46: mod_base = OTHER; note = 2'-O-Methyl-adenosine
  modified_base 48: mod_base = OTHER; note = 2'-O-Methyl-adenosine
  modified_base 50: mod_base = OTHER; note = 2'-O-Methyl-uridine
  modified_base 52: mod_base = OTHER; note = 2'-O-Methyl-adenosine
  modified_base 53: mod_base = OTHER; note = 2'-O-Methyl-guanosine
  modified_base 54: mod_base = OTHER; note = 2'-O-Methyl-guanosine
  modified_base 55: mod_base = OTHER; note = 2'-O-Methyl-cytidine
  modified_base 56: mod_base = OTHER; note = 2'-O-Methyl-uridine
  modified_base 57: mod_base = OTHER; note = 2'-O-Methyl-adenosine
  modified_base 60: mod_base = OTHER; note = 2'-O-Methyl-cytidine
  modified_base 61: mod_base = OTHER; note = 2'-O-Methyl-cytidine
  modified_base 66: mod_base = OTHER; note = 2'-O-Methyl-uridine
  modified_base 67: mod_base = OTHER; note = 2'-O-Methyl-cytidine
  modified_base 70: mod_base = OTHER; note = 2'-O-Methyl-cytidine
  modified_base 71: mod_base = OTHER; note = 2'-O-Methyl-uridine
  modified_base 72: mod_base = OTHER; note = 2'-O-Methyl-uridine
  modified_base 74: mod_base = OTHER; note = 2'-O-Methyl-adenosine
  modified_base 75: mod_base = OTHER; note = 2'-O-Methyl-adenosine
  modified_base 76: mod_base = OTHER; note = 2'-O-Methyl-adenosine
  modified_base 77: mod_base = OTHER; note = 2'-O-Methyl-adenosine
  modified_base 78: mod_base = OTHER; note = 2'-O-Methyl-adenosine
  modified_base 79: mod_base = OTHER; note = 2'-O-Methyl-guanosine
  modified_base 80: mod_base = OTHER; note = 2'-O-Methyl-uridine
  modified_base 81: mod_base = OTHER; note = 2'-O-Methyl-guanosine
  modified_base 83: mod_base = OTHER; note = 2'-O-Methyl-cytidine
  modified_base 84: mod_base = OTHER; note = 2'-O-Methyl-adenosine
  modified_base 85: mod_base = OTHER; note = 2'-O-Methyl-cytidine
  modified_base 86: mod_base = OTHER; note = 2'-O-Methyl-cytidine
  modified_base 87: mod_base = OTHER; note = 2'-O-Methyl-guanosine
  modified_base 88: mod_base = OTHER; note = 2'-O-Methyl-adenosine
  modified_base 89: mod_base = OTHER; note = 2'-O-Methyl-guanosine
  modified_base 90: mod_base = OTHER; note = 2'-O-Methyl-uridine
  modified_base 91: mod_base = OTHER; note = 2'-O-Methyl-cytidine
  modified_base 92: mod_base = OTHER; note = 2'-O-Methyl-guanosine
  modified_base 93: mod_base = OTHER; note = 2'-O-Methyl-guanosine
  modified_base 94: mod_base = OTHER; note = 2'-O-Methyl-uridine
  modified_base 95: mod_base = OTHER; note = 2'-O-Methyl-guanosine
  modified_base 96: mod_base = OTHER; note = 2'-O-Methyl-cytidine
  modified_base 97: mod_base = OTHER; note = 2'-O-Methyl-uridine
  modified_base 98: mod_base = OTHER; note = 2'-O-Methyl-uridine phosphorothioate
  modified_base 99: mod_base = OTHER; note = 2'-O-Methyl-uridine phosphorothioate
  modified_base 100: mod_base = OTHER; note = 2'-O-Methyl-uridine
  misc_difference 101: note = modified_base - a, c, u, g, unknown or other - a, c, g, inosine, u, deoxyadenosine, deoxyguanosine, deoxycytidine, deoxyinosine, thymine, ribonebularine, 2'-O-methylnebularine, or 2'-deoxynebularine
  misc_difference 102: note = modified_base - a, c, u, g, unknown or other - a, c, g, inosine, u, deoxyadenosine, deoxyguanosine, deoxycytidine, deoxyinosine, thymine, ribonebularine, 2'-O-methylnebularine, or 2'-deoxynebularine
  misc_difference 103: note = modified_base - a, c, u, g, unknown or other - a, c, g, inosine, u, deoxyadenosine, deoxyguanosine, deoxycytidine, deoxyinosine, thymine, ribonebularine, 2'-O-methylnebularine, or 2'-deoxynebularine

SEQ ID NO: 1856 - RNA, 103 nt, synthetic construct; identical to SEQ ID NO: 1795
  source 1..103: mol_type = other RNA; note = Description of Artificial Sequence: Synthetic polynucleotide
  modified_base 1: mod_base = OTHER; note = 2'-O-Methyl-cytidine phosphorothioate
  modified_base 2: mod_base = OTHER; note = 2'-O-Methyl-cytidine phosphorothioate
  modified_base 3: mod_base = OTHER; note = 2'-O-Methyl-cytidine phosphorothioate
  modified_base 21: mod_base = OTHER; note = 2'-O-Methyl-guanosine
  modified_base 25: mod_base = OTHER; note = uridine phosphorothioate
  modified_base 28: mod_base = OTHER; note = 2'-O-Methyl-adenosine
  modified_base 29: mod_base = OTHER; note = 2'-O-Methyl-guanosine
  modified_base 30: mod_base = OTHER; note = 2'-O-Methyl-cytidine
  modified_base 31: mod_base = OTHER; note = 2'-O-Methyl-uridine
  modified_base 32: mod_base = OTHER; note = 2'-O-Methyl-adenosine
  modified_base 34: mod_base = OTHER; note = 2'-O-Methyl-adenosine
  modified_base 35: mod_base = OTHER; note = 2'-O-Methyl-adenosine
  modified_base 36: mod_base = OTHER; note = 2'-O-Methyl-adenosine
  modified_base 37: mod_base = OTHER; note = 2'-O-Methyl-uridine
  modified_base 38: mod_base = OTHER; note = 2'-O-Methyl-adenosine
  modified_base 39: mod_base = OTHER; note = 2'-O-Methyl-guanosine
  modified_base 40: mod_base = OTHER; note = 2'-O-Methyl-cytidine
  modified_base 41: mod_base = OTHER; note = 2'-O-Methyl-adenosine
  modified_base 42: mod_base = OTHER; note = 2'-O-Methyl-adenosine
  modified_base 46: mod_base = OTHER; note = 2'-O-Methyl-adenosine
  modified_base 48: mod_base = OTHER; note = 2'-O-Methyl-adenosine
  modified_base 50: mod_base = OTHER; note = 2'-O-Methyl-uridine
  modified_base 52: mod_base = OTHER; note = 2'-O-Methyl-adenosine
  modified_base 53: mod_base = OTHER; note = 2'-O-Methyl-guanosine
  modified_base 54: mod_base = OTHER; note = 2'-O-Methyl-guanosine
  modified_base 57: mod_base = OTHER; note = 2'-O-Methyl-adenosine
  modified_base 61: mod_base = OTHER; note = 2'-O-Methyl-cytidine
  modified_base 66: mod_base = OTHER; note = 2'-O-Methyl-uridine
  modified_base 67: mod_base = OTHER; note = 2'-O-Methyl-cytidine
  modified_base 70: mod_base = OTHER; note = 2'-O-Methyl-cytidine
  modified_base 71: mod_base = OTHER; note = 2'-O-Methyl-uridine
  modified_base 72: mod_base = OTHER; note = 2'-O-Methyl-uridine
  modified_base 74: mod_base = OTHER; note = 2'-O-Methyl-adenosine
  modified_base 75: mod_base = OTHER; note = 2'-O-Methyl-adenosine
  modified_base 76: mod_base = OTHER; note = 2'-O-Methyl-adenosine
  modified_base 77: mod_base = OTHER; note = 2'-O-Methyl-adenosine
  modified_base 78: mod_base = OTHER; note = 2'-O-Methyl-adenosine
  modified_base 79: mod_base = OTHER; note = 2'-O-Methyl-guanosine
  modified_base 80: mod_base = OTHER; note = 2'-O-Methyl-uridine
  modified_base 82: mod_base = OTHER; note = 2'-O-Methyl-guanosine
  modified_base 83: mod_base = OTHER; note = 2'-O-Methyl-cytidine
  modified_base 84: mod_base = OTHER; note = 2'-O-Methyl-adenosine
  modified_base 85: mod_base = OTHER; note = 2'-O-Methyl-cytidine
  modified_base 86: mod_base = OTHER; note = 2'-O-Methyl-cytidine
  modified_base 87: mod_base = OTHER; note = 2'-O-Methyl-guanosine
  modified_base 89: mod_base = OTHER; note = 2'-O-Methyl-guanosine
  modified_base 92: mod_base = OTHER; note = 2'-O-Methyl-guanosine
  modified_base 93: mod_base = OTHER; note = 2'-O-Methyl-guanosine
  modified_base 94: mod_base = OTHER; note = 2'-O-Methyl-uridine
  modified_base 95: mod_base = OTHER; note = 2'-O-Methyl-guanosine
  modified_base 96: mod_base = OTHER; note = 2'-O-Methyl-cytidine
  modified_base 97: mod_base = OTHER; note = 2'-O-Methyl-uridine
  modified_base 98: mod_base = OTHER; note = 2'-O-Methyl-uridine phosphorothioate
  modified_base 99: mod_base = OTHER; note = 2'-O-Methyl-uridine phosphorothioate
  modified_base 100: mod_base = OTHER; note = 2'-O-Methyl-uridine
  misc_difference 101: note = modified_base - a, c, u, g, unknown or other - a, c, g, inosine, u, deoxyadenosine, deoxyguanosine, deoxycytidine, deoxyinosine, thymine, ribonebularine, 2'-O-methylnebularine, or 2'-deoxynebularine
  misc_difference 102: note = modified_base - a, c, u, g, unknown or other - a, c, g, inosine, u, deoxyadenosine, deoxyguanosine, deoxycytidine, deoxyinosine, thymine, ribonebularine, 2'-O-methylnebularine, or 2'-deoxynebularine
  misc_difference 103: note = modified_base - a, c, u, g, unknown or other - a, c, g, inosine, u, deoxyadenosine, deoxyguanosine, deoxycytidine, deoxyinosine, thymine, ribonebularine, 2'-O-methylnebularine, or 2'-deoxynebularine

SEQ ID NO: 1857 - RNA, 103 nt, synthetic construct; identical to SEQ ID NO: 1796
  source 1..103: mol_type = other RNA; note = Description of Artificial Sequence: Synthetic polynucleotide
  modified_base 1: mod_base = OTHER; note = 2'-O-Methyl-guanosine phosphorothioate
  modified_base 2: mod_base = OTHER; note = 2'-O-Methyl-adenosine phosphorothioate
  modified_base 3: mod_base = OTHER; note = 2'-O-Methyl-guanosine phosphorothioate
  modified_base 21: mod_base = OTHER; note = 2'-O-Methyl-guanosine
  modified_base 25: mod_base = OTHER; note = uridine phosphorothioate
  modified_base 28: mod_base = OTHER; note = 2'-O-Methyl-adenosine
  modified_base 29: mod_base = OTHER; note = 2'-O-Methyl-guanosine
  modified_base 30: mod_base = OTHER; note = 2'-O-Methyl-cytidine
  modified_base 31: mod_base = OTHER; note = 2'-O-Methyl-uridine
  modified_base 32: mod_base = OTHER; note = 2'-O-Methyl-adenosine
  modified_base 34: mod_base = OTHER; note = 2'-O-Methyl-adenosine
  modified_base 35: mod_base = OTHER; note = 2'-O-Methyl-adenosine
  modified_base 36: mod_base = OTHER; note = 2'-O-Methyl-adenosine
  modified_base 37: mod_base = OTHER; note = 2'-O-Methyl-uridine
  modified_base 38: mod_base = OTHER; note = 2'-O-Methyl-adenosine
  modified_base 39: mod_base = OTHER; note = 2'-O-Methyl-guanosine
  modified_base 40: mod_base = OTHER; note = 2'-O-Methyl-cytidine
  modified_base 41: mod_base = OTHER; note = 2'-O-Methyl-adenosine
  modified_base 42: mod_base = OTHER; note = 2'-O-Methyl-adenosine
  modified_base 46: mod_base = OTHER; note = 2'-O-Methyl-adenosine
  modified_base 48: mod_base = OTHER; note = 2'-O-Methyl-adenosine
  modified_base 50: mod_base = OTHER; note = 2'-O-Methyl-uridine
  modified_base 52: mod_base = OTHER; note = 2'-O-Methyl-adenosine
  modified_base 53: mod_base = OTHER; note = 2'-O-Methyl-guanosine
  modified_base 54: mod_base = OTHER; note = 2'-O-Methyl-guanosine
  modified_base 57: mod_base = OTHER; note = 2'-O-Methyl-adenosine
  modified_base 61: mod_base = OTHER; note = 2'-O-Methyl-cytidine
  modified_base 66: mod_base = OTHER; note = 2'-O-Methyl-uridine
  modified_base 67: mod_base = OTHER; note = 2'-O-Methyl-cytidine
  modified_base 70: mod_base = OTHER; note = 2'-O-Methyl-cytidine
  modified_base 71: mod_base = OTHER; note = 2'-O-Methyl-uridine
  modified_base 72: mod_base = OTHER; note = 2'-O-Methyl-uridine
  modified_base 74: mod_base = OTHER; note = 2'-O-Methyl-adenosine
  modified_base 75: mod_base = OTHER; note = 2'-O-Methyl-adenosine
  modified_base 76: mod_base = OTHER; note = 2'-O-Methyl-adenosine
  modified_base 77: mod_base = OTHER; note = 2'-O-Methyl-adenosine
  modified_base 78: mod_base = OTHER; note = 2'-O-Methyl-adenosine
  modified_base 79: mod_base = OTHER; note = 2'-O-Methyl-guanosine
  modified_base 80: mod_base = OTHER; note = 2'-O-Methyl-uridine
  modified_base 82: mod_base = OTHER; note = 2'-O-Methyl-guanosine
  modified_base 83: mod_base = OTHER; note = 2'-O-Methyl-cytidine
  modified_base 84: mod_base = OTHER; note = 2'-O-Methyl-adenosine
  modified_base 85: mod_base = OTHER; note = 2'-O-Methyl-cytidine
  modified_base 86: mod_base = OTHER; note = 2'-O-Methyl-cytidine
  modified_base 87: mod_base = OTHER; note = 2'-O-Methyl-guanosine
  modified_base 89: mod_base = OTHER; note = 2'-O-Methyl-guanosine
  modified_base 92: mod_base = OTHER; note = 2'-O-Methyl-guanosine
  modified_base 93: mod_base = OTHER; note = 2'-O-Methyl-guanosine
  modified_base 94: mod_base = OTHER; note = 2'-O-Methyl-uridine
  modified_base 95: mod_base = OTHER; note = 2'-O-Methyl-guanosine
  modified_base 96: mod_base = OTHER; note = 2'-O-Methyl-cytidine
  modified_base 97: mod_base = OTHER; note = 2'-O-Methyl-uridine
  modified_base 98: mod_base = OTHER; note = 2'-O-Methyl-uridine phosphorothioate
  modified_base 99: mod_base = OTHER; note = 2'-O-Methyl-uridine phosphorothioate
  modified_base 100: mod_base = OTHER; note = 2'-O-Methyl-uridine
  misc_difference 101: note = modified_base - a, c, u, g, unknown or other - a, c, g, inosine, u, deoxyadenosine, deoxyguanosine, deoxycytidine, deoxyinosine, thymine, ribonebularine, 2'-O-methylnebularine, or 2'-deoxynebularine
  misc_difference 102: note = modified_base - a, c, u, g, unknown or other - a, c, g, inosine, u, deoxyadenosine, deoxyguanosine, deoxycytidine, deoxyinosine, thymine, ribonebularine, 2'-O-methylnebularine, or 2'-deoxynebularine
  misc_difference 103: note = modified_base - a, c, u, g, unknown or other - a, c, g, inosine, u, deoxyadenosine, deoxyguanosine, deoxycytidine, deoxyinosine, thymine, ribonebularine, 2'-O-methylnebularine, or 2'-deoxynebularine

SEQ ID NO: 1858 - RNA, 103 nt, synthetic construct; identical to SEQ ID NO: 1797
  source 1..103: mol_type = other RNA; note = Description of Artificial Sequence: Synthetic polynucleotide
  modified_base 1: mod_base = OTHER; note = 2'-O-Methyl-cytidine phosphorothioate
  modified_base 2: mod_base = OTHER; note = 2'-O-Methyl-adenosine phosphorothioate
  modified_base 3: mod_base = OTHER; note = 2'-O-Methyl-guanosine phosphorothioate
  modified_base 21: mod_base = OTHER; note = 2'-O-Methyl-guanosine
  modified_base 25: mod_base = OTHER; note = uridine phosphorothioate
  modified_base 28: mod_base = OTHER; note = 2'-O-Methyl-adenosine
  modified_base 29: mod_base = OTHER; note = 2'-O-Methyl-guanosine
  modified_base 30: mod_base = OTHER; note = 2'-O-Methyl-cytidine
  modified_base 31: mod_base = OTHER; note = 2'-O-Methyl-uridine
  modified_base 32: mod_base = OTHER; note = 2'-O-Methyl-adenosine
  modified_base 34: mod_base = OTHER; note = 2'-O-Methyl-adenosine
  modified_base 35: mod_base = OTHER; note = 2'-O-Methyl-adenosine
  modified_base 36: mod_base = OTHER; note = 2'-O-Methyl-adenosine
  modified_base 37: mod_base = OTHER; note = 2'-O-Methyl-uridine
  modified_base 38: mod_base = OTHER; note = 2'-O-Methyl-adenosine
  modified_base 39: mod_base = OTHER; note = 2'-O-Methyl-guanosine
  modified_base 40: mod_base = OTHER; note = 2'-O-Methyl-cytidine
  modified_base 41: mod_base = OTHER; note = 2'-O-Methyl-adenosine
  modified_base 42: mod_base = OTHER; note = 2'-O-Methyl-adenosine
  modified_base 46: mod_base = OTHER; note = 2'-O-Methyl-adenosine
  modified_base 48: mod_base = OTHER; note = 2'-O-Methyl-adenosine
  modified_base 50: mod_base = OTHER; note = 2'-O-Methyl-uridine
  modified_base 52: mod_base = OTHER; note = 2'-O-Methyl-adenosine
  modified_base 53: mod_base = OTHER; note = 2'-O-Methyl-guanosine
  modified_base 54: mod_base = OTHER; note = 2'-O-Methyl-guanosine
  modified_base 55: mod_base = OTHER; note = 2'-O-Methyl-cytidine
  modified_base 56: mod_base = OTHER; note = 2'-O-Methyl-uridine
  modified_base 57: mod_base = OTHER; note = 2'-O-Methyl-adenosine
  modified_base 60: mod_base = OTHER; note = 2'-O-Methyl-cytidine
  modified_base 61: mod_base = OTHER; note = 2'-O-Methyl-cytidine
  modified_base 66: mod_base = OTHER; note = 2'-O-Methyl-uridine
  modified_base 67: mod_base = OTHER; note = 2'-O-Methyl-cytidine
  modified_base 70: mod_base = OTHER; note = 2'-O-Methyl-cytidine
  modified_base 71: mod_base = OTHER; note = 2'-O-Methyl-uridine
  modified_base 72: mod_base = OTHER; note = 2'-O-Methyl-uridine
  modified_base 74: mod_base = OTHER; note = 2'-O-Methyl-adenosine
  modified_base 75: mod_base = OTHER; note = 2'-O-Methyl-adenosine
  modified_base 76: mod_base = OTHER; note = 2'-O-Methyl-adenosine
  modified_base 77: mod_base = OTHER; note = 2'-O-Methyl-adenosine
  modified_base 78: mod_base = OTHER; note = 2'-O-Methyl-adenosine
  modified_base 79: mod_base = OTHER; note = 2'-O-Methyl-guanosine
  modified_base 80: mod_base = OTHER; note = 2'-O-Methyl-uridine
  modified_base 81: mod_base = OTHER; note = 2'-O-Methyl-guanosine
  modified_base 83: mod_base = OTHER; note = 2'-O-Methyl-cytidine
  modified_base 84: mod_base = OTHER; note = 2'-O-Methyl-adenosine
  modified_base 85: mod_base = OTHER; note = 2'-O-Methyl-cytidine
  modified_base 86: mod_base = OTHER; note = 2'-O-Methyl-cytidine
  modified_base 87: mod_base = OTHER; note = 2'-O-Methyl-guanosine
  modified_base 88: mod_base = OTHER; note = 2'-O-Methyl-adenosine
  modified_base 89: mod_base = OTHER; note = 2'-O-Methyl-guanosine
  modified_base 90: mod_base = OTHER; note = 2'-O-Methyl-uridine
  modified_base 91: mod_base = OTHER; note = 2'-O-Methyl-cytidine
  modified_base 92: mod_base = OTHER; note = 2'-O-Methyl-guanosine
  modified_base 93: mod_base = OTHER; note = 2'-O-Methyl-guanosine
  modified_base 94: mod_base = OTHER; note = 2'-O-Methyl-uridine
  modified_base 95: mod_base = OTHER; note = 2'-O-Methyl-guanosine
  modified_base 96: mod_base = OTHER; note = 2'-O-Methyl-cytidine
  modified_base 97: mod_base = OTHER; note = 2'-O-Methyl-uridine
  modified_base 98: mod_base = OTHER; note = 2'-O-Methyl-uridine phosphorothioate
  modified_base 99: mod_base = OTHER; note = 2'-O-Methyl-uridine phosphorothioate
  modified_base 100: mod_base = OTHER; note = 2'-O-Methyl-uridine
  misc_difference 101: note = modified_base - a, c, u, g, unknown or other - a, c, g, inosine, u, deoxyadenosine, deoxyguanosine, deoxycytidine, deoxyinosine, thymine, ribonebularine, 2'-O-methylnebularine, or 2'-deoxynebularine
  misc_difference 102: note = modified_base - a, c, u, g, unknown or other - a, c, g, inosine, u, deoxyadenosine, deoxyguanosine, deoxycytidine, deoxyinosine, thymine, ribonebularine, 2'-O-methylnebularine, or 2'-deoxynebularine
  misc_difference 103: note = modified_base - a, c, u, g, unknown or other - a, c, g, inosine, u, deoxyadenosine, deoxyguanosine, deoxycytidine, deoxyinosine, thymine, ribonebularine, 2'-O-methylnebularine, or 2'-deoxynebularine

SEQ ID NO: 1859 - RNA, 103 nt, synthetic construct; identical to SEQ ID NO: 1795
  source 1..103: mol_type = other RNA; note = Description of Artificial Sequence: Synthetic polynucleotide
  modified_base 1: mod_base = OTHER; note = 2'-O-Methyl-cytidine phosphorothioate
  modified_base 2: mod_base = OTHER; note = 2'-O-Methyl-cytidine phosphorothioate
  modified_base 3: mod_base = OTHER; note = 2'-O-Methyl-cytidine phosphorothioate
  modified_base 21: mod_base = OTHER; note = 2'-O-Methyl-guanosine
  modified_base 28: mod_base = OTHER; note = 2'-O-Methyl-adenosine
  modified_base 29: mod_base = OTHER; note = 2'-O-Methyl-guanosine
  modified_base 30: mod_base = OTHER; note = 2'-O-Methyl-cytidine
  modified_base 31: mod_base = OTHER; note = 2'-O-Methyl-uridine
  modified_base 32: mod_base = OTHER; note = 2'-O-Methyl-adenosine
  modified_base 34: mod_base = OTHER; note = 2'-O-Methyl-adenosine
  modified_base 35: mod_base = OTHER; note = 2'-O-Methyl-adenosine
  modified_base 36: mod_base = OTHER; note = 2'-O-Methyl-adenosine
  modified_base 37: mod_base = OTHER; note = 2'-O-Methyl-uridine
  modified_base 38: mod_base = OTHER; note = 2'-O-Methyl-adenosine
  modified_base 39: mod_base = OTHER; note = 2'-O-Methyl-guanosine
  modified_base 40: mod_base = OTHER; note = 2'-O-Methyl-cytidine
  modified_base 41: mod_base = OTHER; note = 2'-O-Methyl-adenosine
  modified_base 42: mod_base = OTHER; note = 2'-O-Methyl-adenosine
  modified_base 45: mod_base = OTHER; note = uridine phosphorothioate
  modified_base 46: mod_base = OTHER; note = 2'-O-Methyl-adenosine
  modified_base 48: mod_base = OTHER; note = 2'-O-Methyl-adenosine
  modified_base 50: mod_base = OTHER; note = 2'-O-Methyl-uridine
  modified_base 52: mod_base = OTHER; note = 2'-O-Methyl-adenosine
  modified_base 53: mod_base = OTHER; note = 2'-O-Methyl-guanosine
  modified_base 54: mod_base = OTHER; note = 2'-O-Methyl-guanosine
  modified_base 57: mod_base = OTHER; note = 2'-O-Methyl-adenosine
  modified_base 61: mod_base = OTHER; note = 2'-O-Methyl-cytidine
  modified_base 64: mod_base = OTHER; note = uridine phosphorothioate
  modified_base 66: mod_base = OTHER; note = 2'-O-Methyl-uridine
  modified_base 67: mod_base = OTHER; note = 2'-O-Methyl-cytidine
  modified_base 70: mod_base = OTHER; note = 2'-O-Methyl-cytidine
  modified_base 71: mod_base = OTHER; note = 2'-O-Methyl-uridine
  modified_base 72: mod_base = OTHER; note = 2'-O-Methyl-uridine
  modified_base 74: mod_base = OTHER; note = 2'-O-Methyl-adenosine
  modified_base 75: mod_base = OTHER; note = 2'-O-Methyl-adenosine
  modified_base 76: mod_base = OTHER; note = 2'-O-Methyl-adenosine
  modified_base 77: mod_base = OTHER; note = 2'-O-Methyl-adenosine
  modified_base 78: mod_base = OTHER; note = 2'-O-Methyl-adenosine
  modified_base 79: mod_base = OTHER; note = 2'-O-Methyl-guanosine
  modified_base 80: mod_base = OTHER; note = 2'-O-Methyl-uridine
  modified_base 82: mod_base = OTHER; note = 2'-O-Methyl-guanosine
  modified_base 83: mod_base = OTHER; note = 2'-O-Methyl-cytidine
  modified_base 84: mod_base = OTHER; note = 2'-O-Methyl-adenosine
  modified_base 85: mod_base = OTHER; note = 2'-O-Methyl-cytidine
  modified_base 86: mod_base = OTHER; note = 2'-O-Methyl-cytidine
  modified_base 87: mod_base = OTHER; note = 2'-O-Methyl-guanosine
  modified_base 89: mod_base = OTHER; note = 2'-O-Methyl-guanosine
  modified_base 92: mod_base = OTHER; note = 2'-O-Methyl-guanosine
  modified_base 93: mod_base = OTHER; note = 2'-O-Methyl-guanosine
  modified_base 94: mod_base = OTHER; note = 2'-O-Methyl-uridine
  modified_base 95: mod_base = OTHER; note = 2'-O-Methyl-guanosine
  modified_base 96: mod_base = OTHER; note = 2'-O-Methyl-cytidine
  modified_base 97: mod_base = OTHER; note = 2'-O-Methyl-uridine
  modified_base 98: mod_base = OTHER; note = 2'-O-Methyl-uridine phosphorothioate
  modified_base 99: mod_base = OTHER; note = 2'-O-Methyl-uridine phosphorothioate
  modified_base 100: mod_base = OTHER; note = 2'-O-Methyl-uridine
  misc_difference 101: note = modified_base - a, c, u, g, unknown or other - a, c, g, inosine, u, deoxyadenosine, deoxyguanosine, deoxycytidine, deoxyinosine, thymine, ribonebularine, 2'-O-methylnebularine, or 2'-deoxynebularine
  misc_difference 102: note = modified_base - a, c, u, g, unknown or other - a, c, g, inosine, u, deoxyadenosine, deoxyguanosine, deoxycytidine, deoxyinosine, thymine, ribonebularine, 2'-O-methylnebularine, or 2'-deoxynebularine
  misc_difference 103: note = modified_base - a, c, u, g, unknown or other - a, c, g, inosine, u, deoxyadenosine, deoxyguanosine, deoxycytidine, deoxyinosine, thymine, ribonebularine, 2'-O-methylnebularine, or 2'-deoxynebularine

SEQ ID NO: 1860 - RNA, 103 nt, synthetic construct; identical to SEQ ID NO: 1796
  source 1..103: mol_type = other RNA; note = Description of Artificial Sequence: Synthetic polynucleotide
  modified_base 1: mod_base = OTHER; note = 2'-O-Methyl-guanosine phosphorothioate
  modified_base 2: mod_base = OTHER; note = 2'-O-Methyl-adenosine phosphorothioate
  modified_base 3: mod_base = OTHER; note = 2'-O-Methyl-guanosine phosphorothioate
  modified_base 21: mod_base = OTHER; note = 2'-O-Methyl-guanosine
  modified_base 28: mod_base = OTHER; note = 2'-O-Methyl-adenosine
  modified_base 29: mod_base = OTHER; note = 2'-O-Methyl-guanosine
  modified_base 30: mod_base = OTHER; note = 2'-O-Methyl-cytidine
  modified_base 31: mod_base = OTHER; note = 2'-O-Methyl-uridine
  modified_base 32: mod_base = OTHER; note = 2'-O-Methyl-adenosine
  modified_base 34: mod_base = OTHER; note = 2'-O-Methyl-adenosine
  modified_base 35: mod_base = OTHER; note = 2'-O-Methyl-adenosine
  modified_base 36: mod_base = OTHER; note = 2'-O-Methyl-adenosine
  modified_base 37: mod_base = OTHER; note = 2'-O-Methyl-uridine
  modified_base 38: mod_base = OTHER; note = 2'-O-Methyl-adenosine
  modified_base 39: mod_base = OTHER; note = 2'-O-Methyl-guanosine
  modified_base 40: mod_base = OTHER; note = 2'-O-Methyl-cytidine
  modified_base 41: mod_base = OTHER; note = 2'-O-Methyl-adenosine
  modified_base 42: mod_base = OTHER; note = 2'-O-Methyl-adenosine
  modified_base 45: mod_base = OTHER; note = uridine phosphorothioate
  modified_base 46: mod_base = OTHER; note = 2'-O-Methyl-adenosine
  modified_base 48: mod_base = OTHER; note = 2'-O-Methyl-adenosine
  modified_base 50: mod_base = OTHER; note = 2'-O-Methyl-uridine
  modified_base 52: mod_base = OTHER; note = 2'-O-Methyl-adenosine
  modified_base 53: mod_base = OTHER; note = 2'-O-Methyl-guanosine
  modified_base 54: mod_base = OTHER; note = 2'-O-Methyl-guanosine
  modified_base 57: mod_base = OTHER; note = 2'-O-Methyl-adenosine
  modified_base 61: mod_base = OTHER; note = 2'-O-Methyl-cytidine
  modified_base 64: mod_base = OTHER; note = uridine phosphorothioate
  modified_base 66: mod_base = OTHER; note = 2'-O-Methyl-uridine
  modified_base 67: mod_base = OTHER; note = 2'-O-Methyl-cytidine
  modified_base 70: mod_base = OTHER; note = 2'-O-Methyl-cytidine
  modified_base 71: mod_base = OTHER; note = 2'-O-Methyl-uridine
  modified_base 72: mod_base = OTHER; note = 2'-O-Methyl-uridine
  modified_base 74: mod_base = OTHER; note = 2'-O-Methyl-adenosine
  modified_base 75: mod_base = OTHER; note = 2'-O-Methyl-adenosine
  modified_base 76: mod_base = OTHER; note = 2'-O-Methyl-adenosine
  modified_base 77: mod_base = OTHER; note = 2'-O-Methyl-adenosine
  modified_base 78: mod_base = OTHER; note = 2'-O-Methyl-adenosine
  modified_base 79: mod_base = OTHER; note = 2'-O-Methyl-guanosine
  modified_base 80: mod_base = OTHER; note = 2'-O-Methyl-uridine
  modified_base 82: mod_base = OTHER; note = 2'-O-Methyl-guanosine
  modified_base 83: mod_base = OTHER; note = 2'-O-Methyl-cytidine
  modified_base 84: mod_base = OTHER; note = 2'-O-Methyl-adenosine
  modified_base 85: mod_base = OTHER; note = 2'-O-Methyl-cytidine
  modified_base 86: mod_base = OTHER; note = 2'-O-Methyl-cytidine
  modified_base 87: mod_base = OTHER; note = 2'-O-Methyl-guanosine
  modified_base 89: mod_base = OTHER; note = 2'-O-Methyl-guanosine
  modified_base 92: mod_base = OTHER; note = 2'-O-Methyl-guanosine
  modified_base 93: mod_base = OTHER; note = 2'-O-Methyl-guanosine
  modified_base 94: mod_base = OTHER; note = 2'-O-Methyl-uridine
  modified_base 95: mod_base = OTHER; note = 2'-O-Methyl-guanosine
  modified_base 96: mod_base = OTHER; note = 2'-O-Methyl-cytidine
  modified_base 97: mod_base = OTHER; note = 2'-O-Methyl-uridine
  modified_base 98: mod_base = OTHER; note = 2'-O-Methyl-uridine phosphorothioate
  modified_base 99: mod_base = OTHER; note = 2'-O-Methyl-uridine phosphorothioate
  modified_base 100: mod_base = OTHER; note = 2'-O-Methyl-uridine
  misc_difference 101: note = modified_base - a, c, u, g, unknown or other - a, c, g, inosine, u, deoxyadenosine, deoxyguanosine, deoxycytidine, deoxyinosine, thymine, ribonebularine, 2'-O-methylnebularine, or 2'-deoxynebularine
  misc_difference 102: note = modified_base - a, c, u, g, unknown or other - a, c, g, inosine, u, deoxyadenosine, deoxyguanosine, deoxycytidine, deoxyinosine, thymine, ribonebularine, 2'-O-methylnebularine, or 2'-deoxynebularine
  misc_difference 103: note = modified_base - a, c, u, g, unknown or other - a, c, g, inosine, u, deoxyadenosine, deoxyguanosine, deoxycytidine, deoxyinosine, thymine, ribonebularine, 2'-O-methylnebularine, or 2'-deoxynebularine

SEQ ID NO: 1861 - RNA, 103 nt, synthetic construct; identical to SEQ ID NO: 1797
  source 1..103: mol_type = other RNA; note = Description of Artificial Sequence: Synthetic polynucleotide
  modified_base 1: mod_base = OTHER; note = 2'-O-Methyl-cytidine phosphorothioate
  modified_base 2: mod_base = OTHER; note = 2'-O-Methyl-adenosine phosphorothioate
  modified_base 3: mod_base = OTHER; note = 2'-O-Methyl-guanosine phosphorothioate
  modified_base 21: mod_base = OTHER; note = 2'-O-Methyl-guanosine
  modified_base 28: mod_base = OTHER; note = 2'-O-Methyl-adenosine
  modified_base 29: mod_base = OTHER; note = 2'-O-Methyl-guanosine
  modified_base 30: mod_base = OTHER; note = 2'-O-Methyl-cytidine
  modified_base 31: mod_base = OTHER; note = 2'-O-Methyl-uridine
  modified_base 32: mod_base = OTHER; note = 2'-O-Methyl-adenosine
  modified_base 34: mod_base = OTHER; note = 2'-O-Methyl-adenosine
  modified_base 35: mod_base = OTHER; note = 2'-O-Methyl-adenosine
  modified_base 36: mod_base = OTHER; note = 2'-O-Methyl-adenosine
  modified_base 37: mod_base = OTHER; note = 2'-O-Methyl-uridine
  modified_base 38: mod_base = OTHER; note = 2'-O-Methyl-adenosine
  modified_base 39: mod_base = OTHER; note = 2'-O-Methyl-guanosine
  modified_base 40: mod_base = OTHER; note = 2'-O-Methyl-cytidine
  modified_base 41: mod_base = OTHER; note = 2'-O-Methyl-adenosine
  modified_base 42: mod_base = OTHER; note = 2'-O-Methyl-adenosine
  modified_base 45: mod_base = OTHER; note = uridine phosphorothioate
  modified_base 46: mod_base = OTHER; note = 2'-O-Methyl-adenosine
  modified_base 48: mod_base = OTHER; note = 2'-O-Methyl-adenosine
  modified_base 50: mod_base = OTHER; note = 2'-O-Methyl-uridine
  modified_base 52: mod_base = OTHER; note = 2'-O-Methyl-adenosine
  modified_base 53: mod_base = OTHER; note = 2'-O-Methyl-guanosine
  modified_base 54: mod_base = OTHER; note = 2'-O-Methyl-guanosine
  modified_base 55: mod_base = OTHER; note = 2'-O-Methyl-cytidine
  modified_base 56: mod_base = OTHER; note = 2'-O-Methyl-uridine
  modified_base 57: mod_base = OTHER; note = 2'-O-Methyl-adenosine
  modified_base 60: mod_base = OTHER; note = 2'-O-Methyl-cytidine
  modified_base 61: mod_base = OTHER; note = 2'-O-Methyl-cytidine
  modified_base 64: mod_base = OTHER; note = uridine phosphorothioate
  modified_base 66: mod_base = OTHER; note = 2'-O-Methyl-uridine
  modified_base 67: mod_base = OTHER; note = 2'-O-Methyl-cytidine
  modified_base 70: mod_base = OTHER; note = 2'-O-Methyl-cytidine
  modified_base 71: mod_base = OTHER; note = 2'-O-Methyl-uridine
  modified_base 72: mod_base = OTHER; note = 2'-O-Methyl-uridine
  modified_base 74: mod_base = OTHER; note = 2'-O-Methyl-adenosine
  modified_base 75: mod_base = OTHER; note = 2'-O-Methyl-adenosine
  modified_base 76: mod_base = OTHER; note = 2'-O-Methyl-adenosine
  modified_base 77: mod_base = OTHER; note = 2'-O-Methyl-adenosine
  modified_base 78: mod_base = OTHER; note = 2'-O-Methyl-adenosine
  modified_base 79: mod_base = OTHER; note = 2'-O-Methyl-guanosine
  modified_base 80: mod_base = OTHER; note = 2'-O-Methyl-uridine
  modified_base 81: mod_base = OTHER; note = 2'-O-Methyl-guanosine
  modified_base 83: mod_base = OTHER; note = 2'-O-Methyl-cytidine
  modified_base 84: mod_base = OTHER; note = 2'-O-Methyl-adenosine
  modified_base 85: mod_base = OTHER; note = 2'-O-Methyl-cytidine
  modified_base 86: mod_base = OTHER; note = 2'-O-Methyl-cytidine
  modified_base 87: mod_base = OTHER; note = 2'-O-Methyl-guanosine
  modified_base 88: mod_base = OTHER; note = 2'-O-Methyl-adenosine
  modified_base 89: mod_base = OTHER; note = 2'-O-Methyl-guanosine
  modified_base 90: mod_base = OTHER; note = 2'-O-Methyl-uridine
  modified_base 91: mod_base = OTHER; note = 2'-O-Methyl-cytidine
  modified_base 92: mod_base = OTHER; note = 2'-O-Methyl-guanosine
  modified_base 93: mod_base = OTHER; note = 2'-O-Methyl-guanosine
  modified_base 94: mod_base = OTHER; note = 2'-O-Methyl-uridine
  modified_base 95: mod_base = OTHER; note = 2'-O-Methyl-guanosine
  modified_base 96: mod_base = OTHER; note = 2'-O-Methyl-cytidine
  modified_base 97: mod_base = OTHER; note = 2'-O-Methyl-uridine
  modified_base 98: mod_base = OTHER; note = 2'-O-Methyl-uridine phosphorothioate
  modified_base 99: mod_base = OTHER; note = 2'-O-Methyl-uridine phosphorothioate
  modified_base 100: mod_base = OTHER; note = 2'-O-Methyl-uridine
  misc_difference 101: note = modified_base - a, c, u, g, unknown or other - a, c, g, inosine, u, deoxyadenosine, deoxyguanosine, deoxycytidine, deoxyinosine, thymine, ribonebularine, 2'-O-methylnebularine, or 2'-deoxynebularine
  misc_difference 102: note = modified_base - a, c, u, g, unknown or other - a, c, g, inosine, u, deoxyadenosine, deoxyguanosine, deoxycytidine, deoxyinosine, thymine, ribonebularine, 2'-O-methylnebularine, or 2'-deoxynebularine
  misc_difference 103: note = modified_base - a, c, u, g, unknown or other - a, c, g, inosine, u, deoxyadenosine, deoxyguanosine, deoxycytidine, deoxyinosine, thymine, ribonebularine, 2'-O-methylnebularine, or 2'-deoxynebularine

SEQ ID NO: 1862 - RNA, 103 nt, synthetic construct; identical to SEQ ID NO: 1795
  source 1..103: mol_type = other RNA; note = Description of Artificial Sequence: Synthetic polynucleotide
  modified_base 1: mod_base = OTHER; note = 2'-O-Methyl-cytidine phosphorothioate
  modified_base 2: mod_base = OTHER; note = 2'-O-Methyl-cytidine phosphorothioate
  modified_base 3: mod_base = OTHER; note = 2'-O-Methyl-cytidine phosphorothioate
  modified_base 21: mod_base = OTHER; note = 2'-O-Methyl-guanosine
  modified_base 25: mod_base = OTHER; note = uridine phosphorothioate
  modified_base 28: mod_base = OTHER; note = 2'-O-Methyl-adenosine
  modified_base 29: mod_base = OTHER; note = 2'-O-Methyl-guanosine
  modified_base 30: mod_base = OTHER; note = 2'-O-Methyl-cytidine
  modified_base 31: mod_base = OTHER; note = 2'-O-Methyl-uridine
  modified_base 32: mod_base = OTHER; note = 2'-O-Methyl-adenosine
  modified_base 34: mod_base = OTHER; note = 2'-O-Methyl-adenosine
  modified_base 35: mod_base = OTHER; note = 2'-O-Methyl-adenosine
  modified_base 36: mod_base = OTHER; note = 2'-O-Methyl-adenosine
  modified_base 37: mod_base = OTHER; note = 2'-O-Methyl-uridine
  modified_base 38: mod_base = OTHER; note = 2'-O-Methyl-adenosine
  modified_base 39: mod_base = OTHER; note = 2'-O-Methyl-guanosine
  modified_base 40: mod_base = OTHER; note = 2'-O-Methyl-cytidine
  modified_base 41: mod_base = OTHER; note = 2'-O-Methyl-adenosine
  modified_base 42: mod_base = OTHER; note = 2'-O-Methyl-adenosine
  modified_base 45: mod_base = OTHER; note = uridine phosphorothioate
  modified_base 46: mod_base = OTHER; note = 2'-O-Methyl-adenosine
  modified_base 48: mod_base = OTHER; note = 2'-O-Methyl-adenosine
  modified_base 50: mod_base = OTHER; note = 2'-O-Methyl-uridine
  modified_base 52: mod_base = OTHER; note = 2'-O-Methyl-adenosine
  modified_base 53: mod_base = OTHER; note = 2'-O-Methyl-guanosine
  modified_base 54: mod_base = OTHER; note = 2'-O-Methyl-guanosine
  modified_base 57: mod_base = OTHER; note = 2'-O-Methyl-adenosine
  modified_base 61: mod_base = OTHER; note = 2'-O-Methyl-cytidine
  modified_base 66: mod_base = OTHER; note = 2'-O-Methyl-uridine
  modified_base 67: mod_base = OTHER; note = 2'-O-Methyl-cytidine
  modified_base 70: mod_base = OTHER; note = 2'-O-Methyl-cytidine
  modified_base 71: mod_base = OTHER; note = 2'-O-Methyl-uridine
  modified_base 72: mod_base = OTHER; note = 2'-O-Methyl-uridine
  modified_base 74: mod_base = OTHER; note = 2'-O-Methyl-adenosine
  modified_base 75: mod_base = OTHER; note = 2'-O-Methyl-adenosine
  modified_base 76: mod_base = OTHER; note = 2'-O-Methyl-adenosine
  modified_base 77: mod_base = OTHER; note = 2'-O-Methyl-adenosine
  modified_base 78: mod_base = OTHER; note = 2'-O-Methyl-adenosine
  modified_base 79: mod_base = OTHER; note = 2'-O-Methyl-guanosine
  modified_base 80: mod_base = OTHER; note = 2'-O-Methyl-uridine
  modified_base 82: mod_base = OTHER; note = 2'-O-Methyl-guanosine
  modified_base 83: mod_base = OTHER; note = 2'-O-Methyl-cytidine
  modified_base 84: mod_base = OTHER; note = 2'-O-Methyl-adenosine
  modified_base 85: mod_base = OTHER; note = 2'-O-Methyl-cytidine
  modified_base 86: mod_base = OTHER; note = 2'-O-Methyl-cytidine
  modified_base 87: mod_base = OTHER; note = 2'-O-Methyl-guanosine
  modified_base 89: mod_base = OTHER; note = 2'-O-Methyl-guanosine
  modified_base 92: mod_base = OTHER; note = 2'-O-Methyl-guanosine
  modified_base 93: mod_base = OTHER; note = 2'-O-Methyl-guanosine
  modified_base 94: mod_base = OTHER; note = 2'-O-Methyl-uridine
  modified_base 95: mod_base = OTHER; note = 2'-O-Methyl-guanosine
  modified_base 96: mod_base = OTHER; note = 2'-O-Methyl-cytidine
  modified_base 97: mod_base = OTHER; note = 2'-O-Methyl-uridine
  modified_base 98: mod_base = OTHER; note = 2'-O-Methyl-uridine phosphorothioate
  modified_base 99: mod_base = OTHER; note = 2'-O-Methyl-uridine phosphorothioate
  modified_base 100: mod_base = OTHER; note = 2'-O-Methyl-uridine
  misc_difference 101: note = modified_base - a, c, u, g, unknown or other - a, c, g, inosine, u, deoxyadenosine, deoxyguanosine, deoxycytidine, deoxyinosine, thymine, ribonebularine, 2'-O-methylnebularine, or 2'-deoxynebularine
  misc_difference 102: note = modified_base - a, c, u, g, unknown or other - a, c, g, inosine, u, deoxyadenosine, deoxyguanosine, deoxycytidine, deoxyinosine, thymine, ribonebularine, 2'-O-methylnebularine, or 2'-deoxynebularine
  misc_difference 103: note = modified_base - a, c, u, g, unknown or other - a, c, g, inosine, u, deoxyadenosine, deoxyguanosine, deoxycytidine, deoxyinosine, thymine, ribonebularine, 2'-O-methylnebularine, or 2'-deoxynebularine

SEQ ID NO: 1863 - RNA, 103 nt, synthetic construct; identical to SEQ ID NO: 1796
  source 1..103: mol_type = other RNA; note = Description of Artificial Sequence: Synthetic polynucleotide
  modified_base 1: mod_base = OTHER; note = 2'-O-Methyl-guanosine phosphorothioate
  modified_base 2: mod_base = OTHER; note = 2'-O-Methyl-adenosine phosphorothioate
  modified_base 3: mod_base = OTHER; note = 2'-O-Methyl-guanosine phosphorothioate
  modified_base 21: mod_base = OTHER; note = 2'-O-Methyl-guanosine
  modified_base 25: mod_base = OTHER; note = uridine phosphorothioate
  modified_base 28: mod_base = OTHER; note = 2'-O-Methyl-adenosine
  modified_base 29: mod_base = OTHER; note = 2'-O-Methyl-guanosine
  modified_base 30: mod_base = OTHER; note = 2'-O-Methyl-cytidine
  modified_base 31: mod_base = OTHER; note = 2'-O-Methyl-uridine
  modified_base 32: mod_base = OTHER; note = 2'-O-Methyl-adenosine
  modified_base 34: mod_base = OTHER; note = 2'-O-Methyl-adenosine
  modified_base 35: mod_base = OTHER; note = 2'-O-Methyl-adenosine
  modified_base 36: mod_base = OTHER; note = 2'-O-Methyl-adenosine
  modified_base 37: mod_base = OTHER; note = 2'-O-Methyl-uridine
  modified_base 38: mod_base = OTHER; note = 2'-O-Methyl-adenosine
  modified_base 39: mod_base = OTHER; note = 2'-O-Methyl-guanosine
  modified_base 40: mod_base = OTHER; note = 2'-O-Methyl-cytidine
  modified_base 41: mod_base = OTHER; note = 2'-O-Methyl-adenosine
  modified_base 42: mod_base = OTHER; note = 2'-O-Methyl-adenosine
  modified_base 45: mod_base = OTHER; note = uridine phosphorothioate
  modified_base 46: mod_base = OTHER; note = 2'-O-Methyl-adenosine
  modified_base 48: mod_base = OTHER; note = 2'-O-Methyl-adenosine
  modified_base 50: mod_base = OTHER; note = 2'-O-Methyl-uridine
  modified_base 52: mod_base = OTHER; note = 2'-O-Methyl-adenosine
  modified_base 53: mod_base = OTHER; note = 2'-O-Methyl-guanosine
  modified_base 54: mod_base = OTHER; note = 2'-O-Methyl-guanosine
  modified_base 57: mod_base = OTHER; note = 2'-O-Methyl-adenosine
  modified_base 61: mod_base = OTHER; note = 2'-O-Methyl-cytidine
  modified_base 66: mod_base = OTHER; note = 2'-O-Methyl-uridine
  modified_base 67: mod_base = OTHER; note = 2'-O-Methyl-cytidine
  modified_base 70: mod_base = OTHER; note = 2'-O-Methyl-cytidine
  modified_base 71: mod_base = OTHER; note = 2'-O-Methyl-uridine
  modified_base 72: mod_base = OTHER; note = 2'-O-Methyl-uridine
  modified_base 74: mod_base = OTHER; note = 2'-O-Methyl-adenosine
  modified_base 75: mod_base = OTHER; note = 2'-O-Methyl-adenosine
  modified_base 76: mod_base = OTHER; note = 2'-O-Methyl-adenosine
  modified_base 77: mod_base = OTHER; note = 2'-O-Methyl-adenosine
  modified_base 78: mod_base = OTHER; note = 2'-O-Methyl-adenosine
  modified_base 79: mod_base = OTHER; note = 2'-O-Methyl-guanosine
  modified_base 80: mod_base = OTHER; note = 2'-O-Methyl-uridine
  modified_base 82: mod_base = OTHER; note = 2'-O-Methyl-guanosine
  modified_base 83: mod_base = OTHER; note = 2'-O-Methyl-cytidine
  modified_base 84: mod_base = OTHER; note = 2'-O-Methyl-adenosine
  modified_base 85: mod_base = OTHER; note = 2'-O-Methyl-cytidine
  modified_base 86: mod_base = OTHER; note = 2'-O-Methyl-cytidine
  modified_base 87: mod_base = OTHER; note = 2'-O-Methyl-guanosine
  modified_base 89: mod_base = OTHER; note = 2'-O-Methyl-guanosine
  modified_base 92: mod_base = OTHER; note = 2'-O-Methyl-guanosine
  modified_base 93: mod_base = OTHER; note = 2'-O-Methyl-guanosine
  modified_base 94: mod_base = OTHER; note = 2'-O-Methyl-uridine
  modified_base 95: mod_base = OTHER; note = 2'-O-Methyl-guanosine
  modified_base 96: mod_base = OTHER; note = 2'-O-Methyl-cytidine
  modified_base 97: mod_base = OTHER; note = 2'-O-Methyl-uridine
  modified_base 98: mod_base = OTHER; note = 2'-O-Methyl-uridine phosphorothioate
  modified_base 99: mod_base = OTHER; note = 2'-O-Methyl-uridine phosphorothioate
  modified_base 100: mod_base = OTHER; note = 2'-O-Methyl-uridine
  misc_difference 101: note = modified_base - a, c, u, g, unknown or other - a, c, g, inosine, u, deoxyadenosine, deoxyguanosine, deoxycytidine, deoxyinosine, thymine, ribonebularine, 2'-O-methylnebularine, or 2'-deoxynebularine
  misc_difference 102: note = modified_base - a, c, u, g, unknown or other - a, c, g, inosine, u, deoxyadenosine, deoxyguanosine, deoxycytidine, deoxyinosine, thymine, ribonebularine, 2'-O-methylnebularine, or 2'-deoxynebularine
  misc_difference 103: note = modified_base - a, c, u, g, unknown or other - a, c, g, inosine, u, deoxyadenosine, deoxyguanosine, deoxycytidine, deoxyinosine, thymine, ribonebularine, 2'-O-methylnebularine, or 2'-deoxynebularine

SEQ ID NO: 1864 - RNA, 103 nt, synthetic construct; identical to SEQ ID NO: 1797
  source 1..103: mol_type = other RNA; note = Description of Artificial Sequence: Synthetic polynucleotide
  modified_base 1: mod_base = OTHER; note = 2'-O-Methyl-cytidine phosphorothioate
  modified_base 2: mod_base = OTHER; note = 2'-O-Methyl-adenosine phosphorothioate
  modified_base 3: mod_base = OTHER; note = 2'-O-Methyl-guanosine phosphorothioate
  modified_base 21: mod_base = OTHER; note = 2'-O-Methyl-guanosine
  modified_base 25: mod_base = OTHER; note = uridine phosphorothioate
  modified_base 28: mod_base = OTHER; note = 2'-O-Methyl-adenosine
  modified_base 29: mod_base = OTHER; note = 2'-O-Methyl-guanosine
  modified_base 30: mod_base = OTHER; note = 2'-O-Methyl-cytidine
  modified_base 31: mod_base = OTHER; note = 2'-O-Methyl-uridine
  modified_base 32: mod_base = OTHER; note = 2'-O-Methyl-adenosine
  modified_base 34: mod_base = OTHER; note = 2'-O-Methyl-adenosine
  modified_base 35: mod_base = OTHER; note = 2'-O-Methyl-adenosine
  modified_base 36: mod_base = OTHER; note = 2'-O-Methyl-adenosine
  modified_base 37: mod_base = OTHER; note = 2'-O-Methyl-uridine
  modified_base 38: mod_base = OTHER; note = 2'-O-Methyl-adenosine
  modified_base 39: mod_base = OTHER; note = 2'-O-Methyl-guanosine
  modified_base 40: mod_base = OTHER; note = 2'-O-Methyl-cytidine
  modified_base 41: mod_base = OTHER; note = 2'-O-Methyl-adenosine
  modified_base 42: mod_base = OTHER; note = 2'-O-Methyl-adenosine
  modified_base 45: mod_base = OTHER; note = uridine phosphorothioate
  modified_base 46: mod_base = OTHER; note = 2'-O-Methyl-adenosine
  modified_base 48: mod_base = OTHER; note = 2'-O-Methyl-adenosine
  modified_base 50: mod_base = OTHER; note = 2'-O-Methyl-uridine
  modified_base 52: mod_base = OTHER; note = 2'-O-Methyl-adenosine
  modified_base 53: mod_base = OTHER; note = 2'-O-Methyl-guanosine
  modified_base 54: mod_base = OTHER; note = 2'-O-Methyl-guanosine
  modified_base 55: mod_base = OTHER; note = 2'-O-Methyl-cytidine
  modified_base 56: mod_base = OTHER; note = 2'-O-Methyl-uridine
  modified_base 57: mod_base = OTHER; note = 2'-O-Methyl-adenosine
  modified_base 60: mod_base = OTHER; note = 2'-O-Methyl-cytidine
  modified_base 61: mod_base = OTHER; note = 2'-O-Methyl-cytidine
  modified_base 66: mod_base = OTHER; note = 2'-O-Methyl-uridine
  modified_base 67: mod_base = OTHER; note = 2'-O-Methyl-cytidine
  modified_base 70: mod_base = OTHER; note = 2'-O-Methyl-cytidine
  modified_base 71: mod_base = OTHER; note = 2'-O-Methyl-uridine
  modified_base 72: mod_base = OTHER; note = 2'-O-Methyl-uridine
  modified_base 74: mod_base = OTHER; note = 2'-O-Methyl-adenosine
  modified_base 75: mod_base = OTHER; note = 2'-O-Methyl-adenosine
  modified_base 76: mod_base = OTHER; note = 2'-O-Methyl-adenosine
  modified_base 77: mod_base = OTHER; note = 2'-O-Methyl-adenosine
  modified_base 78: mod_base = OTHER; note = 2'-O-Methyl-adenosine
  modified_base 79: mod_base = OTHER; note = 2'-O-Methyl-guanosine
  modified_base 80: mod_base = OTHER; note = 2'-O-Methyl-uridine
  modified_base 81: mod_base = OTHER; note = 2'-O-Methyl-guanosine
  modified_base 83: mod_base = OTHER; note = 2'-O-Methyl-cytidine
  modified_base 84: mod_base = OTHER; note = 2'-O-Methyl-adenosine
  modified_base 85: mod_base = OTHER; note = 2'-O-Methyl-cytidine
  modified_base 86: mod_base = OTHER; note = 2'-O-Methyl-cytidine
  modified_base 87: mod_base = OTHER; note = 2'-O-Methyl-guanosine
  modified_base 88: mod_base = OTHER; note = 2'-O-Methyl-adenosine
  modified_base 89: mod_base = OTHER; note = 2'-O-Methyl-guanosine
  modified_base 90: mod_base = OTHER; note = 2'-O-Methyl-uridine
  modified_base 91: mod_base = OTHER; note = 2'-O-Methyl-cytidine
  modified_base 92: mod_base = OTHER; note = 2'-O-Methyl-guanosine
  modified_base 93: mod_base = OTHER; note = 2'-O-Methyl-guanosine
  modified_base 94: mod_base = OTHER; note = 2'-O-Methyl-uridine
  modified_base 95: mod_base = OTHER; note = 2'-O-Methyl-guanosine
  modified_base 96: mod_base = OTHER; note = 2'-O-Methyl-cytidine
  modified_base 97: mod_base = OTHER; note = 2'-O-Methyl-uridine
  modified_base 98: mod_base = OTHER; note = 2'-O-Methyl-uridine phosphorothioate
  modified_base 99: mod_base = OTHER; note = 2'-O-Methyl-uridine phosphorothioate
  modified_base 100: mod_base = OTHER; note = 2'-O-Methyl-uridine
  misc_difference 101: note = modified_base - a, c, u, g, unknown or other - a, c, g, inosine, u, deoxyadenosine, deoxyguanosine, deoxycytidine, deoxyinosine, thymine, ribonebularine, 2'-O-methylnebularine, or 2'-deoxynebularine
  misc_difference 102: note = modified_base - a, c, u, g, unknown or other - a, c, g, inosine, u, deoxyadenosine, deoxyguanosine, deoxycytidine, deoxyinosine, thymine, ribonebularine, 2'-O-methylnebularine, or 2'-deoxynebularine
  misc_difference 103: note = modified_base - a, c, u, g, unknown or other - a, c, g, inosine, u, deoxyadenosine, deoxyguanosine, deoxycytidine, deoxyinosine, thymine, ribonebularine, 2'-O-methylnebularine, or 2'-deoxynebularine

SEQ ID NO: 1865 - RNA, 103 nt, synthetic construct; identical to SEQ ID NO: 1795
  source 1..103: mol_type = other RNA; note = Description of Artificial Sequence: Synthetic polynucleotide
  modified_base 1: mod_base = OTHER; note = 2'-O-Methyl-cytidine phosphorothioate
  modified_base 2: mod_base = OTHER; note = 2'-O-Methyl-cytidine phosphorothioate
  modified_base 3: mod_base = OTHER; note = 2'-O-Methyl-cytidine phosphorothioate
  modified_base 21: mod_base = OTHER; note = 2'-O-Methyl-guanosine
  modified_base 25: mod_base = OTHER; note = uridine phosphorothioate
  modified_base 28: mod_base = OTHER; note = 2'-O-Methyl-adenosine
  modified_base 29: mod_base = OTHER; note = 2'-O-Methyl-guanosine
  modified_base 30: mod_base = OTHER; note = 2'-O-Methyl-cytidine
  modified_base 31: mod_base = OTHER; note = 2'-O-Methyl-uridine
  modified_base 32: mod_base = OTHER; note = 2'-O-Methyl-adenosine
  modified_base 34: mod_base = OTHER; note = 2'-O-Methyl-adenosine
  modified_base 35: mod_base = OTHER; note = 2'-O-Methyl-adenosine
  modified_base 36: mod_base = OTHER; note = 2'-O-Methyl-adenosine
  modified_base 37: mod_base = OTHER; note = 2'-O-Methyl-uridine
  modified_base 38: mod_base = OTHER; note = 2'-O-Methyl-adenosine
  modified_base 39: mod_base = OTHER; note = 2'-O-Methyl-guanosine
  modified_base 40: mod_base = OTHER; note = 2'-O-Methyl-cytidine
  modified_base 41: mod_base = OTHER; note = 2'-O-Methyl-adenosine
  modified_base 42: mod_base = OTHER; note = 2'-O-Methyl-adenosine
  modified_base 46: mod_base = OTHER; note = 2'-O-Methyl-adenosine
  modified_base 48: mod_base = OTHER; note = 2'-O-Methyl-adenosine
  modified_base 50: mod_base = OTHER; note = 2'-O-Methyl-uridine
  modified_base 52: mod_base = OTHER; note = 2'-O-Methyl-adenosine
  modified_base 53: mod_base = OTHER; note = 2'-O-Methyl-guanosine
  modified_base 54: mod_base = OTHER; note = 2'-O-Methyl-guanosine
  modified_base 57: mod_base = OTHER; note = 2'-O-Methyl-adenosine
  modified_base 61: mod_base = OTHER; note = 2'-O-Methyl-cytidine
  modified_base 64: mod_base = OTHER; note = uridine phosphorothioate
  modified_base 66: mod_base = OTHER; note = 2'-O-Methyl-uridine
  modified_base 67: mod_base = OTHER; note = 2'-O-Methyl-cytidine
  modified_base 70: mod_base = OTHER; note = 2'-O-Methyl-cytidine
  modified_base 71: mod_base = OTHER; note = 2'-O-Methyl-uridine
  modified_base 72: mod_base = OTHER; note = 2'-O-Methyl-uridine
  modified_base 74: mod_base = OTHER; note = 2'-O-Methyl-adenosine
  modified_base 75: mod_base = OTHER; note = 2'-O-Methyl-adenosine
  modified_base 76: mod_base = OTHER; note = 2'-O-Methyl-adenosine
  modified_base 77: mod_base = OTHER; note = 2'-O-Methyl-adenosine
  modified_base 78: mod_base = OTHER; note = 2'-O-Methyl-adenosine
  modified_base 79: mod_base = OTHER; note = 2'-O-Methyl-guanosine
  modified_base 80: mod_base = OTHER; note = 2'-O-Methyl-uridine
  modified_base 82: mod_base = OTHER; note = 2'-O-Methyl-guanosine
  modified_base 83: mod_base = OTHER; note = 2'-O-Methyl-cytidine
  modified_base 84: mod_base = OTHER; note = 2'-O-Methyl-adenosine
  modified_base 85: mod_base = OTHER; note = 2'-O-Methyl-cytidine
  modified_base 86: mod_base = OTHER; note = 2'-O-Methyl-cytidine
  modified_base 87: mod_base = OTHER; note = 2'-O-Methyl-guanosine
  modified_base 89: mod_base = OTHER; note = 2'-O-Methyl-guanosine
  modified_base 92: mod_base = OTHER; note = 2'-O-Methyl-guanosine
  modified_base 93: mod_base = OTHER; note = 2'-O-Methyl-guanosine
  modified_base 94: mod_base = OTHER; note = 2'-O-Methyl-uridine
  modified_base 95: mod_base = OTHER; note = 2'-O-Methyl-guanosine
  modified_base 96: mod_base = OTHER; note = 2'-O-Methyl-cytidine
  modified_base 97: mod_base = OTHER; note = 2'-O-Methyl-uridine
  modified_base 98: mod_base = OTHER; note = 2'-O-Methyl-uridine phosphorothioate
  modified_base 99: mod_base = OTHER; note = 2'-O-Methyl-uridine phosphorothioate
  modified_base 100: mod_base = OTHER; note = 2'-O-Methyl-uridine
  misc_difference 101: note = modified_base - a, c, u, g, unknown or other - a, c, g, inosine, u, deoxyadenosine, deoxyguanosine, deoxycytidine, deoxyinosine, thymine, ribonebularine, 2'-O-methylnebularine, or 2'-deoxynebularine
  misc_difference 102: note = modified_base - a, c, u, g, unknown or other - a, c, g, inosine, u, deoxyadenosine, deoxyguanosine, deoxycytidine, deoxyinosine, thymine, ribonebularine, 2'-O-methylnebularine, or 2'-deoxynebularine
  misc_difference 103: note = modified_base - a, c, u, g, unknown or other - a, c, g, inosine, u, deoxyadenosine, deoxyguanosine, deoxycytidine, deoxyinosine, thymine, ribonebularine, 2'-O-methylnebularine, or 2'-deoxynebularine

SEQ ID NO: 1866 - RNA, 103 nt, synthetic construct; identical to SEQ ID NO: 1796
  source 1..103: mol_type = other RNA; note = Description of Artificial Sequence: Synthetic polynucleotide
  modified_base 1: mod_base = OTHER; note = 2'-O-Methyl-guanosine phosphorothioate
  modified_base 2: mod_base = OTHER; note = 2'-O-Methyl-adenosine phosphorothioate
  modified_base 3: mod_base = OTHER; note = 2'-O-Methyl-guanosine phosphorothioate
  modified_base 21: mod_base = OTHER; note = 2'-O-Methyl-guanosine
  modified_base 25: mod_base = OTHER; note = uridine phosphorothioate
  modified_base 28: mod_base = OTHER; note = 2'-O-Methyl-adenosine
  modified_base 29: mod_base = OTHER; note = 2'-O-Methyl-guanosine
  modified_base 30: mod_base = OTHER; note = 2'-O-Methyl-cytidine
  modified_base 31: mod_base = OTHER; note = 2'-O-Methyl-uridine
  modified_base 32: mod_base = OTHER; note = 2'-O-Methyl-adenosine
  modified_base 34: mod_base = OTHER; note = 2'-O-Methyl-adenosine
  modified_base 35: mod_base = OTHER; note = 2'-O-Methyl-adenosine
  modified_base 36: mod_base = OTHER; note = 2'-O-Methyl-adenosine
  modified_base 37: mod_base = OTHER; note = 2'-O-Methyl-uridine
  modified_base 38: mod_base = OTHER; note = 2'-O-Methyl-adenosine
  modified_base 39: mod_base = OTHER; note = 2'-O-Methyl-guanosine
  modified_base 40: mod_base = OTHER; note = 2'-O-Methyl-cytidine
  modified_base 41: mod_base = OTHER; note = 2'-O-Methyl-adenosine
  modified_base 42: mod_base = OTHER; note = 2'-O-Methyl-adenosine
  modified_base 46: mod_base = OTHER; note = 2'-O-Methyl-adenosine
  modified_base 48: mod_base = OTHER; note = 2'-O-Methyl-adenosine
  modified_base 50: mod_base = OTHER; note = 2'-O-Methyl-uridine
  modified_base 52: mod_base = OTHER; note = 2'-O-Methyl-adenosine
  modified_base 53: mod_base = OTHER; note = 2'-O-Methyl-guanosine
  modified_base 54: mod_base = OTHER; note = 2'-O-Methyl-guanosine
  modified_base 57: mod_base = OTHER; note = 2'-O-Methyl-adenosine
  modified_base 61: mod_base = OTHER; note = 2'-O-Methyl-cytidine
  modified_base 64: mod_base = OTHER; note = uridine phosphorothioate
  modified_base 66: mod_base = OTHER; note = 2'-O-Methyl-uridine
  modified_base 67: mod_base = OTHER; note = 2'-O-Methyl-cytidine
  modified_base 70: mod_base = OTHER; note = 2'-O-Methyl-cytidine
  modified_base 71: mod_base = OTHER; note = 2'-O-Methyl-uridine
  modified_base 72: mod_base = OTHER; note = 2'-O-Methyl-uridine
  modified_base 74: mod_base = OTHER; note = 2'-O-Methyl-adenosine
  modified_base 75: mod_base = OTHER; note = 2'-O-Methyl-adenosine
  modified_base 76: mod_base = OTHER; note = 2'-O-Methyl-adenosine
  modified_base 77: mod_base = OTHER; note = 2'-O-Methyl-adenosine
  modified_base 78: mod_base = OTHER; note = 2'-O-Methyl-adenosine
  modified_base 79: mod_base = OTHER; note = 2'-O-Methyl-guanosine
  modified_base 80: mod_base = OTHER; note = 2'-O-Methyl-uridine
  modified_base 82: mod_base = OTHER; note = 2'-O-Methyl-guanosine
  modified_base 83: mod_base = OTHER; note = 2'-O-Methyl-cytidine
  modified_base 84: mod_base = OTHER; note = 2'-O-Methyl-adenosine
  modified_base 85: mod_base = OTHER; note = 2'-O-Methyl-cytidine
  modified_base 86: mod_base = OTHER; note = 2'-O-Methyl-cytidine
  modified_base 87: mod_base = OTHER; note = 2'-O-Methyl-guanosine
  modified_base 89: mod_base = OTHER; note = 2'-O-Methyl-guanosine
  modified_base 92: mod_base = OTHER; note = 2'-O-Methyl-guanosine
  modified_base 93: mod_base = OTHER; note = 2'-O-Methyl-guanosine
  modified_base 94: mod_base = OTHER; note = 2'-O-Methyl-uridine
  modified_base 95: mod_base = OTHER; note = 2'-O-Methyl-guanosine
  modified_base 96: mod_base = OTHER; note = 2'-O-Methyl-cytidine
  modified_base 97: mod_base = OTHER; note = 2'-O-Methyl-uridine
  modified_base 98: mod_base = OTHER; note = 2'-O-Methyl-uridine phosphorothioate
  modified_base 99: mod_base = OTHER; note = 2'-O-Methyl-uridine phosphorothioate
  modified_base 100: mod_base = OTHER; note = 2'-O-Methyl-uridine
  misc_difference 101: note = modified_base - a, c, u, g, unknown or other - a, c, g, inosine, u, deoxyadenosine, deoxyguanosine, deoxycytidine, deoxyinosine, thymine, ribonebularine, 2'-O-methylnebularine, or 2'-deoxynebularine
  misc_difference 102: note = modified_base - a, c, u, g, unknown or other - a, c, g, inosine, u, deoxyadenosine, deoxyguanosine, deoxycytidine, deoxyinosine, thymine, ribonebularine, 2'-O-methylnebularine, or 2'-deoxynebularine
  misc_difference 103: note = modified_base - a, c, u, g, unknown or other - a, c, g, inosine, u, deoxyadenosine, deoxyguanosine, deoxycytidine, deoxyinosine, thymine, ribonebularine, 2'-O-methylnebularine, or 2'-deoxynebularine

SEQ ID NO: 1867 - RNA, 103 nt, synthetic construct; identical to SEQ ID NO: 1797
  source 1..103: mol_type = other RNA; note = Description of Artificial Sequence: Synthetic polynucleotide
  modified_base 1: mod_base = OTHER; note = 2'-O-Methyl-cytidine phosphorothioate
  modified_base 2: mod_base = OTHER; note = 2'-O-Methyl-adenosine phosphorothioate
  modified_base 3: mod_base = OTHER; note = 2'-O-Methyl-guanosine phosphorothioate
  modified_base 21: mod_base = OTHER; note = 2'-O-Methyl-guanosine
  modified_base 25: mod_base = OTHER; note = uridine phosphorothioate
  modified_base 28: mod_base = OTHER; note = 2'-O-Methyl-adenosine
  modified_base 29: mod_base = OTHER; note = 2'-O-Methyl-guanosine
  modified_base 30: mod_base = OTHER; note = 2'-O-Methyl-cytidine
  modified_base 31: mod_base = OTHER; note = 2'-O-Methyl-uridine
  modified_base 32: mod_base = OTHER; note = 2'-O-Methyl-adenosine
  modified_base 34: mod_base = OTHER; note = 2'-O-Methyl-adenosine
  modified_base 35: mod_base = OTHER; note = 2'-O-Methyl-adenosine
  modified_base 36: mod_base = OTHER; note = 2'-O-Methyl-adenosine
  modified_base 37: mod_base = OTHER; note = 2'-O-Methyl-uridine
  modified_base 38: mod_base = OTHER; note = 2'-O-Methyl-adenosine
  modified_base 39: mod_base = OTHER; note = 2'-O-Methyl-guanosine
  modified_base 40: mod_base = OTHER; note = 2'-O-Methyl-cytidine
  modified_base 41: mod_base = OTHER; note = 2'-O-Methyl-adenosine
  modified_base 42: mod_base = OTHER; note = 2'-O-Methyl-adenosine
  modified_base 46: mod_base = OTHER; note = 2'-O-Methyl-adenosine
  modified_base 48: mod_base = OTHER; note = 2'-O-Methyl-adenosine
  modified_base 50: mod_base = OTHER; note = 2'-O-Methyl-uridine
  modified_base 52: mod_base = OTHER; note = 2'-O-Methyl-adenosine
  modified_base 53: mod_base = OTHER; note = 2'-O-Methyl-guanosine
  modified_base 54: mod_base = OTHER; note = 2'-O-Methyl-guanosine
  modified_base 55: mod_base = OTHER; note = 2'-O-Methyl-cytidine
  modified_base 56: mod_base = OTHER; note = 2'-O-Methyl-uridine
  modified_base 57: mod_base = OTHER; note = 2'-O-Methyl-adenosine
  modified_base 60: mod_base = OTHER; note = 2'-O-Methyl-cytidine
  modified_base 61: mod_base = OTHER; note = 2'-O-Methyl-cytidine
  modified_base 64: mod_base = OTHER; note = uridine phosphorothioate
  modified_base 66: mod_base = OTHER; note = 2'-O-Methyl-uridine
  modified_base 67: mod_base = OTHER; note = 2'-O-Methyl-cytidine
  modified_base 70: mod_base = OTHER; note = 2'-O-Methyl-cytidine
  modified_base 71: mod_base = OTHER; note = 2'-O-Methyl-uridine
  modified_base 72: mod_base = OTHER; note = 2'-O-Methyl-uridine
  modified_base 74: mod_base = OTHER; note = 2'-O-Methyl-adenosine
  modified_base 75: mod_base = OTHER; note = 2'-O-Methyl-adenosine
  modified_base 76: mod_base = OTHER; note = 2'-O-Methyl-adenosine
  modified_base 77: mod_base = OTHER; note = 2'-O-Methyl-adenosine
  modified_base 78: mod_base = OTHER; note = 2'-O-Methyl-adenosine
  modified_base 79: mod_base = OTHER; note = 2'-O-Methyl-guanosine
  modified_base 80: mod_base = OTHER; note = 2'-O-Methyl-uridine
  modified_base 81: mod_base = OTHER; note = 2'-O-Methyl-guanosine
  modified_base 83: mod_base = OTHER; note = 2'-O-Methyl-cytidine
  modified_base 84: mod_base = OTHER; note = 2'-O-Methyl-adenosine
  modified_base 85: mod_base = OTHER; note = 2'-O-Methyl-cytidine
  modified_base 86: mod_base = OTHER; note = 2'-O-Methyl-cytidine
  modified_base 87: mod_base = OTHER; note = 2'-O-Methyl-guanosine
  modified_base 88: mod_base = OTHER; note = 2'-O-Methyl-adenosine
  modified_base 89: mod_base = OTHER; note = 2'-O-Methyl-guanosine
  modified_base 90: mod_base = OTHER; note = 2'-O-Methyl-uridine
  modified_base 91: mod_base = OTHER; note = 2'-O-Methyl-cytidine
  modified_base 92: mod_base = OTHER; note = 2'-O-Methyl-guanosine
  modified_base 93: mod_base = OTHER; note = 2'-O-Methyl-guanosine
  modified_base 94: mod_base = OTHER; note = 2'-O-Methyl-uridine
  modified_base 95: mod_base = OTHER; note = 2'-O-Methyl-guanosine
  modified_base 96: mod_base = OTHER; note = 2'-O-Methyl-cytidine
  modified_base 97: mod_base = OTHER; note = 2'-O-Methyl-uridine
  modified_base 98: mod_base = OTHER; note = 2'-O-Methyl-uridine phosphorothioate
  modified_base 99: mod_base = OTHER; note = 2'-O-Methyl-uridine phosphorothioate
  modified_base 100: mod_base = OTHER; note = 2'-O-Methyl-uridine
  misc_difference 101: note = modified_base - a, c, u, g, unknown or other - a, c, g, inosine, u, deoxyadenosine, deoxyguanosine, deoxycytidine, deoxyinosine, thymine, ribonebularine, 2'-O-methylnebularine, or 2'-deoxynebularine
  misc_difference 102: note = modified_base - a, c, u, g, unknown or other - a, c, g, inosine, u, deoxyadenosine, deoxyguanosine, deoxycytidine, deoxyinosine, thymine, ribonebularine, 2'-O-methylnebularine, or 2'-deoxynebularine
  misc_difference 103: note = modified_base - a, c, u, g, unknown or other - a, c, g, inosine, u, deoxyadenosine, deoxyguanosine, deoxycytidine, deoxyinosine, thymine, ribonebularine, 2'-O-methylnebularine, or 2'-deoxynebularine

SEQ ID NO: 1868 - RNA, 103 nt, synthetic construct; identical to SEQ ID NO: 1795
  source 1..103: mol_type = other RNA; note = Description of Artificial Sequence: Synthetic polynucleotide
  modified_base 1: mod_base = OTHER; note = 2'-O-Methyl-cytidine phosphorothioate
  modified_base 2: mod_base = OTHER; note = 2'-O-Methyl-cytidine phosphorothioate
  modified_base 3: mod_base = OTHER; note = 2'-O-Methyl-cytidine phosphorothioate
  modified_base 21: mod_base = OTHER; note = 2'-O-Methyl-guanosine
  modified_base 25: mod_base = OTHER; note = uridine phosphorothioate
  modified_base 28: mod_base = OTHER; note = 2'-O-Methyl-adenosine
  modified_base 29: mod_base = OTHER; note = 2'-O-Methyl-guanosine
  modified_base 30: mod_base = OTHER; note = 2'-O-Methyl-cytidine
  modified_base 31: mod_base = OTHER; note = 2'-O-Methyl-uridine
  modified_base 32: mod_base = OTHER; note = 2'-O-Methyl-adenosine
  modified_base 34: mod_base = OTHER; note = 2'-O-Methyl-adenosine
  modified_base 35: mod_base = OTHER; note = 2'-O-Methyl-adenosine
  modified_base 36: mod_base = OTHER; note = 2'-O-Methyl-adenosine
  modified_base 37: mod_base = OTHER; note = 2'-O-Methyl-uridine
  modified_base 38: mod_base = OTHER; note = 2'-O-Methyl-adenosine
  modified_base 39: mod_base = OTHER; note = 2'-O-Methyl-guanosine
  modified_base 40: mod_base = OTHER; note = 2'-O-Methyl-cytidine
  modified_base 41: mod_base = OTHER; note = 2'-O-Methyl-adenosine
  modified_base 42: mod_base = OTHER; note = 2'-O-Methyl-adenosine
  modified_base 45: mod_base = OTHER; note = uridine phosphorothioate
  modified_base 46: mod_base = OTHER; note = 2'-O-Methyl-adenosine
  modified_base 48: mod_base = OTHER; note = 2'-O-Methyl-adenosine
  modified_base 50: mod_base = OTHER; note = 2'-O-Methyl-uridine
  modified_base 52: mod_base = OTHER; note = 2'-O-Methyl-adenosine
  modified_base 53: mod_base = OTHER; note = 2'-O-Methyl-guanosine
  modified_base 54: mod_base = OTHER; note = 2'-O-Methyl-guanosine
  modified_base 57: mod_base = OTHER; note = 2'-O-Methyl-adenosine
  modified_base 61: mod_base = OTHER; note = 2'-O-Methyl-cytidine
  modified_base 64: mod_base = OTHER; note = uridine phosphorothioate
  modified_base 66: mod_base = OTHER; note = 2'-O-Methyl-uridine
  modified_base 67: mod_base = OTHER; note = 2'-O-Methyl-cytidine
  modified_base 70: mod_base = OTHER; note = 2'-O-Methyl-cytidine
  modified_base 71: mod_base = OTHER; note = 2'-O-Methyl-uridine
  modified_base 72: mod_base = OTHER; note = 2'-O-Methyl-uridine
  modified_base 74: mod_base = OTHER; note = 2'-O-Methyl-adenosine
  modified_base 75: mod_base = OTHER; note = 2'-O-Methyl-adenosine
  modified_base 76: mod_base = OTHER; note = 2'-O-Methyl-adenosine
  modified_base 77: mod_base = OTHER; note = 2'-O-Methyl-adenosine
  modified_base 78: mod_base = OTHER; note = 2'-O-Methyl-adenosine
  modified_base 79: mod_base = OTHER; note = 2'-O-Methyl-guanosine
  modified_base 80: mod_base = OTHER; note = 2'-O-Methyl-uridine
  modified_base 82: mod_base = OTHER; note = 2'-O-Methyl-guanosine
  modified_base 83: mod_base = OTHER; note = 2'-O-Methyl-cytidine
  modified_base 84: mod_base = OTHER; note = 2'-O-Methyl-adenosine
  modified_base 85: mod_base = OTHER; note = 2'-O-Methyl-cytidine
  modified_base 86: mod_base = OTHER; note = 2'-O-Methyl-cytidine
  modified_base 87: mod_base = OTHER; note = 2'-O-Methyl-guanosine
  modified_base 89: mod_base = OTHER; note = 2'-O-Methyl-guanosine
  modified_base 92: mod_base = OTHER; note = 2'-O-Methyl-guanosine
  modified_base 93: mod_base = OTHER; note = 2'-O-Methyl-guanosine
  modified_base 94: mod_base = OTHER; note = 2'-O-Methyl-uridine
  modified_base 95: mod_base = OTHER; note = 2'-O-Methyl-guanosine
  modified_base 96: mod_base = OTHER; note = 2'-O-Methyl-cytidine
  modified_base 97: mod_base = OTHER; note = 2'-O-Methyl-uridine
  modified_base 98: mod_base = OTHER; note = 2'-O-Methyl-uridine phosphorothioate
  modified_base 99: mod_base = OTHER; note = 2'-O-Methyl-uridine phosphorothioate
  modified_base 100: mod_base = OTHER; note = 2'-O-Methyl-uridine
  misc_difference 101: note = modified_base - a, c, u, g, unknown or other - a, c, g, inosine, u, deoxyadenosine, deoxyguanosine, deoxycytidine, deoxyinosine, thymine, ribonebularine, 2'-O-methylnebularine, or 2'-deoxynebularine
  misc_difference 102: note = modified_base - a, c, u, g, unknown or other - a, c, g, inosine, u, deoxyadenosine, deoxyguanosine, deoxycytidine, deoxyinosine, thymine, ribonebularine, 2'-O-methylnebularine, or 2'-deoxynebularine
  misc_difference 103: note = modified_base - a, c, u, g, unknown or other - a, c, g, inosine, u, deoxyadenosine, deoxyguanosine, deoxycytidine, deoxyinosine, thymine, ribonebularine, 2'-O-methylnebularine, or 2'-deoxynebularine

SEQ ID NO: 1869 - RNA, 103 nt, synthetic construct; identical to SEQ ID NO: 1796
  source 1..103: mol_type = other RNA; note = Description of Artificial Sequence: Synthetic polynucleotide
  modified_base 1: mod_base = OTHER; note = 2'-O-Methyl-guanosine phosphorothioate
  modified_base 2: mod_base = OTHER; note = 2'-O-Methyl-adenosine phosphorothioate
  modified_base 3: mod_base = OTHER; note = 2'-O-Methyl-guanosine phosphorothioate
  modified_base 21: mod_base = OTHER; note = 2'-O-Methyl-guanosine
  modified_base 25: mod_base = OTHER; note = uridine phosphorothioate
  modified_base 28: mod_base = OTHER; note = 2'-O-Methyl-adenosine
  modified_base 29: mod_base = OTHER; note = 2'-O-Methyl-guanosine
  modified_base 30: mod_base = OTHER; note = 2'-O-Methyl-cytidine
  modified_base 31: mod_base = OTHER; note = 2'-O-Methyl-uridine
  modified_base 32: mod_base = OTHER; note = 2'-O-Methyl-adenosine
  modified_base 34: mod_base = OTHER; note = 2'-O-Methyl-adenosine
  modified_base 35: mod_base = OTHER; note = 2'-O-Methyl-adenosine
  modified_base 36: mod_base = OTHER; note = 2'-O-Methyl-adenosine
  modified_base 37: mod_base = OTHER; note = 2'-O-Methyl-uridine
  modified_base 38: mod_base = OTHER; note = 2'-O-Methyl-adenosine
  modified_base 39: mod_base = OTHER; note = 2'-O-Methyl-guanosine
  modified_base 40: mod_base = OTHER; note = 2'-O-Methyl-cytidine
  modified_base 41: mod_base = OTHER; note = 2'-O-Methyl-adenosine
  modified_base 42: mod_base = OTHER; note = 2'-O-Methyl-adenosine
  modified_base 45: mod_base = OTHER; note = uridine phosphorothioate
  modified_base 46: mod_base = OTHER; note = 2'-O-Methyl-adenosine
  modified_base 48: mod_base = OTHER; note = 2'-O-Methyl-adenosine
  modified_base 50: mod_base = OTHER; note = 2'-O-Methyl-uridine
  modified_base 52: mod_base = OTHER; note = 2'-O-Methyl-adenosine
  modified_base 53: mod_base = OTHER; note = 2'-O-Methyl-guanosine
  modified_base 54: mod_base = OTHER; note = 2'-O-Methyl-guanosine
  modified_base 57: mod_base = OTHER; note = 2'-O-Methyl-adenosine
  modified_base 61: mod_base = OTHER; note = 2'-O-Methyl-cytidine
  modified_base 64: mod_base = OTHER; note = uridine phosphorothioate
  modified_base 66: mod_base = OTHER; note = 2'-O-Methyl-uridine
  modified_base 67: mod_base = OTHER; note = 2'-O-Methyl-cytidine
  modified_base 70: mod_base = OTHER; note = 2'-O-Methyl-cytidine
  modified_base 71: mod_base = OTHER; note = 2'-O-Methyl-uridine
  modified_base 72: mod_base = OTHER; note = 2'-O-Methyl-uridine
  modified_base 74: mod_base = OTHER; note = 2'-O-Methyl-adenosine
  modified_base 75: mod_base = OTHER; note = 2'-O-Methyl-adenosine
  modified_base 76: mod_base = OTHER; note = 2'-O-Methyl-adenosine
  modified_base 77: mod_base = OTHER; note = 2'-O-Methyl-adenosine
  modified_base 78: mod_base = OTHER; note = 2'-O-Methyl-adenosine
  modified_base 79: mod_base = OTHER; note = 2'-O-Methyl-guanosine
  modified_base 80: mod_base = OTHER; note = 2'-O-Methyl-uridine
  modified_base 82: mod_base = OTHER; note = 2'-O-Methyl-guanosine
  modified_base 83: mod_base = OTHER; note = 2'-O-Methyl-cytidine
  modified_base 84: mod_base = OTHER; note = 2'-O-Methyl-adenosine
  modified_base 85: mod_base = OTHER; note = 2'-O-Methyl-cytidine
  modified_base 86: mod_base = OTHER; note = 2'-O-Methyl-cytidine
  modified_base 87: mod_base = OTHER; note = 2'-O-Methyl-guanosine
  modified_base 89: mod_base = OTHER; note = 2'-O-Methyl-guanosine
  modified_base 92: mod_base = OTHER; note = 2'-O-Methyl-guanosine
  modified_base 93: mod_base = OTHER; note = 2'-O-Methyl-guanosine
  modified_base 94: mod_base = OTHER; note = 2'-O-Methyl-uridine
  modified_base 95: mod_base = OTHER; note = 2'-O-Methyl-guanosine
  modified_base 96: mod_base = OTHER; note = 2'-O-Methyl-cytidine
  modified_base 97: mod_base = OTHER; note = 2'-O-Methyl-uridine
  modified_base 98: mod_base = OTHER; note = 2'-O-Methyl-uridine phosphorothioate
  modified_base 99: mod_base = OTHER; note = 2'-O-Methyl-uridine phosphorothioate
  modified_base 100: mod_base = OTHER; note = 2'-O-Methyl-uridine
  misc_difference 101: note = modified_base - a, c, u, g, unknown or other - a, c, g, inosine, u, deoxyadenosine, deoxyguanosine, deoxycytidine, deoxyinosine, thymine, ribonebularine, 2'-O-methylnebularine, or 2'-deoxynebularine
  misc_difference 102: note = modified_base - a, c, u, g, unknown or other - a, c, g, inosine, u, deoxyadenosine, deoxyguanosine, deoxycytidine, deoxyinosine, thymine, ribonebularine, 2'-O-methylnebularine, or 2'-deoxynebularine
  misc_difference 103: note = modified_base - a, c, u, g, unknown or other - a, c, g, inosine, u, deoxyadenosine, deoxyguanosine, deoxycytidine, deoxyinosine, thymine, ribonebularine, 2'-O-methylnebularine, or 2'-deoxynebularine

SEQ ID NO: 1870 - RNA, 103 nt, synthetic construct; identical to SEQ ID NO: 1797
  source 1..103: mol_type = other RNA; note = Description of Artificial Sequence: Synthetic polynucleotide
  modified_base 1: mod_base = OTHER; note = 2'-O-Methyl-cytidine phosphorothioate
  modified_base 2: mod_base = OTHER; note = 2'-O-Methyl-adenosine phosphorothioate
  modified_base 3: mod_base = OTHER; note = 2'-O-Methyl-guanosine phosphorothioate
  modified_base 21: mod_base = OTHER; note = 2'-O-Methyl-guanosine
  modified_base 25: mod_base = OTHER; note = uridine phosphorothioate
  modified_base 28: mod_base = OTHER; note = 2'-O-Methyl-adenosine
  modified_base 29: mod_base = OTHER; note = 2'-O-Methyl-guanosine
  modified_base 30: mod_base = OTHER; note = 2'-O-Methyl-cytidine
  modified_base 31: mod_base = OTHER; note = 2'-O-Methyl-uridine
  modified_base 32: mod_base = OTHER; note = 2'-O-Methyl-adenosine
  modified_base 34: mod_base = OTHER; note = 2'-O-Methyl-adenosine
  modified_base 35: mod_base = OTHER; note = 2'-O-Methyl-adenosine
  modified_base 36: mod_base = OTHER; note = 2'-O-Methyl-adenosine
  modified_base 37: mod_base = OTHER; note = 2'-O-Methyl-uridine
  modified_base 38: mod_base = OTHER; note = 2'-O-Methyl-adenosine
  modified_base 39: mod_base = OTHER; note = 2'-O-Methyl-guanosine
  modified_base 40: mod_base = OTHER; note = 2'-O-Methyl-cytidine
  modified_base 41: mod_base = OTHER; note = 2'-O-Methyl-adenosine
  modified_base 42: mod_base = OTHER; note = 2'-O-Methyl-adenosine
  modified_base 45: mod_base = OTHER; note = uridine phosphorothioate
  modified_base 46: mod_base = OTHER; note = 2'-O-Methyl-adenosine
  modified_base 48: mod_base = OTHER; note = 2'-O-Methyl-adenosine
  modified_base 50: mod_base = OTHER; note = 2'-O-Methyl-uridine
  modified_base 52: mod_base = OTHER; note = 2'-O-Methyl-adenosine
  modified_base 53: mod_base = OTHER; note = 2'-O-Methyl-guanosine
  modified_base 54: mod_base = OTHER; note = 2'-O-Methyl-guanosine
  modified_base 55: mod_base = OTHER; note = 2'-O-Methyl-cytidine
  modified_base 56: mod_base = OTHER; note = 2'-O-Methyl-uridine
  modified_base 57: mod_base = OTHER; note = 2'-O-Methyl-adenosine
  modified_base 60: mod_base = OTHER; note = 2'-O-Methyl-cytidine
  modified_base 61: mod_base = OTHER; note = 2'-O-Methyl-cytidine
  modified_base 64: mod_base = OTHER; note = uridine phosphorothioate
  modified_base 66: mod_base = OTHER; note = 2'-O-Methyl-uridine
  modified_base 67: mod_base = OTHER; note = 2'-O-Methyl-cytidine
  modified_base 70: mod_base = OTHER; note = 2'-O-Methyl-cytidine
  modified_base 71: mod_base = OTHER; note = 2'-O-Methyl-uridine
  modified_base 72: mod_base = OTHER; note = 2'-O-Methyl-uridine
  modified_base 74: mod_base = OTHER; note = 2'-O-Methyl-adenosine
  modified_base 75: mod_base = OTHER; note = 2'-O-Methyl-adenosine
  modified_base 76: mod_base = OTHER; note = 2'-O-Methyl-adenosine
  modified_base 77: mod_base = OTHER; note = 2'-O-Methyl-adenosine
  modified_base 78: mod_base = OTHER; note = 2'-O-Methyl-adenosine
  modified_base 79: mod_base = OTHER; note = 2'-O-Methyl-guanosine
  modified_base 80: mod_base = OTHER; note = 2'-O-Methyl-uridine
  modified_base 81: mod_base = OTHER; note = 2'-O-Methyl-guanosine
  modified_base 83: mod_base = OTHER; note = 2'-O-Methyl-cytidine
  modified_base 84: mod_base = OTHER; note = 2'-O-Methyl-adenosine
  modified_base 85: mod_base = OTHER; note = 2'-O-Methyl-cytidine
  modified_base 86: mod_base = OTHER; note = 2'-O-Methyl-cytidine
  modified_base 87: mod_base = OTHER; note = 2'-O-Methyl-guanosine
  modified_base 88: mod_base = OTHER; note = 2'-O-Methyl-adenosine
  modified_base 89: mod_base = OTHER; note = 2'-O-Methyl-guanosine
  modified_base 90: mod_base = OTHER; note = 2'-O-Methyl-uridine
  modified_base 91: mod_base = OTHER; note = 2'-O-Methyl-cytidine
  modified_base 92: mod_base = OTHER; note = 2'-O-Methyl-guanosine
  modified_base 93: mod_base = OTHER; note = 2'-O-Methyl-guanosine
  modified_base 94: mod_base = OTHER; note = 2'-O-Methyl-uridine
  modified_base 95: mod_base = OTHER; note = 2'-O-Methyl-guanosine
  modified_base 96: mod_base = OTHER; note = 2'-O-Methyl-cytidine
  modified_base 97: mod_base = OTHER; note = 2'-O-Methyl-uridine
  modified_base 98: mod_base = OTHER; note = 2'-O-Methyl-uridine phosphorothioate
  modified_base 99: mod_base = OTHER; note = 2'-O-Methyl-uridine phosphorothioate
  modified_base 100: mod_base = OTHER; note = 2'-O-Methyl-uridine
  misc_difference 101: note = modified_base - a, c, u, g, unknown or other - a, c, g, inosine, u, deoxyadenosine, deoxyguanosine, deoxycytidine, deoxyinosine, thymine, ribonebularine, 2'-O-methylnebularine, or 2'-deoxynebularine
  misc_difference 102: note = modified_base - a, c, u, g, unknown or other - a, c, g, inosine, u, deoxyadenosine, deoxyguanosine, deoxycytidine, deoxyinosine, thymine, ribonebularine, 2'-O-methylnebularine, or 2'-deoxynebularine
  misc_difference 103: note = modified_base - a, c, u, g, unknown or other - a, c, g, inosine, u, deoxyadenosine, deoxyguanosine, deoxycytidine, deoxyinosine, thymine, ribonebularine, 2'-O-methylnebularine, or 2'-deoxynebularine

SEQ ID NO: 1871 - RNA, 103 nt, synthetic construct; identical to SEQ ID NO: 1797
  source 1..103: mol_type = other RNA; note = Description of Artificial Sequence: Synthetic polynucleotide
  modified_base 1: mod_base = OTHER; note = 2'-O-Methyl-cytidine phosphorothioate
  modified_base 2: mod_base = OTHER; note = 2'-O-Methyl-adenosine phosphorothioate
  modified_base 3: mod_base = OTHER; note = 2'-O-Methyl-guanosine
  modified_base 21: mod_base = OTHER; note = 2'-O-Methyl-guanosine
  modified_base 28: mod_base = OTHER; note = 2'-O-Methyl-adenosine
  modified_base 29: mod_base = OTHER; note = 2'-O-Methyl-guanosine
  modified_base 30: mod_base = OTHER; note = 2'-O-Methyl-cytidine
  modified_base 31: mod_base = OTHER; note = 2'-O-Methyl-uridine
  modified_base 32: mod_base = OTHER; note = 2'-O-Methyl-adenosine
  modified_base 34: mod_base = OTHER; note = 2'-O-Methyl-adenosine
  modified_base 35: mod_base = OTHER; note = 2'-O-Methyl-adenosine
  modified_base 36: mod_base = OTHER; note = 2'-O-Methyl-adenosine
  modified_base 37: mod_base = OTHER; note = 2'-O-Methyl-uridine
  modified_base 38: mod_base = OTHER; note = 2'-O-Methyl-adenosine
  modified_base 39: mod_base = OTHER; note = 2'-O-Methyl-guanosine
  modified_base 40: mod_base = OTHER; note = 2'-O-Methyl-cytidine
  modified_base 41: mod_base = OTHER; note = 2'-O-Methyl-adenosine
  modified_base 42: mod_base = OTHER; note = 2'-O-Methyl-adenosine
  modified_base 46: mod_base = OTHER; note = 2'-O-Methyl-adenosine
  modified_base 48: mod_base = OTHER; note = 2'-O-Methyl-adenosine
  modified_base 50: mod_base = OTHER; note = 2'-O-Methyl-uridine
  modified_base 52: mod_base = OTHER; note = 2'-O-Methyl-adenosine
  modified_base 53: mod_base = OTHER; note = 2'-O-Methyl-guanosine
  modified_base 54: mod_base = OTHER; note = 2'-O-Methyl-guanosine
  modified_base 57: mod_base = OTHER; note = 2'-O-Methyl-adenosine
  modified_base 61: mod_base = OTHER; note = 2'-O-Methyl-cytidine
  modified_base 66: mod_base = OTHER; note = 2'-O-Methyl-uridine
  modified_base 67: mod_base = OTHER; note = 2'-O-Methyl-cytidine
  modified_base 70: mod_base = OTHER; note = 2'-O-Methyl-cytidine
  modified_base 71: mod_base = OTHER; note = 2'-O-Methyl-uridine
  modified_base 72: mod_base = OTHER; note = 2'-O-Methyl-uridine
  modified_base 74: mod_base = OTHER; note = 2'-O-Methyl-adenosine
  modified_base 75: mod_base = OTHER; note = 2'-O-Methyl-adenosine
  modified_base 76: mod_base = OTHER; note = 2'-O-Methyl-adenosine
  modified_base 77: mod_base = OTHER; note = 2'-O-Methyl-adenosine
  modified_base 78: mod_base = OTHER; note = 2'-O-Methyl-adenosine
  modified_base 79: mod_base = OTHER; note = 2'-O-Methyl-guanosine
  modified_base 80: mod_base = OTHER; note = 2'-O-Methyl-uridine
  modified_base 82: mod_base = OTHER; note = 2'-O-Methyl-guanosine
  modified_base 83: mod_base = OTHER; note = 2'-O-Methyl-cytidine
  modified_base 84: mod_base = OTHER; note = 2'-O-Methyl-adenosine
  modified_base 85: mod_base = OTHER; note = 2'-O-Methyl-cytidine
  modified_base 86: mod_base = OTHER; note = 2'-O-Methyl-cytidine
  modified_base 87: mod_base = OTHER; note = 2'-O-Methyl-guanosine
  modified_base 89: mod_base = OTHER; note = 2'-O-Methyl-guanosine
  modified_base 92: mod_base = OTHER; note = 2'-O-Methyl-guanosine
  modified_base 93: mod_base = OTHER; note = 2'-O-Methyl-guanosine
  modified_base 94: mod_base = OTHER; note = 2'-O-Methyl-uridine
  modified_base 95: mod_base = OTHER; note = 2'-O-Methyl-guanosine
  modified_base 96: mod_base = OTHER; note = 2'-O-Methyl-cytidine
  modified_base 97: mod_base = OTHER; note = 2'-O-Methyl-uridine
  modified_base 98: mod_base = OTHER; note = 2'-O-Methyl-uridine phosphorothioate
  modified_base 99: mod_base = OTHER; note = 2'-O-Methyl-uridine phosphorothioate
  modified_base 100: mod_base = OTHER; note = 2'-O-Methyl-uridine
  misc_difference 101: note = modified_base - a, c, u, g, unknown or other - a, c, g, inosine, u, deoxyadenosine, deoxyguanosine, deoxycytidine, deoxyinosine, thymine, ribonebularine, 2'-O-methylnebularine, or 2'-deoxynebularine
  misc_difference 102: note = modified_base - a, c, u, g, unknown or other - a, c, g, inosine, u, deoxyadenosine, deoxyguanosine, deoxycytidine, deoxyinosine, thymine, ribonebularine, 2'-O-methylnebularine, or 2'-deoxynebularine
  misc_difference 103: note = modified_base - a, c, u, g, unknown or other - a, c, g, inosine, u, deoxyadenosine, deoxyguanosine, deoxycytidine, deoxyinosine, thymine, ribonebularine, 2'-O-methylnebularine, or 2'-deoxynebularine

SEQ ID NO: 1872 - RNA, 103 nt, synthetic construct; identical to SEQ ID NO: 1797
  source 1..103: mol_type = other RNA; note = Description of Artificial Sequence: Synthetic polynucleotide
  modified_base 1: mod_base = OTHER; note = 2'-O-Methyl-cytidine phosphorothioate
  modified_base 2: mod_base = OTHER; note = 2'-O-Methyl-adenosine phosphorothioate
  modified_base 3: mod_base = OTHER; note = 2'-O-Methyl-guanosine
  modified_base 21: mod_base = OTHER; note = 2'-O-Methyl-guanosine
  modified_base 28: mod_base = OTHER; note = 2'-O-Methyl-adenosine
  modified_base 29: mod_base = OTHER; note = 2'-O-Methyl-guanosine
  modified_base 30: mod_base = OTHER; note = 2'-O-Methyl-cytidine
  modified_base 31: mod_base = OTHER; note = 2'-O-Methyl-uridine
  modified_base 32: mod_base = OTHER; note = 2'-O-Methyl-adenosine
  modified_base 33: mod_base = OTHER; note = 2'-O-Methyl-guanosine
  modified_base 34: mod_base = OTHER; note = 2'-O-Methyl-adenosine
  modified_base 35: mod_base = OTHER; note = 2'-O-Methyl-adenosine
  modified_base 36: mod_base = OTHER; note = 2'-O-Methyl-adenosine
  modified_base 37: mod_base = OTHER; note = 2'-O-Methyl-uridine
  modified_base 38: mod_base = OTHER; note = 2'-O-Methyl-adenosine
  modified_base 39: mod_base = OTHER; note = 2'-O-Methyl-guanosine
  modified_base 40: mod_base = OTHER; note = 2'-O-Methyl-cytidine
  modified_base 41: mod_base = OTHER; note = 2'-O-Methyl-adenosine
  modified_base 42: mod_base = OTHER; note = 2'-O-Methyl-adenosine
  modified_base 46: mod_base = OTHER; note = 2'-O-Methyl-adenosine
  modified_base 48: mod_base = OTHER; note = 2'-O-Methyl-adenosine
  modified_base 50: mod_base = OTHER; note = 2'-O-Methyl-uridine
  modified_base 52: mod_base = OTHER; note = 2'-O-Methyl-adenosine
  modified_base 53: mod_base = OTHER; note = 2'-O-Methyl-guanosine
  modified_base 54: mod_base = OTHER; note = 2'-O-Methyl-guanosine
  modified_base 55: mod_base = OTHER; note = 2'-O-Methyl-cytidine
  modified_base 56: mod_base = OTHER; note = 2'-O-Methyl-uridine
  modified_base 57: mod_base = OTHER; note = 2'-O-Methyl-adenosine
  modified_base 60: mod_base = OTHER; note = 2'-O-Methyl-cytidine
  modified_base 61: mod_base = OTHER; note = 2'-O-Methyl-cytidine
  modified_base 66: mod_base = OTHER; note = 2'-O-Methyl-uridine
  modified_base 67: mod_base = OTHER; note = 2'-O-Methyl-cytidine
  modified_base 70: mod_base = OTHER; note = 2'-O-Methyl-cytidine
  modified_base 71: mod_base = OTHER; note = 2'-O-Methyl-uridine
  modified_base 72: mod_base = OTHER; note = 2'-O-Methyl-uridine
  modified_base 73: mod_base = OTHER; note = 2'-O-Methyl-guanosine
  modified_base 74: mod_base = OTHER; note = 2'-O-Methyl-adenosine
  modified_base 75: mod_base = OTHER; note = 2'-O-Methyl-adenosine
  modified_base 76: mod_base = OTHER; note = 2'-O-Methyl-adenosine
  modified_base 77: mod_base = OTHER; note = 2'-O-Methyl-adenosine
  modified_base 78: mod_base = OTHER; note = 2'-O-Methyl-adenosine
  modified_base 79: mod_base = OTHER; note = 2'-O-Methyl-guanosine
  modified_base 80: mod_base = OTHER; note = 2'-O-Methyl-uridine
  modified_base 81: mod_base = OTHER; note = 2'-O-Methyl-guanosine
  modified_base 83: mod_base = OTHER; note = 2'-O-Methyl-cytidine
  modified_base 84: mod_base = OTHER; note = 2'-O-Methyl-adenosine
  modified_base 85: mod_base = OTHER; note = 2'-O-Methyl-cytidine
  modified_base 86: mod_base = OTHER; note = 2'-O-Methyl-cytidine
  modified_base 87: mod_base = OTHER; note = 2'-O-Methyl-guanosine
  modified_base 88: mod_base = OTHER; note = 2'-O-Methyl-adenosine
  modified_base 89: mod_base = OTHER; note = 2'-O-Methyl-guanosine
  modified_base 90: mod_base = OTHER; note = 2'-O-Methyl-uridine
  modified_base 91: mod_base = OTHER; note = 2'-O-Methyl-cytidine
  modified_base 92: mod_base = OTHER; note = 2'-O-Methyl-guanosine
  modified_base 93: mod_base = OTHER; note = 2'-O-Methyl-guanosine
  modified_base 94: mod_base = OTHER; note = 2'-O-Methyl-uridine
  modified_base 95: mod_base = OTHER; note = 2'-O-Methyl-guanosine
  modified_base 96: mod_base = OTHER; note = 2'-O-Methyl-cytidine
  modified_base 97: mod_base = OTHER; note = 2'-O-Methyl-uridine
  modified_base 98: mod_base = OTHER; note = 2'-O-Methyl-uridine phosphorothioate
  modified_base 99: mod_base = OTHER; note = 2'-O-Methyl-uridine phosphorothioate
  modified_base 100: mod_base = OTHER; note = 2'-O-Methyl-uridine
  misc_difference 101: note = modified_base - a, c, u, g, unknown or other - a, c, g, inosine, u, deoxyadenosine, deoxyguanosine, deoxycytidine, deoxyinosine, thymine, ribonebularine, 2'-O-methylnebularine, or 2'-deoxynebularine
  misc_difference 102: note = modified_base - a, c, u, g, unknown or other - a, c, g, inosine, u, deoxyadenosine, deoxyguanosine, deoxycytidine, deoxyinosine, thymine, ribonebularine, 2'-O-methylnebularine, or 2'-deoxynebularine
  misc_difference 103: note = modified_base - a, c, u, g, unknown or other - a, c, g, inosine, u, deoxyadenosine, deoxyguanosine, deoxycytidine, deoxyinosine, thymine, ribonebularine, 2'-O-methylnebularine, or 2'-deoxynebularine

SEQ ID NO: 1873 - RNA, 103 nt, synthetic construct; identical to SEQ ID NO: 1795
  source 1..103: mol_type = other RNA; note = Description of Artificial Sequence: Synthetic polynucleotide
  modified_base 1: mod_base = OTHER; note = 2'-O-Methyl-cytidine phosphorothioate
  modified_base 2: mod_base = OTHER; note = 2'-O-Methyl-cytidine phosphorothioate
  modified_base 3: mod_base = OTHER; note = 2'-O-Methyl-cytidine
  modified_base 21: mod_base = OTHER; note = 2'-O-Methyl-guanosine
  modified_base 28: mod_base = OTHER; note = 2'-O-Methyl-adenosine
  modified_base 29: mod_base = OTHER; note = 2'-O-Methyl-guanosine
  modified_base 30: mod_base = OTHER; note = 2'-O-Methyl-cytidine
  modified_base 31: mod_base = OTHER; note = 2'-O-Methyl-uridine
  modified_base 32: mod_base = OTHER; note = 2'-O-Methyl-adenosine
  modified_base 34: mod_base = OTHER; note = 2'-O-Methyl-adenosine
  modified_base 35: mod_base = OTHER; note = 2'-O-Methyl-adenosine
  modified_base 36: mod_base = OTHER; note = 2'-O-Methyl-adenosine
  modified_base 37: mod_base = OTHER; note = 2'-O-Methyl-uridine
  modified_base 38: mod_base = OTHER; note = 2'-O-Methyl-adenosine
  modified_base 39: mod_base = OTHER; note = 2'-O-Methyl-guanosine
  modified_base 40: mod_base = OTHER; note = 2'-O-Methyl-cytidine
  modified_base 41: mod_base = OTHER; note = 2'-O-Methyl-adenosine
  modified_base 42: mod_base = OTHER; note = 2'-O-Methyl-adenosine
  modified_base 46: mod_base = OTHER; note = 2'-O-Methyl-adenosine
  modified_base 48: mod_base = OTHER; note = 2'-O-Methyl-adenosine
  modified_base 50: mod_base = OTHER; note = 2'-O-Methyl-uridine
  modified_base 52: mod_base = OTHER; note = 2'-O-Methyl-adenosine
  modified_base 53: mod_base = OTHER; note = 2'-O-Methyl-guanosine
  modified_base 54: mod_base = OTHER; note = 2'-O-Methyl-guanosine
  modified_base 57: mod_base = OTHER; note = 2'-O-Methyl-adenosine
  modified_base 61: mod_base = OTHER; note = 2'-O-Methyl-cytidine
  modified_base 66: mod_base = OTHER; note = 2'-O-Methyl-uridine
  modified_base 67: mod_base = OTHER; note = 2'-O-Methyl-cytidine
  modified_base 70: mod_base = OTHER; note = 2'-O-Methyl-cytidine
  modified_base 71: mod_base = OTHER; note = 2'-O-Methyl-uridine
  modified_base 72: mod_base = OTHER; note = 2'-O-Methyl-uridine
  modified_base 74: mod_base = OTHER; note = 2'-O-Methyl-adenosine
  modified_base 75: mod_base = OTHER; note = 2'-O-Methyl-adenosine
  modified_base 76: mod_base = OTHER; note = 2'-O-Methyl-adenosine
  modified_base 77: mod_base = OTHER; note = 2'-O-Methyl-adenosine
  modified_base 78: mod_base = OTHER; note = 2'-O-Methyl-adenosine
  modified_base 79: mod_base = OTHER; note = 2'-O-Methyl-guanosine
  modified_base 80: mod_base = OTHER; note = 2'-O-Methyl-uridine
  modified_base 82: mod_base = OTHER; note = 2'-O-Methyl-guanosine
  modified_base 83: mod_base = OTHER; note = 2'-O-Methyl-cytidine
  modified_base 84: mod_base = OTHER; note = 2'-O-Methyl-adenosine
  modified_base 85: mod_base = OTHER; note = 2'-O-Methyl-cytidine
  modified_base 86: mod_base = OTHER; note = 2'-O-Methyl-cytidine
  modified_base 87: mod_base = OTHER; note = 2'-O-Methyl-guanosine
  modified_base 89: mod_base = OTHER; note = 2'-O-Methyl-guanosine
  modified_base 92: mod_base = OTHER; note = 2'-O-Methyl-guanosine
  modified_base 93: mod_base = OTHER; note = 2'-O-Methyl-guanosine
  modified_base 94: mod_base = OTHER; note = 2'-O-Methyl-uridine
  modified_base 95: mod_base = OTHER; note = 2'-O-Methyl-guanosine
  modified_base 96: mod_base = OTHER; note = 2'-O-Methyl-cytidine
  modified_base 97: mod_base = OTHER; note = 2'-O-Methyl-uridine
  modified_base 98: mod_base = OTHER; note = 2'-O-Methyl-uridine phosphorothioate
  modified_base 99: mod_base = OTHER; note = 2'-O-Methyl-uridine phosphorothioate
  modified_base 100: mod_base = OTHER; note = 2'-O-Methyl-uridine
  misc_difference 101: note = modified_base - a, c, u, g, unknown or other - a, c, g, inosine, u, deoxyadenosine, deoxyguanosine, deoxycytidine, deoxyinosine, thymine, ribonebularine, 2'-O-methylnebularine, or 2'-deoxynebularine
  misc_difference 102: note = modified_base - a, c, u, g, unknown or other - a, c, g, inosine, u, deoxyadenosine, deoxyguanosine, deoxycytidine, deoxyinosine, thymine, ribonebularine, 2'-O-methylnebularine, or 2'-deoxynebularine
  misc_difference 103: note = modified_base - a, c, u, g, unknown or other - a, c, g, inosine, u, deoxyadenosine, deoxyguanosine, deoxycytidine, deoxyinosine, thymine, ribonebularine, 2'-O-methylnebularine, or 2'-deoxynebularine

SEQ ID NO: 1874 - RNA, 103 nt, synthetic construct; identical to SEQ ID NO: 1796
  source 1..103: mol_type = other RNA; note = Description of Artificial Sequence: Synthetic polynucleotide
  modified_base 1: mod_base = OTHER; note = 2'-O-Methyl-guanosine phosphorothioate
  modified_base 2: mod_base = OTHER; note = 2'-O-Methyl-adenosine phosphorothioate
  modified_base 3: mod_base = OTHER; note = 2'-O-Methyl-guanosine
  modified_base 21: mod_base = OTHER; note = 2'-O-Methyl-guanosine
  modified_base 28: mod_base = OTHER; note = 2'-O-Methyl-adenosine
  modified_base 29: mod_base = OTHER; note = 2'-O-Methyl-guanosine
  modified_base 30: mod_base = OTHER; note = 2'-O-Methyl-cytidine
  modified_base 31: mod_base = OTHER; note = 2'-O-Methyl-uridine
  modified_base 32: mod_base = OTHER; note = 2'-O-Methyl-adenosine
  modified_base 34: mod_base = OTHER; note = 2'-O-Methyl-adenosine
  modified_base 35: mod_base = OTHER; note = 2'-O-Methyl-adenosine
  modified_base 36: mod_base = OTHER; note = 2'-O-Methyl-adenosine
  modified_base 37: mod_base = OTHER; note = 2'-O-Methyl-uridine
  modified_base 38: mod_base = OTHER; note = 2'-O-Methyl-adenosine
  modified_base 39: mod_base = OTHER; note = 2'-O-Methyl-guanosine
  modified_base 40: mod_base = OTHER; note = 2'-O-Methyl-cytidine
  modified_base 41: mod_base = OTHER; note = 2'-O-Methyl-adenosine
  modified_base 42: mod_base = OTHER; note = 2'-O-Methyl-adenosine
  modified_base 46: mod_base = OTHER; note = 2'-O-Methyl-adenosine
  modified_base 48: mod_base = OTHER; note = 2'-O-Methyl-adenosine
  modified_base 50: mod_base = OTHER; note = 2'-O-Methyl-uridine
  modified_base 52: mod_base = OTHER; note = 2'-O-Methyl-adenosine
  modified_base 53: mod_base = OTHER; note = 2'-O-Methyl-guanosine
  modified_base 54: mod_base = OTHER; note = 2'-O-Methyl-guanosine
  modified_base 57: mod_base = OTHER; note = 2'-O-Methyl-adenosine
  modified_base 61: mod_base = OTHER; note = 2'-O-Methyl-cytidine
  modified_base 66: mod_base = OTHER; note = 2'-O-Methyl-uridine
  modified_base 67: mod_base = OTHER; note = 2'-O-Methyl-cytidine
  modified_base 70: mod_base = OTHER; note = 2'-O-Methyl-cytidine
  modified_base 71: mod_base = OTHER; note = 2'-O-Methyl-uridine
  modified_base 72: mod_base = OTHER; note = 2'-O-Methyl-uridine
  modified_base 74: mod_base = OTHER; note = 2'-O-Methyl-adenosine
  modified_base 75: mod_base = OTHER; note = 2'-O-Methyl-adenosine
  modified_base 76: mod_base = OTHER; note = 2'-O-Methyl-adenosine
  modified_base 77: mod_base = OTHER; note = 2'-O-Methyl-adenosine
  modified_base 78: mod_base = OTHER; note = 2'-O-Methyl-adenosine
  modified_base 79: mod_base = OTHER; note = 2'-O-Methyl-guanosine
  modified_base 80: mod_base = OTHER; note = 2'-O-Methyl-uridine
  modified_base 82: mod_base = OTHER; note = 2'-O-Methyl-guanosine
  modified_base 83: mod_base = OTHER; note = 2'-O-Methyl-cytidine
  modified_base 84: mod_base = OTHER; note = 2'-O-Methyl-adenosine
  modified_base 85: mod_base = OTHER; note = 2'-O-Methyl-cytidine
  modified_base 86: mod_base = OTHER; note = 2'-O-Methyl-cytidine
  modified_base 87: mod_base = OTHER; note = 2'-O-Methyl-guanosine
  modified_base 89: mod_base = OTHER; note = 2'-O-Methyl-guanosine
  modified_base 92: mod_base = OTHER; note = 2'-O-Methyl-guanosine
  modified_base 93: mod_base = OTHER; note = 2'-O-Methyl-guanosine
  modified_base 94: mod_base = OTHER; note = 2'-O-Methyl-uridine
  modified_base 95: mod_base = OTHER; note = 2'-O-Methyl-guanosine
  modified_base 96: mod_base = OTHER; note = 2'-O-Methyl-cytidine
  modified_base 97: mod_base = OTHER; note = 2'-O-Methyl-uridine
  modified_base 98: mod_base = OTHER; note = 2'-O-Methyl-uridine phosphorothioate
  modified_base 99: mod_base = OTHER; note = 2'-O-Methyl-uridine phosphorothioate
  modified_base 100: mod_base = OTHER; note = 2'-O-Methyl-uridine
  misc_difference 101: note = modified_base - a, c, u, g, unknown or other - a, c, g, inosine, u, deoxyadenosine, deoxyguanosine, deoxycytidine, deoxyinosine, thymine, ribonebularine, 2'-O-methylnebularine, or 2'-deoxynebularine
  misc_difference 102: note = modified_base - a, c, u, g, unknown or other - a, c, g, inosine, u, deoxyadenosine, deoxyguanosine, deoxycytidine, deoxyinosine, thymine, ribonebularine, 2'-O-methylnebularine, or 2'-deoxynebularine
  misc_difference 103: note = modified_base - a, c, u, g, unknown or other - a, c, g, inosine, u, deoxyadenosine, deoxyguanosine, deoxycytidine, deoxyinosine, thymine, ribonebularine, 2'-O-methylnebularine, or 2'-deoxynebularine

SEQ ID NO: 1875 - RNA, 103 nt, synthetic construct; identical to SEQ ID NO: 1795
  source 1..103: mol_type = other RNA; note = Description of Artificial Sequence: Synthetic polynucleotide
  modified_base 1: mod_base = OTHER; note = 2'-O-Methyl-cytidine phosphorothioate
  modified_base 2: mod_base = OTHER; note = 2'-O-Methyl-cytidine phosphorothioate
  modified_base 3: mod_base = OTHER; note = 2'-O-Methyl-cytidine
  modified_base 21: mod_base = OTHER; note = 2'-O-Methyl-guanosine
  modified_base 28: mod_base = OTHER; note = 2'-O-Methyl-adenosine
  modified_base 29: mod_base = OTHER; note = 2'-O-Methyl-guanosine
  modified_base 30: mod_base = OTHER; note = 2'-O-Methyl-cytidine
  modified_base 31: mod_base = OTHER; note = 2'-O-Methyl-uridine
  modified_base 32: mod_base = OTHER; note = 2'-O-Methyl-adenosine
  modified_base 34: mod_base = OTHER; note = 2'-O-Methyl-adenosine
  modified_base 35: mod_base = OTHER; note = 2'-O-Methyl-adenosine
  modified_base 36: mod_base = OTHER; note = 2'-O-Methyl-adenosine
  modified_base 37: mod_base = OTHER; note = 2'-O-Methyl-uridine
  modified_base 38: mod_base = OTHER; note = 2'-O-Methyl-adenosine
  modified_base 39: mod_base = OTHER; note = 2'-O-Methyl-guanosine
  modified_base 40: mod_base = OTHER; note = 2'-O-Methyl-cytidine
  modified_base 41: mod_base = OTHER; note = 2'-O-Methyl-adenosine
  modified_base 42: mod_base = OTHER; note = 2'-O-Methyl-adenosine
  modified_base 46: mod_base = OTHER; note = 2'-O-Methyl-adenosine
  modified_base 48: mod_base = OTHER; note = 2'-O-Methyl-adenosine
  modified_base 50: mod_base = OTHER; note = 2'-O-Methyl-uridine
  modified_base 52: mod_base = OTHER; note = 2'-O-Methyl-adenosine
  modified_base 53: mod_base = OTHER; note = 2'-O-Methyl-guanosine
  modified_base 54: mod_base = OTHER; note = 2'-O-Methyl-guanosine
  modified_base 57: mod_base = OTHER; note = 2'-O-Methyl-adenosine
  modified_base 61: mod_base = OTHER; note = 2'-O-Methyl-cytidine
  modified_base 64: mod_base = OTHER; note = uridine phosphorothioate
  modified_base 66: mod_base = OTHER; note = 2'-O-Methyl-uridine
  modified_base 67: mod_base = OTHER; note = 2'-O-Methyl-cytidine
  modified_base 70: mod_base = OTHER; note = 2'-O-Methyl-cytidine
  modified_base 71: mod_base = OTHER; note = 2'-O-Methyl-uridine
  modified_base 72: mod_base = OTHER; note = 2'-O-Methyl-uridine
  modified_base 74: mod_base = OTHER; note = 2'-O-Methyl-adenosine
  modified_base 75: mod_base = OTHER; note = 2'-O-Methyl-adenosine
  modified_base 76: mod_base = OTHER; note = 2'-O-Methyl-adenosine
  modified_base 77: mod_base = OTHER; note = 2'-O-Methyl-adenosine
  modified_base 78: mod_base = OTHER; note = 2'-O-Methyl-adenosine
  modified_base 79: mod_base = OTHER; note = 2'-O-Methyl-guanosine
  modified_base 80: mod_base = OTHER; note = 2'-O-Methyl-uridine
  modified_base 82: mod_base = OTHER; note = 2'-O-Methyl-guanosine
  modified_base 83: mod_base = OTHER; note = 2'-O-Methyl-cytidine
  modified_base 84: mod_base = OTHER; note = 2'-O-Methyl-adenosine
  modified_base 85: mod_base = OTHER; note = 2'-O-Methyl-cytidine
  modified_base 86: mod_base = OTHER; note = 2'-O-Methyl-cytidine
  modified_base 87: mod_base = OTHER; note = 2'-O-Methyl-guanosine
  modified_base 89: mod_base = OTHER; note = 2'-O-Methyl-guanosine
  modified_base 92: mod_base = OTHER; note = 2'-O-Methyl-guanosine
  modified_base 93: mod_base = OTHER; note = 2'-O-Methyl-guanosine
  modified_base 94: mod_base = OTHER; note = 2'-O-Methyl-uridine
  modified_base 95: mod_base = OTHER; note = 2'-O-Methyl-guanosine
  modified_base 96: mod_base = OTHER; note = 2'-O-Methyl-cytidine
  modified_base 97: mod_base = OTHER; note = 2'-O-Methyl-uridine
  modified_base 98: mod_base = OTHER; note = 2'-O-Methyl-uridine phosphorothioate
  modified_base 99: mod_base = OTHER; note = 2'-O-Methyl-uridine phosphorothioate
  modified_base 100: mod_base = OTHER; note = 2'-O-Methyl-uridine
  misc_difference 101: note = modified_base - a, c, u, g, unknown or other - a, c, g, inosine, u, deoxyadenosine, deoxyguanosine, deoxycytidine, deoxyinosine, thymine, ribonebularine, 2'-O-methylnebularine, or 2'-deoxynebularine
  misc_difference 102: note = modified_base - a, c, u, g, unknown or other - a, c, g, inosine, u, deoxyadenosine, deoxyguanosine, deoxycytidine, deoxyinosine, thymine, ribonebularine, 2'-O-methylnebularine, or 2'-deoxynebularine
  misc_difference 103: note = modified_base - a, c, u, g, unknown or other - a, c, g, inosine, u, deoxyadenosine, deoxyguanosine, deoxycytidine, deoxyinosine, thymine, ribonebularine, 2'-O-methylnebularine, or 2'-deoxynebularine

SEQ ID NO: 1876 - RNA, 103 nt, synthetic construct; identical to SEQ ID NO: 1796
  source 1..103: mol_type = other RNA; note = Description of Artificial Sequence: Synthetic polynucleotide
  modified_base 1: mod_base = OTHER; note = 2'-O-Methyl-guanosine phosphorothioate
  modified_base 2: mod_base = OTHER; note = 2'-O-Methyl-adenosine phosphorothioate
  modified_base 3: mod_base = OTHER; note = 2'-O-Methyl-guanosine
  modified_base 21: mod_base = OTHER; note = 2'-O-Methyl-guanosine
  modified_base 28: mod_base = OTHER; note = 2'-O-Methyl-adenosine
  modified_base 29: mod_base = OTHER; note = 2'-O-Methyl-guanosine
  modified_base 30: mod_base = OTHER; note = 2'-O-Methyl-cytidine
  modified_base 31: mod_base = OTHER; note = 2'-O-Methyl-uridine
  modified_base 32: mod_base = OTHER; note = 2'-O-Methyl-adenosine
  modified_base 34: mod_base = OTHER; note = 2'-O-Methyl-adenosine
  modified_base 35: mod_base = OTHER; note = 2'-O-Methyl-adenosine
  modified_base 36: mod_base = OTHER; note = 2'-O-Methyl-adenosine
  modified_base 37: mod_base = OTHER; note = 2'-O-Methyl-uridine
  modified_base 38: mod_base = OTHER; note = 2'-O-Methyl-adenosine
  modified_base 39: mod_base = OTHER; note = 2'-O-Methyl-guanosine
  modified_base 40: mod_base = OTHER; note = 2'-O-Methyl-cytidine
  modified_base 41: mod_base = OTHER; note = 2'-O-Methyl-adenosine
  modified_base 42: mod_base = OTHER; note = 2'-O-Methyl-adenosine
  modified_base 46: mod_base = OTHER; note = 2'-O-Methyl-adenosine
  modified_base 48: mod_base = OTHER; note = 2'-O-Methyl-adenosine
  modified_base 50: mod_base = OTHER; note = 2'-O-Methyl-uridine
  modified_base 52: mod_base = OTHER; note = 2'-O-Methyl-adenosine
  modified_base 53: mod_base = OTHER; note = 2'-O-Methyl-guanosine
  modified_base 54: mod_base = OTHER; note = 2'-O-Methyl-guanosine
  modified_base 57: mod_base = OTHER; note = 2'-O-Methyl-adenosine
  modified_base 61: mod_base = OTHER; note = 2'-O-Methyl-cytidine
  modified_base 64: mod_base = OTHER; note = uridine phosphorothioate
  modified_base 66: mod_base = OTHER; note = 2'-O-Methyl-uridine
  modified_base 67: mod_base = OTHER; note = 2'-O-Methyl-cytidine
  modified_base 70: mod_base = OTHER; note = 2'-O-Methyl-cytidine
  modified_base 71: mod_base = OTHER; note = 2'-O-Methyl-uridine
  modified_base 72: mod_base = OTHER; note = 2'-O-Methyl-uridine
  modified_base 74: mod_base = OTHER; note = 2'-O-Methyl-adenosine
  modified_base 75: mod_base = OTHER; note = 2'-O-Methyl-adenosine
  modified_base 76: mod_base = OTHER; note = 2'-O-Methyl-adenosine
  modified_base 77: mod_base = OTHER; note = 2'-O-Methyl-adenosine
  modified_base 78: mod_base = OTHER; note = 2'-O-Methyl-adenosine
  modified_base 79: mod_base = OTHER; note = 2'-O-Methyl-guanosine
  modified_base 80: mod_base = OTHER; note = 2'-O-Methyl-uridine
  modified_base 82: mod_base = OTHER; note = 2'-O-Methyl-guanosine
  modified_base 83: mod_base = OTHER; note = 2'-O-Methyl-cytidine
  modified_base 84: mod_base = OTHER; note = 2'-O-Methyl-adenosine
  modified_base 85: mod_base = OTHER; note = 2'-O-Methyl-cytidine
  modified_base 86: mod_base = OTHER; note = 2'-O-Methyl-cytidine
  modified_base 87: mod_base = OTHER; note = 2'-O-Methyl-guanosine
  modified_base 89: mod_base = OTHER; note = 2'-O-Methyl-guanosine
  modified_base 92: mod_base = OTHER; note = 2'-O-Methyl-guanosine
  modified_base 93: mod_base = OTHER; note = 2'-O-Methyl-guanosine
  modified_base 94: mod_base = OTHER; note = 2'-O-Methyl-uridine
  modified_base 95: mod_base = OTHER; note = 2'-O-Methyl-guanosine
  modified_base 96: mod_base = OTHER; note = 2'-O-Methyl-cytidine
  modified_base 97: mod_base = OTHER; note = 2'-O-Methyl-uridine
  modified_base 98: mod_base = OTHER; note = 2'-O-Methyl-uridine phosphorothioate
  modified_base 99: mod_base = OTHER; note = 2'-O-Methyl-uridine phosphorothioate
  modified_base 100: mod_base = OTHER; note = 2'-O-Methyl-uridine
  misc_difference 101: note = modified_base - a, c, u, g, unknown or other - a, c, g, inosine, u, deoxyadenosine, deoxyguanosine, deoxycytidine, deoxyinosine, thymine, ribonebularine, 2'-O-methylnebularine, or 2'-deoxynebularine
  misc_difference 102: note = modified_base - a, c, u, g, unknown or other - a, c, g, inosine, u, deoxyadenosine, deoxyguanosine, deoxycytidine, deoxyinosine, thymine, ribonebularine, 2'-O-methylnebularine, or 2'-deoxynebularine
  misc_difference 103: note = modified_base - a, c, u, g, unknown or other - a, c, g, inosine, u, deoxyadenosine, deoxyguanosine, deoxycytidine, deoxyinosine, thymine, ribonebularine, 2'-O-methylnebularine, or 2'-deoxynebularine

SEQ ID NO: 1877 - RNA, 103 nt, synthetic construct; identical to SEQ ID NO: 1797
  source 1..103: mol_type = other RNA; note = Description of Artificial Sequence: Synthetic polynucleotide
  modified_base 1: mod_base = OTHER; note = 2'-O-Methyl-cytidine phosphorothioate
  modified_base 2: mod_base = OTHER; note = 2'-O-Methyl-adenosine phosphorothioate
  modified_base 3: mod_base = OTHER; note = 2'-O-Methyl-guanosine
  modified_base 21: mod_base = OTHER; note = 2'-O-Methyl-guanosine
  modified_base 28: mod_base = OTHER; note = 2'-O-Methyl-adenosine
  modified_base 29: mod_base = OTHER; note = 2'-O-Methyl-guanosine
  modified_base 30: mod_base = OTHER; note = 2'-O-Methyl-cytidine
  modified_base 31: mod_base = OTHER; note = 2'-O-Methyl-uridine
  modified_base 32: mod_base = OTHER; note = 2'-O-Methyl-adenosine
  modified_base 34: mod_base = OTHER; note = 2'-O-Methyl-adenosine
  modified_base 35: mod_base = OTHER; note = 2'-O-Methyl-adenosine
  modified_base 36: mod_base = OTHER; note = 2'-O-Methyl-adenosine
  modified_base 37: mod_base = OTHER; note = 2'-O-Methyl-uridine
  modified_base 38: mod_base = OTHER; note = 2'-O-Methyl-adenosine
  modified_base 39: mod_base = OTHER; note = 2'-O-Methyl-guanosine
  modified_base 40: mod_base = OTHER; note = 2'-O-Methyl-cytidine
  modified_base 41: mod_base = OTHER; note = 2'-O-Methyl-adenosine
  modified_base 42: mod_base = OTHER; note = 2'-O-Methyl-adenosine
  modified_base 46: mod_base = OTHER; note = 2'-O-Methyl-adenosine
  modified_base 48: mod_base = OTHER; note = 2'-O-Methyl-adenosine
  modified_base 50: mod_base = OTHER; note = 2'-O-Methyl-uridine
  modified_base 52: mod_base = OTHER; note = 2'-O-Methyl-adenosine
  modified_base 53: mod_base = OTHER; note = 2'-O-Methyl-guanosine
  modified_base 54: mod_base = OTHER; note = 2'-O-Methyl-guanosine
  modified_base 55: mod_base = OTHER; note = 2'-O-Methyl-cytidine
  modified_base 56: mod_base = OTHER; note = 2'-O-Methyl-uridine
  modified_base 57: mod_base = OTHER; note = 2'-O-Methyl-adenosine
  modified_base 60: mod_base = OTHER; note = 2'-O-Methyl-cytidine
  modified_base 61: mod_base = OTHER; note = 2'-O-Methyl-cytidine
  modified_base 64: mod_base = OTHER; note = uridine phosphorothioate
  modified_base 66: mod_base = OTHER; note = 2'-O-Methyl-uridine
  modified_base 67: mod_base = OTHER; note = 2'-O-Methyl-cytidine
  modified_base 70: mod_base = OTHER; note = 2'-O-Methyl-cytidine
  modified_base 71: mod_base = OTHER; note = 2'-O-Methyl-uridine
  modified_base 72: mod_base = OTHER; note = 2'-O-Methyl-uridine
  modified_base 74: mod_base = OTHER; note = 2'-O-Methyl-adenosine
  modified_base 75: mod_base = OTHER; note = 2'-O-Methyl-adenosine
  modified_base 76: mod_base = OTHER; note = 2'-O-Methyl-adenosine
  modified_base 77: mod_base = OTHER; note = 2'-O-Methyl-adenosine
  modified_base 78: mod_base = OTHER; note = 2'-O-Methyl-adenosine
  modified_base 79: mod_base = OTHER; note = 2'-O-Methyl-guanosine
  modified_base 80: mod_base = OTHER; note = 2'-O-Methyl-uridine
  modified_base 81: mod_base = OTHER; note = 2'-O-Methyl-guanosine
  modified_base 83: mod_base = OTHER; note = 2'-O-Methyl-cytidine
  modified_base 84: mod_base = OTHER; note = 2'-O-Methyl-adenosine
  modified_base 85: mod_base = OTHER; note = 2'-O-Methyl-cytidine
  modified_base 86: mod_base = OTHER; note = 2'-O-Methyl-cytidine
  modified_base 87: mod_base = OTHER; note = 2'-O-Methyl-guanosine
  modified_base 88: mod_base = OTHER; note = 2'-O-Methyl-adenosine
  modified_base 89: mod_base = OTHER; note = 2'-O-Methyl-guanosine
  modified_base 90: mod_base = OTHER; note = 2'-O-Methyl-uridine
  modified_base 91: mod_base = OTHER; note = 2'-O-Methyl-cytidine
  modified_base 92: mod_base = OTHER; note = 2'-O-Methyl-guanosine
  modified_base 93: mod_base = OTHER; note = 2'-O-Methyl-guanosine
  modified_base 94: mod_base = OTHER; note = 2'-O-Methyl-uridine
  modified_base 95: mod_base = OTHER; note = 2'-O-Methyl-guanosine
  modified_base 96: mod_base = OTHER; note = 2'-O-Methyl-cytidine
  modified_base 97: mod_base = OTHER; note = 2'-O-Methyl-uridine
  modified_base 98: mod_base = OTHER; note = 2'-O-Methyl-uridine phosphorothioate
  modified_base 99: mod_base = OTHER; note = 2'-O-Methyl-uridine phosphorothioate
  modified_base 100: mod_base = OTHER; note = 2'-O-Methyl-uridine
  misc_difference 101: note = modified_base - a, c, u, g, unknown or other - a, c, g, inosine, u, deoxyadenosine, deoxyguanosine, deoxycytidine, deoxyinosine, thymine, ribonebularine, 2'-O-methylnebularine, or 2'-deoxynebularine
  misc_difference 102: note = modified_base - a, c, u, g, unknown or other - a, c, g, inosine, u, deoxyadenosine, deoxyguanosine, deoxycytidine, deoxyinosine, thymine, ribonebularine, 2'-O-methylnebularine, or 2'-deoxynebularine
  misc_difference 103: note = modified_base - a, c, u, g, unknown or other - a, c, g, inosine, u, deoxyadenosine, deoxyguanosine, deoxycytidine, deoxyinosine, thymine, ribonebularine, 2'-O-methylnebularine, or 2'-deoxynebularine

SEQ ID NO: 1878 - RNA, 103 nt, synthetic construct; identical to SEQ ID NO: 1795
  source 1..103: mol_type = other RNA; note = Description of Artificial Sequence: Synthetic polynucleotide
  modified_base 1: mod_base = OTHER; note = 2'-O-Methyl-cytidine phosphorothioate
  modified_base 2: mod_base = OTHER; note = 2'-O-Methyl-cytidine phosphorothioate
  modified_base 3: mod_base = OTHER; note = 2'-O-Methyl-cytidine
  modified_base 21: mod_base = OTHER; note = 2'-O-Methyl-guanosine
  modified_base 28: mod_base = OTHER; note = 2'-O-Methyl-adenosine
  modified_base 29: mod_base = OTHER; note = 2'-O-Methyl-guanosine
  modified_base 30: mod_base = OTHER; note = 2'-O-Methyl-cytidine
  modified_base 31: mod_base = OTHER; note = 2'-O-Methyl-uridine
  modified_base 32: mod_base = OTHER; note = 2'-O-Methyl-adenosine
  modified_base 34: mod_base = OTHER; note = 2'-O-Methyl-adenosine
  modified_base 35: mod_base = OTHER; note = 2'-O-Methyl-adenosine
  modified_base 36: mod_base = OTHER; note = 2'-O-Methyl-adenosine
  modified_base 37: mod_base = OTHER; note = 2'-O-Methyl-uridine
  modified_base 38: mod_base = OTHER; note = 2'-O-Methyl-adenosine
  modified_base 39: mod_base = OTHER; note = 2'-O-Methyl-guanosine
  modified_base 40: mod_base = OTHER; note = 2'-O-Methyl-cytidine
  modified_base 41: mod_base = OTHER; note = 2'-O-Methyl-adenosine
  modified_base 42: mod_base = OTHER; note = 2'-O-Methyl-adenosine
  modified_base 45: mod_base = OTHER; note = uridine phosphorothioate
  modified_base 46: mod_base = OTHER; note = 2'-O-Methyl-adenosine
  modified_base 48: mod_base = OTHER; note = 2'-O-Methyl-adenosine
  modified_base 50: mod_base = OTHER; note = 2'-O-Methyl-uridine
  modified_base 52: mod_base = OTHER; note = 2'-O-Methyl-adenosine
  modified_base 53: mod_base = OTHER; note = 2'-O-Methyl-guanosine
  modified_base 54: mod_base = OTHER; note = 2'-O-Methyl-guanosine
  modified_base 57: mod_base = OTHER; note = 2'-O-Methyl-adenosine
  modified_base 61: mod_base = OTHER; note = 2'-O-Methyl-cytidine
  modified_base 66: mod_base = OTHER; note = 2'-O-Methyl-uridine
  modified_base 67: mod_base = OTHER; note = 2'-O-Methyl-cytidine
  modified_base 70: mod_base = OTHER; note = 2'-O-Methyl-cytidine
  modified_base 71: mod_base = OTHER; note = 2'-O-Methyl-uridine
  modified_base 72: mod_base = OTHER; note = 2'-O-Methyl-uridine
  modified_base 74: mod_base = OTHER; note = 2'-O-Methyl-adenosine
  modified_base 75: mod_base = OTHER; note = 2'-O-Methyl-adenosine
  modified_base 76: mod_base = OTHER; note = 2'-O-Methyl-adenosine
  modified_base 77: mod_base = OTHER; note = 2'-O-Methyl-adenosine
  modified_base 78: mod_base = OTHER; note = 2'-O-Methyl-adenosine
  modified_base 79: mod_base = OTHER; note = 2'-O-Methyl-guanosine
  modified_base 80: mod_base = OTHER; note = 2'-O-Methyl-uridine
  modified_base 82: mod_base = OTHER; note = 2'-O-Methyl-guanosine
  modified_base 83: mod_base = OTHER; note = 2'-O-Methyl-cytidine
  modified_base 84: mod_base = OTHER; note = 2'-O-Methyl-adenosine
  modified_base 85: mod_base = OTHER; note = 2'-O-Methyl-cytidine
  modified_base 86: mod_base = OTHER; note = 2'-O-Methyl-cytidine
  modified_base 87: mod_base = OTHER; note = 2'-O-Methyl-guanosine
  modified_base 89: mod_base = OTHER; note = 2'-O-Methyl-guanosine
  modified_base 92: mod_base = OTHER; note = 2'-O-Methyl-guanosine
  modified_base 93: mod_base = OTHER; note = 2'-O-Methyl-guanosine
  modified_base 94: mod_base = OTHER; note = 2'-O-Methyl-uridine
  modified_base 95: mod_base = OTHER; note = 2'-O-Methyl-guanosine
  modified_base 96: mod_base = OTHER; note = 2'-O-Methyl-cytidine
  modified_base 97: mod_base = OTHER; note = 2'-O-Methyl-uridine
  modified_base 98: mod_base = OTHER; note = 2'-O-Methyl-uridine phosphorothioate
  modified_base 99: mod_base = OTHER; note = 2'-O-Methyl-uridine phosphorothioate
  modified_base 100: mod_base = OTHER; note = 2'-O-Methyl-uridine
  misc_difference 101: note = modified_base - a, c, u, g, unknown or other - a, c, g, inosine, u, deoxyadenosine, deoxyguanosine, deoxycytidine, deoxyinosine, thymine, ribonebularine, 2'-O-methylnebularine, or 2'-deoxynebularine
  misc_difference 102: note = modified_base - a, c, u, g, unknown or other - a, c, g, inosine, u, deoxyadenosine, deoxyguanosine, deoxycytidine, deoxyinosine, thymine, ribonebularine, 2'-O-methylnebularine, or 2'-deoxynebularine
  misc_difference 103: note = modified_base - a, c, u, g, unknown or other - a, c, g, inosine, u, deoxyadenosine, deoxyguanosine, deoxycytidine, deoxyinosine, thymine, ribonebularine, 2'-O-methylnebularine, or 2'-deoxynebularine

SEQ ID NO: 1879 - RNA, 103 nt, synthetic construct; identical to SEQ ID NO: 1796
  source 1..103: mol_type = other RNA; note = Description of Artificial Sequence: Synthetic polynucleotide
  modified_base 1: mod_base = OTHER; note = 2'-O-Methyl-guanosine phosphorothioate
  modified_base 2: mod_base = OTHER; note = 2'-O-Methyl-adenosine phosphorothioate
  modified_base 3: mod_base = OTHER; note = 2'-O-Methyl-guanosine
  modified_base 21: mod_base = OTHER; note = 2'-O-Methyl-guanosine
  modified_base 28: mod_base = OTHER; note = 2'-O-Methyl-adenosine
  modified_base 29: mod_base = OTHER; note = 2'-O-Methyl-guanosine
  modified_base 30: mod_base = OTHER; note = 2'-O-Methyl-cytidine
  modified_base 31: mod_base = OTHER; note = 2'-O-Methyl-uridine
  modified_base 32: mod_base = OTHER; note = 2'-O-Methyl-adenosine
  modified_base 34: mod_base = OTHER; note = 2'-O-Methyl-adenosine
  modified_base 35: mod_base = OTHER; note = 2'-O-Methyl-adenosine
  modified_base 36: mod_base = OTHER; note = 2'-O-Methyl-adenosine
  modified_base 37: mod_base = OTHER; note = 2'-O-Methyl-uridine
  modified_base 38: mod_base = OTHER; note = 2'-O-Methyl-adenosine
  modified_base 39: mod_base = OTHER; note = 2'-O-Methyl-guanosine
  modified_base 40: mod_base = OTHER; note = 2'-O-Methyl-cytidine
  modified_base 41: mod_base = OTHER; note = 2'-O-Methyl-adenosine
  modified_base 42: mod_base = OTHER; note = 2'-O-Methyl-adenosine
  modified_base 45: mod_base = OTHER; note = uridine phosphorothioate
  modified_base 46: mod_base = OTHER; note = 2'-O-Methyl-adenosine
  modified_base 48: mod_base = OTHER; note = 2'-O-Methyl-adenosine
  modified_base 50: mod_base = OTHER; note = 2'-O-Methyl-uridine
  modified_base 52: mod_base = OTHER; note = 2'-O-Methyl-adenosine
  modified_base 53: mod_base = OTHER; note = 2'-O-Methyl-guanosine
  modified_base 54: mod_base = OTHER; note = 2'-O-Methyl-guanosine
  modified_base 57: mod_base = OTHER; note = 2'-O-Methyl-adenosine
  modified_base 61: mod_base = OTHER; note = 2'-O-Methyl-cytidine
  modified_base 66: mod_base = OTHER; note = 2'-O-Methyl-uridine
  modified_base 67: mod_base = OTHER; note = 2'-O-Methyl-cytidine
  modified_base 70: mod_base = OTHER; note = 2'-O-Methyl-cytidine
  modified_base 71: mod_base = OTHER; note = 2'-O-Methyl-uridine
  modified_base 72: mod_base = OTHER; note = 2'-O-Methyl-uridine
  modified_base 74: mod_base = OTHER; note = 2'-O-Methyl-adenosine
  modified_base 75: mod_base = OTHER; note = 2'-O-Methyl-adenosine
  modified_base 76: mod_base = OTHER; note = 2'-O-Methyl-adenosine
  modified_base 77: mod_base = OTHER; note = 2'-O-Methyl-adenosine
  modified_base 78: mod_base = OTHER; note = 2'-O-Methyl-adenosine
  modified_base 79: mod_base = OTHER; note = 2'-O-Methyl-guanosine
  modified_base 80: mod_base = OTHER; note = 2'-O-Methyl-uridine
  modified_base 82: mod_base = OTHER; note = 2'-O-Methyl-guanosine
  modified_base 83: mod_base = OTHER; note = 2'-O-Methyl-cytidine
  modified_base 84: mod_base = OTHER; note = 2'-O-Methyl-adenosine
  modified_base 85: mod_base = OTHER; note = 2'-O-Methyl-cytidine
  modified_base 86: mod_base = OTHER; note = 2'-O-Methyl-cytidine
  modified_base 87: mod_base = OTHER; note = 2'-O-Methyl-guanosine
  modified_base 89: mod_base = OTHER; note = 2'-O-Methyl-guanosine
  modified_base 92: mod_base = OTHER; note = 2'-O-Methyl-guanosine
  modified_base 93: mod_base = OTHER; note = 2'-O-Methyl-guanosine
  modified_base 94: mod_base = OTHER; note = 2'-O-Methyl-uridine
  modified_base 95: mod_base = OTHER; note = 2'-O-Methyl-guanosine
  modified_base 96: mod_base = OTHER; note = 2'-O-Methyl-cytidine
  modified_base 97: mod_base = OTHER; note = 2'-O-Methyl-uridine
  modified_base 98: mod_base = OTHER; note = 2'-O-Methyl-uridine phosphorothioate
  modified_base 99: mod_base = OTHER; note = 2'-O-Methyl-uridine phosphorothioate
  modified_base 100: mod_base = OTHER; note = 2'-O-Methyl-uridine
  misc_difference 101: note = modified_base - a, c, u, g, unknown or other - a, c, g, inosine, u, deoxyadenosine, deoxyguanosine, deoxycytidine, deoxyinosine, thymine, ribonebularine, 2'-O-methylnebularine, or 2'-deoxynebularine
  misc_difference 102: note = modified_base - a, c, u, g, unknown or other - a, c, g, inosine, u, deoxyadenosine, deoxyguanosine, deoxycytidine, deoxyinosine, thymine, ribonebularine, 2'-O-methylnebularine, or 2'-deoxynebularine
  misc_difference 103: note = modified_base - a, c, u, g, unknown or other - a, c, g, inosine, u, deoxyadenosine, deoxyguanosine, deoxycytidine, deoxyinosine, thymine, ribonebularine, 2'-O-methylnebularine, or 2'-deoxynebularine

SEQ ID NO: 1880 - RNA, 103 nt, synthetic construct; identical to SEQ ID NO: 1797
  source 1..103: mol_type = other RNA; note = Description of Artificial Sequence: Synthetic polynucleotide
  modified_base 1: mod_base = OTHER; note = 2'-O-Methyl-cytidine phosphorothioate
  modified_base 2: mod_base = OTHER; note = 2'-O-Methyl-adenosine phosphorothioate
  modified_base 3: mod_base = OTHER; note = 2'-O-Methyl-guanosine
  modified_base 21: mod_base = OTHER; note = 2'-O-Methyl-guanosine
  modified_base 28: mod_base = OTHER; note = 2'-O-Methyl-adenosine
  modified_base 29: mod_base = OTHER; note = 2'-O-Methyl-guanosine
  modified_base 30: mod_base = OTHER; note = 2'-O-Methyl-cytidine
  modified_base 31: mod_base = OTHER; note = 2'-O-Methyl-uridine
  modified_base 32: mod_base = OTHER; note = 2'-O-Methyl-adenosine
  modified_base 34: mod_base = OTHER; note = 2'-O-Methyl-adenosine
  modified_base 35: mod_base = OTHER; note = 2'-O-Methyl-adenosine
  modified_base 36: mod_base = OTHER; note = 2'-O-Methyl-adenosine
  modified_base 37: mod_base = OTHER; note = 2'-O-Methyl-uridine
  modified_base 38: mod_base = OTHER; note = 2'-O-Methyl-adenosine
  modified_base 39: mod_base = OTHER; note = 2'-O-Methyl-guanosine
  modified_base 40: mod_base = OTHER; note = 2'-O-Methyl-cytidine
  modified_base 41: mod_base = OTHER; note = 2'-O-Methyl-adenosine
  modified_base 42: mod_base = OTHER; note = 2'-O-Methyl-adenosine
  modified_base 45: mod_base = OTHER; note = uridine phosphorothioate
  modified_base 46: mod_base = OTHER; note = 2'-O-Methyl-adenosine
  modified_base 48: mod_base = OTHER; note = 2'-O-Methyl-adenosine
  modified_base 50: mod_base = OTHER; note = 2'-O-Methyl-uridine
  modified_base 52: mod_base = OTHER; note = 2'-O-Methyl-adenosine
  modified_base 53: mod_base = OTHER; note = 2'-O-Methyl-guanosine
  modified_base 54: mod_base = OTHER; note = 2'-O-Methyl-guanosine
  modified_base 55: mod_base = OTHER; note = 2'-O-Methyl-cytidine
  modified_base 56: mod_base = OTHER; note = 2'-O-Methyl-uridine
  modified_base 57: mod_base = OTHER; note = 2'-O-Methyl-adenosine
  modified_base 60: mod_base = OTHER; note = 2'-O-Methyl-cytidine
  modified_base 61: mod_base = OTHER; note = 2'-O-Methyl-cytidine
  modified_base 66: mod_base = OTHER; note = 2'-O-Methyl-uridine
  modified_base 67: mod_base = OTHER; note = 2'-O-Methyl-cytidine
  modified_base 70: mod_base = OTHER; note = 2'-O-Methyl-cytidine
  modified_base 71: mod_base = OTHER; note = 2'-O-Methyl-uridine
  modified_base 72: mod_base = OTHER; note = 2'-O-Methyl-uridine
  modified_base 74: mod_base = OTHER; note = 2'-O-Methyl-adenosine
  modified_base 75: mod_base = OTHER; note = 2'-O-Methyl-adenosine
  modified_base 76: mod_base = OTHER; note = 2'-O-Methyl-adenosine
  modified_base 77: mod_base = OTHER; note = 2'-O-Methyl-adenosine
  modified_base 78: mod_base = OTHER; note = 2'-O-Methyl-adenosine
  modified_base 79: mod_base = OTHER; note = 2'-O-Methyl-guanosine
  modified_base 80: mod_base = OTHER; note = 2'-O-Methyl-uridine
  modified_base 81: mod_base = OTHER; note = 2'-O-Methyl-guanosine
  modified_base 83: mod_base = OTHER; note = 2'-O-Methyl-cytidine
  modified_base 84: mod_base = OTHER; note = 2'-O-Methyl-adenosine
  modified_base 85: mod_base = OTHER; note = 2'-O-Methyl-cytidine
  modified_base 86: mod_base = OTHER; note = 2'-O-Methyl-cytidine
  modified_base 87: mod_base = OTHER; note = 2'-O-Methyl-guanosine
  modified_base 88: mod_base = OTHER; note = 2'-O-Methyl-adenosine
  modified_base 89: mod_base = OTHER; note = 2'-O-Methyl-guanosine
  modified_base 90: mod_base = OTHER; note = 2'-O-Methyl-uridine
  modified_base 91: mod_base = OTHER; note = 2'-O-Methyl-cytidine
  modified_base 92: mod_base = OTHER; note = 2'-O-Methyl-guanosine
  modified_base 93: mod_base = OTHER; note = 2'-O-Methyl-guanosine
  modified_base 94: mod_base = OTHER; note = 2'-O-Methyl-uridine
  modified_base 95: mod_base = OTHER; note = 2'-O-Methyl-guanosine
  modified_base 96: mod_base = OTHER; note = 2'-O-Methyl-cytidine
  modified_base 97: mod_base = OTHER; note = 2'-O-Methyl-uridine
  modified_base 98: mod_base = OTHER; note = 2'-O-Methyl-uridine phosphorothioate
  modified_base 99: mod_base = OTHER; note = 2'-O-Methyl-uridine phosphorothioate
  modified_base 100: mod_base = OTHER; note = 2'-O-Methyl-uridine
  misc_difference 101: note = modified_base - a, c, u, g, unknown or other - a, c, g, inosine, u, deoxyadenosine, deoxyguanosine, deoxycytidine, deoxyinosine, thymine, ribonebularine, 2'-O-methylnebularine, or 2'-deoxynebularine
  misc_difference 102: note = modified_base - a, c, u, g, unknown or other - a, c, g, inosine, u, deoxyadenosine, deoxyguanosine, deoxycytidine, deoxyinosine, thymine, ribonebularine, 2'-O-methylnebularine, or 2'-deoxynebularine
  misc_difference 103: note = modified_base - a, c, u, g, unknown or other - a, c, g, inosine, u, deoxyadenosine, deoxyguanosine, deoxycytidine, deoxyinosine, thymine, ribonebularine, 2'-O-methylnebularine, or 2'-deoxynebularine

SEQ ID NO: 1881 - RNA, 103 nt, synthetic construct; identical to SEQ ID NO: 1795
  source 1..103: mol_type = other RNA; note = Description of Artificial Sequence: Synthetic polynucleotide
  modified_base 1: mod_base = OTHER; note = 2'-O-Methyl-cytidine phosphorothioate
  modified_base 2: mod_base = OTHER; note = 2'-O-Methyl-cytidine phosphorothioate
  modified_base 3: mod_base = OTHER; note = 2'-O-Methyl-cytidine
  modified_base 21: mod_base = OTHER; note = 2'-O-Methyl-guanosine
  modified_base 25: mod_base = OTHER; note = uridine phosphorothioate
  modified_base 28: mod_base = OTHER; note = 2'-O-Methyl-adenosine
  modified_base 29: mod_base = OTHER; note = 2'-O-Methyl-guanosine
  modified_base 30: mod_base = OTHER; note = 2'-O-Methyl-cytidine
  modified_base 31: mod_base = OTHER; note = 2'-O-Methyl-uridine
  modified_base 32: mod_base = OTHER; note = 2'-O-Methyl-adenosine
  modified_base 34: mod_base = OTHER; note = 2'-O-Methyl-adenosine
  modified_base 35: mod_base = OTHER; note = 2'-O-Methyl-adenosine
  modified_base 36: mod_base = OTHER; note = 2'-O-Methyl-adenosine
  modified_base 37: mod_base = OTHER; note = 2'-O-Methyl-uridine
  modified_base 38: mod_base = OTHER; note = 2'-O-Methyl-adenosine
  modified_base 39: mod_base = OTHER; note = 2'-O-Methyl-guanosine
  modified_base 40: mod_base = OTHER; note = 2'-O-Methyl-cytidine
  modified_base 41: mod_base = OTHER; note = 2'-O-Methyl-adenosine
  modified_base 42: mod_base = OTHER; note = 2'-O-Methyl-adenosine
  modified_base 46: mod_base = OTHER; note = 2'-O-Methyl-adenosine
  modified_base 48: mod_base = OTHER; note = 2'-O-Methyl-adenosine
  modified_base 50: mod_base = OTHER; note = 2'-O-Methyl-uridine
  modified_base 52: mod_base = OTHER; note = 2'-O-Methyl-adenosine
  modified_base 53: mod_base = OTHER; note = 2'-O-Methyl-guanosine
  modified_base 54: mod_base = OTHER; note = 2'-O-Methyl-guanosine
  modified_base 57: mod_base = OTHER; note = 2'-O-Methyl-adenosine
  modified_base 61: mod_base = OTHER; note = 2'-O-Methyl-cytidine
  modified_base 66: mod_base = OTHER; note = 2'-O-Methyl-uridine
  modified_base 67: mod_base = OTHER; note = 2'-O-Methyl-cytidine
  modified_base 70: mod_base = OTHER; note = 2'-O-Methyl-cytidine
  modified_base 71: mod_base = OTHER; note = 2'-O-Methyl-uridine
  modified_base 72: mod_base = OTHER; note = 2'-O-Methyl-uridine
  modified_base 74: mod_base = OTHER; note = 2'-O-Methyl-adenosine
  modified_base 75: mod_base = OTHER; note = 2'-O-Methyl-adenosine
  modified_base 76: mod_base = OTHER; note = 2'-O-Methyl-adenosine
  modified_base 77: mod_base = OTHER; note = 2'-O-Methyl-adenosine
  modified_base 78: mod_base = OTHER; note = 2'-O-Methyl-adenosine
  modified_base 79: mod_base = OTHER; note = 2'-O-Methyl-guanosine
  modified_base 80: mod_base = OTHER; note = 2'-O-Methyl-uridine
  modified_base 82: mod_base = OTHER; note = 2'-O-Methyl-guanosine
  modified_base 83: mod_base = OTHER; note = 2'-O-Methyl-cytidine
  modified_base 84: mod_base = OTHER; note = 2'-O-Methyl-adenosine
  modified_base 85: mod_base = OTHER; note = 2'-O-Methyl-cytidine
  modified_base 86: mod_base = OTHER; note = 2'-O-Methyl-cytidine
  modified_base 87: mod_base = OTHER; note = 2'-O-Methyl-guanosine
  modified_base 89: mod_base = OTHER; note = 2'-O-Methyl-guanosine
  modified_base 92: mod_base = OTHER; note = 2'-O-Methyl-guanosine
  modified_base 93: mod_base = OTHER; note = 2'-O-Methyl-guanosine
  modified_base 94: mod_base = OTHER; note = 2'-O-Methyl-uridine
  modified_base 95: mod_base = OTHER; note = 2'-O-Methyl-guanosine
  modified_base 96: mod_base = OTHER; note = 2'-O-Methyl-cytidine
  modified_base 97: mod_base = OTHER; note = 2'-O-Methyl-uridine
  modified_base 98: mod_base = OTHER; note = 2'-O-Methyl-uridine phosphorothioate
  modified_base 99: mod_base = OTHER; note = 2'-O-Methyl-uridine phosphorothioate
  modified_base 100: mod_base = OTHER; note = 2'-O-Methyl-uridine
  misc_difference 101: note = modified_base - a, c, u, g, unknown or other - a, c, g, inosine, u, deoxyadenosine, deoxyguanosine, deoxycytidine, deoxyinosine, thymine, ribonebularine, 2'-O-methylnebularine, or 2'-deoxynebularine
  misc_difference 102: note = modified_base - a, c, u, g, unknown or other - a, c, g, inosine, u, deoxyadenosine, deoxyguanosine, deoxycytidine, deoxyinosine, thymine, ribonebularine, 2'-O-methylnebularine, or 2'-deoxynebularine
  misc_difference 103: note = modified_base - a, c, u, g, unknown or other - a, c, g, inosine, u, deoxyadenosine, deoxyguanosine, deoxycytidine, deoxyinosine, thymine, ribonebularine, 2'-O-methylnebularine, or 2'-deoxynebularine

SEQ ID NO: 1882 - RNA, 103 nt, synthetic construct; identical to SEQ ID NO: 1796
  source 1..103: mol_type = other RNA; note = Description of Artificial Sequence: Synthetic polynucleotide
  modified_base 1: mod_base = OTHER; note = 2'-O-Methyl-guanosine phosphorothioate
  modified_base 2: mod_base = OTHER; note = 2'-O-Methyl-adenosine phosphorothioate
  modified_base 3: mod_base = OTHER; note = 2'-O-Methyl-guanosine
  modified_base 21: mod_base = OTHER; note = 2'-O-Methyl-guanosine
  modified_base 25: mod_base = OTHER; note = uridine phosphorothioate
  modified_base 28: mod_base = OTHER; note = 2'-O-Methyl-adenosine
  modified_base 29: mod_base = OTHER; note = 2'-O-Methyl-guanosine
  modified_base 30: mod_base = OTHER; note = 2'-O-Methyl-cytidine
  modified_base 31: mod_base = OTHER; note = 2'-O-Methyl-uridine
  modified_base 32: mod_base = OTHER; note = 2'-O-Methyl-adenosine
  modified_base 34: mod_base = OTHER; note = 2'-O-Methyl-adenosine
  modified_base 35: mod_base = OTHER; note = 2'-O-Methyl-adenosine
  modified_base 36: mod_base = OTHER; note = 2'-O-Methyl-adenosine
  modified_base 37: mod_base = OTHER; note = 2'-O-Methyl-uridine
  modified_base 38: mod_base = OTHER; note = 2'-O-Methyl-adenosine
  modified_base 39: mod_base = OTHER; note = 2'-O-Methyl-guanosine
  modified_base 40: mod_base = OTHER; note = 2'-O-Methyl-cytidine
  modified_base 41: mod_base = OTHER; note = 2'-O-Methyl-adenosine
  modified_base 42: mod_base = OTHER; note = 2'-O-Methyl-adenosine
  modified_base 46: mod_base = OTHER; note = 2'-O-Methyl-adenosine
  modified_base 48: mod_base = OTHER; note = 2'-O-Methyl-adenosine
  modified_base 50: mod_base = OTHER; note = 2'-O-Methyl-uridine
  modified_base 52: mod_base = OTHER; note = 2'-O-Methyl-adenosine
  modified_base 53: mod_base = OTHER; note = 2'-O-Methyl-guanosine
  modified_base 54: mod_base = OTHER; note = 2'-O-Methyl-guanosine
  modified_base 57: mod_base = OTHER; note = 2'-O-Methyl-adenosine
  modified_base 61: mod_base = OTHER; note = 2'-O-Methyl-cytidine
  modified_base 66: mod_base = OTHER; note = 2'-O-Methyl-uridine
  modified_base 67: mod_base = OTHER; note = 2'-O-Methyl-cytidine
  modified_base 70: mod_base = OTHER; note = 2'-O-Methyl-cytidine
  modified_base 71: mod_base = OTHER; note = 2'-O-Methyl-uridine
  modified_base 72: mod_base = OTHER; note = 2'-O-Methyl-uridine
  modified_base 74: mod_base = OTHER; note = 2'-O-Methyl-adenosine
  modified_base 75: mod_base = OTHER; note = 2'-O-Methyl-adenosine
  modified_base 76: mod_base = OTHER; note = 2'-O-Methyl-adenosine
  modified_base 77: mod_base = OTHER; note = 2'-O-Methyl-adenosine
  modified_base 78: mod_base = OTHER; note = 2'-O-Methyl-adenosine
  modified_base 79: mod_base = OTHER; note = 2'-O-Methyl-guanosine
  modified_base 80: mod_base = OTHER; note = 2'-O-Methyl-uridine
  modified_base 82: mod_base = OTHER; note = 2'-O-Methyl-guanosine
  modified_base 83: mod_base = OTHER; note = 2'-O-Methyl-cytidine
  modified_base 84: mod_base = OTHER; note = 2'-O-Methyl-adenosine
  modified_base 85: mod_base = OTHER; note = 2'-O-Methyl-cytidine
  modified_base 86: mod_base = OTHER; note = 2'-O-Methyl-cytidine
  modified_base 87: mod_base = OTHER; note = 2'-O-Methyl-guanosine
  modified_base 89: mod_base = OTHER; note = 2'-O-Methyl-guanosine
  modified_base 92: mod_base = OTHER; note = 2'-O-Methyl-guanosine
  modified_base 93: mod_base = OTHER; note = 2'-O-Methyl-guanosine
  modified_base 94: mod_base = OTHER; note = 2'-O-Methyl-uridine
  modified_base 95: mod_base = OTHER; note = 2'-O-Methyl-guanosine
  modified_base 96: mod_base = OTHER; note = 2'-O-Methyl-cytidine
  modified_base 97: mod_base = OTHER; note = 2'-O-Methyl-uridine
  modified_base 98: mod_base = OTHER; note = 2'-O-Methyl-uridine phosphorothioate
  modified_base 99: mod_base = OTHER; note = 2'-O-Methyl-uridine phosphorothioate
  modified_base 100: mod_base = OTHER; note = 2'-O-Methyl-uridine
  misc_difference 101: note = modified_base - a, c, u, g, unknown or other - a, c, g, inosine, u, deoxyadenosine, deoxyguanosine, deoxycytidine, deoxyinosine, thymine, ribonebularine, 2'-O-methylnebularine, or 2'-deoxynebularine
  misc_difference 102: note = modified_base - a, c, u, g, unknown or other - a, c, g, inosine, u, deoxyadenosine, deoxyguanosine, deoxycytidine, deoxyinosine, thymine, ribonebularine, 2'-O-methylnebularine, or 2'-deoxynebularine
  misc_difference 103: note = modified_base - a, c, u, g, unknown or other - a, c, g, inosine, u, deoxyadenosine, deoxyguanosine, deoxycytidine, deoxyinosine, thymine, ribonebularine, 2'-O-methylnebularine, or 2'-deoxynebularine

SEQ ID NO: 1883 - RNA, 103 nt, synthetic construct; identical to SEQ ID NO: 1797
  source 1..103: mol_type = other RNA; note = Description of Artificial Sequence: Synthetic polynucleotide
  modified_base 1: mod_base = OTHER; note = 2'-O-Methyl-cytidine phosphorothioate
  modified_base 2: mod_base = OTHER; note = 2'-O-Methyl-adenosine phosphorothioate
  modified_base 3: mod_base = OTHER; note = 2'-O-Methyl-guanosine
  modified_base 21: mod_base = OTHER; note = 2'-O-Methyl-guanosine
  modified_base 25: mod_base = OTHER; note = uridine phosphorothioate
  modified_base 28: mod_base = OTHER; note = 2'-O-Methyl-adenosine
  modified_base 29: mod_base = OTHER; note = 2'-O-Methyl-guanosine
  modified_base 30: mod_base = OTHER; note = 2'-O-Methyl-cytidine
  modified_base 31: mod_base = OTHER; note = 2'-O-Methyl-uridine
  modified_base 32: mod_base = OTHER; note = 2'-O-Methyl-adenosine
  modified_base 34: mod_base = OTHER; note = 2'-O-Methyl-adenosine
  modified_base 35: mod_base = OTHER; note = 2'-O-Methyl-adenosine
  modified_base 36: mod_base = OTHER; note = 2'-O-Methyl-adenosine
  modified_base 37: mod_base = OTHER; note = 2'-O-Methyl-uridine
  modified_base 38: mod_base = OTHER; note = 2'-O-Methyl-adenosine
  modified_base 39: mod_base = OTHER; note = 2'-O-Methyl-guanosine
  modified_base 40: mod_base = OTHER; note = 2'-O-Methyl-cytidine
  modified_base 41: mod_base = OTHER; note = 2'-O-Methyl-adenosine
  modified_base 42: mod_base = OTHER; note = 2'-O-Methyl-adenosine
  modified_base 46: mod_base = OTHER; note = 2'-O-Methyl-adenosine
  modified_base 48: mod_base = OTHER; note = 2'-O-Methyl-adenosine
  modified_base 50: mod_base = OTHER; note = 2'-O-Methyl-uridine
  modified_base 52: mod_base = OTHER; note = 2'-O-Methyl-adenosine
  modified_base 53: mod_base = OTHER; note = 2'-O-Methyl-guanosine
  modified_base 54: mod_base = OTHER; note = 2'-O-Methyl-guanosine
  modified_base 55: mod_base = OTHER; note = 2'-O-Methyl-cytidine
  modified_base 56: mod_base = OTHER; note = 2'-O-Methyl-uridine
  modified_base 57: mod_base = OTHER; note = 2'-O-Methyl-adenosine
  modified_base 60: mod_base = OTHER; note = 2'-O-Methyl-cytidine
  modified_base 61: mod_base = OTHER; note = 2'-O-Methyl-cytidine
  modified_base 66: mod_base = OTHER; note = 2'-O-Methyl-uridine
  modified_base 67: mod_base = OTHER; note = 2'-O-Methyl-cytidine
  modified_base 70: mod_base = OTHER; note = 2'-O-Methyl-cytidine
  modified_base 71: mod_base = OTHER; note = 2'-O-Methyl-uridine
  modified_base 72: mod_base = OTHER; note = 2'-O-Methyl-uridine
  modified_base 74: mod_base = OTHER; note = 2'-O-Methyl-adenosine
  modified_base 75: mod_base = OTHER; note = 2'-O-Methyl-adenosine
  modified_base 76: mod_base = OTHER; note = 2'-O-Methyl-adenosine
  modified_base 77: mod_base = OTHER; note = 2'-O-Methyl-adenosine
  modified_base 78: mod_base = OTHER; note = 2'-O-Methyl-adenosine
  modified_base 79: mod_base = OTHER; note = 2'-O-Methyl-guanosine
  modified_base 80: mod_base = OTHER; note = 2'-O-Methyl-uridine
  modified_base 81: mod_base = OTHER; note = 2'-O-Methyl-guanosine
  modified_base 83: mod_base = OTHER; note = 2'-O-Methyl-cytidine
  modified_base 84: mod_base = OTHER; note = 2'-O-Methyl-adenosine
  modified_base 85: mod_base = OTHER; note = 2'-O-Methyl-cytidine
  modified_base 86: mod_base = OTHER; note = 2'-O-Methyl-cytidine
  modified_base 87: mod_base = OTHER; note = 2'-O-Methyl-guanosine
  modified_base 88: mod_base = OTHER; note = 2'-O-Methyl-adenosine
  modified_base 89: mod_base = OTHER; note = 2'-O-Methyl-guanosine
  modified_base 90: mod_base = OTHER; note = 2'-O-Methyl-uridine
  modified_base 91: mod_base = OTHER; note = 2'-O-Methyl-cytidine
  modified_base 92: mod_base = OTHER; note = 2'-O-Methyl-guanosine
  modified_base 93: mod_base = OTHER; note = 2'-O-Methyl-guanosine
  modified_base 94: mod_base = OTHER; note = 2'-O-Methyl-uridine
  modified_base 95: mod_base = OTHER; note = 2'-O-Methyl-guanosine
  modified_base 96: mod_base = OTHER; note = 2'-O-Methyl-cytidine
  modified_base 97: mod_base = OTHER; note = 2'-O-Methyl-uridine
  modified_base 98: mod_base = OTHER; note = 2'-O-Methyl-uridine phosphorothioate
  modified_base 99: mod_base = OTHER; note = 2'-O-Methyl-uridine phosphorothioate
  modified_base 100: mod_base = OTHER; note = 2'-O-Methyl-uridine
  misc_difference 101: note = modified_base - a, c, u, g, unknown or other - a, c, g, inosine, u, deoxyadenosine, deoxyguanosine, deoxycytidine, deoxyinosine, thymine, ribonebularine, 2'-O-methylnebularine, or 2'-deoxynebularine
  misc_difference 102: note = modified_base - a, c, u, g, unknown or other - a, c, g, inosine, u, deoxyadenosine, deoxyguanosine, deoxycytidine, deoxyinosine, thymine, ribonebularine, 2'-O-methylnebularine, or 2'-deoxynebularine
  misc_difference 103: note = modified_base - a, c, u, g, unknown or other - a, c, g, inosine, u, deoxyadenosine, deoxyguanosine, deoxycytidine, deoxyinosine, thymine, ribonebularine, 2'-O-methylnebularine, or 2'-deoxynebularine

SEQ ID NO: 1884 - RNA, 103 nt, synthetic construct; identical to SEQ ID NO: 1795
  source 1..103: mol_type = other RNA; note = Description of Artificial Sequence: Synthetic polynucleotide
  modified_base 1: mod_base = OTHER; note = 2'-O-Methyl-cytidine phosphorothioate
  modified_base 2: mod_base = OTHER; note = 2'-O-Methyl-cytidine phosphorothioate
  modified_base 3: mod_base = OTHER; note = 2'-O-Methyl-cytidine
  modified_base 21: mod_base = OTHER; note = 2'-O-Methyl-guanosine
  modified_base 28: mod_base = OTHER; note = 2'-O-Methyl-adenosine
  modified_base 29: mod_base = OTHER; note = 2'-O-Methyl-guanosine
  modified_base 30: mod_base = OTHER; note = 2'-O-Methyl-cytidine
  modified_base 31: mod_base = OTHER; note = 2'-O-Methyl-uridine
  modified_base 32: mod_base = OTHER; note = 2'-O-Methyl-adenosine
  modified_base 34: mod_base = OTHER; note = 2'-O-Methyl-adenosine
  modified_base 35: mod_base = OTHER; note = 2'-O-Methyl-adenosine
  modified_base 36: mod_base = OTHER; note = 2'-O-Methyl-adenosine
  modified_base 37: mod_base = OTHER; note = 2'-O-Methyl-uridine
  modified_base 38: mod_base = OTHER; note = 2'-O-Methyl-adenosine
  modified_base 39: mod_base = OTHER; note = 2'-O-Methyl-guanosine
  modified_base 40: mod_base = OTHER; note = 2'-O-Methyl-cytidine
  modified_base 41: mod_base = OTHER; note = 2'-O-Methyl-adenosine
  modified_base 42: mod_base = OTHER; note = 2'-O-Methyl-adenosine
  modified_base 45: mod_base = OTHER; note = uridine phosphorothioate
  modified_base 46: mod_base = OTHER; note = 2'-O-Methyl-adenosine
  modified_base 48: mod_base = OTHER; note = 2'-O-Methyl-adenosine
  modified_base 50: mod_base = OTHER; note = 2'-O-Methyl-uridine
  modified_base 52: mod_base = OTHER; note = 2'-O-Methyl-adenosine
  modified_base 53: mod_base = OTHER; note = 2'-O-Methyl-guanosine
  modified_base 54: mod_base = OTHER; note = 2'-O-Methyl-guanosine
  modified_base 57: mod_base = OTHER; note = 2'-O-Methyl-adenosine
  modified_base 61: mod_base = OTHER; note = 2'-O-Methyl-cytidine
  modified_base 64: mod_base = OTHER; note = uridine phosphorothioate
  modified_base 66: mod_base = OTHER; note = 2'-O-Methyl-uridine
  modified_base 67: mod_base = OTHER; note = 2'-O-Methyl-cytidine
  modified_base 70: mod_base = OTHER; note = 2'-O-Methyl-cytidine
  modified_base 71: mod_base = OTHER; note = 2'-O-Methyl-uridine
  modified_base 72: mod_base = OTHER; note = 2'-O-Methyl-uridine
  modified_base 74: mod_base = OTHER; note = 2'-O-Methyl-adenosine
  modified_base 75: mod_base = OTHER; note = 2'-O-Methyl-adenosine
  modified_base 76: mod_base = OTHER; note = 2'-O-Methyl-adenosine
  modified_base 77: mod_base = OTHER; note = 2'-O-Methyl-adenosine
  modified_base 78: mod_base = OTHER; note = 2'-O-Methyl-adenosine
  modified_base 79: mod_base = OTHER; note = 2'-O-Methyl-guanosine
  modified_base 80: mod_base = OTHER; note = 2'-O-Methyl-uridine
  modified_base 82: mod_base = OTHER; note = 2'-O-Methyl-guanosine
  modified_base 83: mod_base = OTHER; note = 2'-O-Methyl-cytidine
  modified_base 84: mod_base = OTHER; note = 2'-O-Methyl-adenosine
  modified_base 85: mod_base = OTHER; note = 2'-O-Methyl-cytidine
  modified_base 86: mod_base = OTHER; note = 2'-O-Methyl-cytidine
  modified_base 87: mod_base = OTHER; note = 2'-O-Methyl-guanosine
  modified_base 89: mod_base = OTHER; note = 2'-O-Methyl-guanosine
  modified_base 92: mod_base = OTHER; note = 2'-O-Methyl-guanosine
  modified_base 93: mod_base = OTHER; note = 2'-O-Methyl-guanosine
  modified_base 94: mod_base = OTHER; note = 2'-O-Methyl-uridine
  modified_base 95: mod_base = OTHER; note = 2'-O-Methyl-guanosine
  modified_base 96: mod_base = OTHER; note = 2'-O-Methyl-cytidine
  modified_base 97: mod_base = OTHER; note = 2'-O-Methyl-uridine
  modified_base 98: mod_base = OTHER; note = 2'-O-Methyl-uridine phosphorothioate
  modified_base 99: mod_base = OTHER; note = 2'-O-Methyl-uridine phosphorothioate
  modified_base 100: mod_base = OTHER; note = 2'-O-Methyl-uridine
  misc_difference 101: note = modified_base - a, c, u, g, unknown or other - a, c, g, inosine, u, deoxyadenosine, deoxyguanosine, deoxycytidine, deoxyinosine, thymine, ribonebularine, 2'-O-methylnebularine, or 2'-deoxynebularine
  misc_difference 102: note = modified_base - a, c, u, g, unknown or other - a, c, g, inosine, u, deoxyadenosine, deoxyguanosine, deoxycytidine, deoxyinosine, thymine, ribonebularine, 2'-O-methylnebularine, or 2'-deoxynebularine
  misc_difference 103: note = modified_base - a, c, u, g, unknown or other - a, c, g, inosine, u, deoxyadenosine, deoxyguanosine, deoxycytidine, deoxyinosine, thymine, ribonebularine, 2'-O-methylnebularine, or 2'-deoxynebularine

SEQ ID NO: 1885 - RNA, 103 nt, synthetic construct; identical to SEQ ID NO: 1796
  source 1..103: mol_type = other RNA; note = Description of Artificial Sequence: Synthetic polynucleotide
  modified_base 1: mod_base = OTHER; note = 2'-O-Methyl-guanosine phosphorothioate
  modified_base 2: mod_base = OTHER; note = 2'-O-Methyl-adenosine phosphorothioate
  modified_base 3: mod_base = OTHER; note = 2'-O-Methyl-guanosine
  modified_base 21: mod_base = OTHER; note = 2'-O-Methyl-guanosine
  modified_base 28: mod_base = OTHER; note = 2'-O-Methyl-adenosine
  modified_base 29: mod_base = OTHER; note = 2'-O-Methyl-guanosine
  modified_base 30: mod_base = OTHER; note = 2'-O-Methyl-cytidine
  modified_base 31: mod_base = OTHER; note = 2'-O-Methyl-uridine
  modified_base 32: mod_base = OTHER; note = 2'-O-Methyl-adenosine
  modified_base 34: mod_base = OTHER; note = 2'-O-Methyl-adenosine
  modified_base 35: mod_base = OTHER; note = 2'-O-Methyl-adenosine
  modified_base 36: mod_base = OTHER; note = 2'-O-Methyl-adenosine
  modified_base 37: mod_base = OTHER; note = 2'-O-Methyl-uridine
  modified_base 38: mod_base = OTHER; note = 2'-O-Methyl-adenosine
  modified_base 39: mod_base = OTHER; note = 2'-O-Methyl-guanosine
  modified_base 40: mod_base = OTHER; note = 2'-O-Methyl-cytidine
  modified_base 41: mod_base = OTHER; note = 2'-O-Methyl-adenosine
  modified_base 42: mod_base = OTHER; note = 2'-O-Methyl-adenosine
  modified_base 45: mod_base = OTHER; note = uridine phosphorothioate
  modified_base 46: mod_base = OTHER; note = 2'-O-Methyl-adenosine
  modified_base 48: mod_base = OTHER; note = 2'-O-Methyl-adenosine
  modified_base 50: mod_base = OTHER; note = 2'-O-Methyl-uridine
  modified_base 52: mod_base = OTHER; note = 2'-O-Methyl-adenosine
  modified_base 53: mod_base = OTHER; note = 2'-O-Methyl-guanosine
  modified_base 54: mod_base = OTHER; note = 2'-O-Methyl-guanosine
  modified_base 57: mod_base = OTHER; note = 2'-O-Methyl-adenosine
  modified_base 61: mod_base = OTHER; note = 2'-O-Methyl-cytidine
  modified_base 64: mod_base = OTHER; note = uridine phosphorothioate
  modified_base 66: mod_base = OTHER; note = 2'-O-Methyl-uridine
  modified_base 67: mod_base = OTHER; note = 2'-O-Methyl-cytidine
  modified_base 70: mod_base = OTHER; note = 2'-O-Methyl-cytidine
  modified_base 71: mod_base = OTHER; note = 2'-O-Methyl-uridine
  modified_base 72: mod_base = OTHER; note = 2'-O-Methyl-uridine
  modified_base 74: mod_base = OTHER; note = 2'-O-Methyl-adenosine
  modified_base 75: mod_base = OTHER; note = 2'-O-Methyl-adenosine
  modified_base 76: mod_base = OTHER; note = 2'-O-Methyl-adenosine
  modified_base 77: mod_base = OTHER; note = 2'-O-Methyl-adenosine
  modified_base 78: mod_base = OTHER; note = 2'-O-Methyl-adenosine
  modified_base 79: mod_base = OTHER; note = 2'-O-Methyl-guanosine
  modified_base 80: mod_base = OTHER; note = 2'-O-Methyl-uridine
  modified_base 82: mod_base = OTHER; note = 2'-O-Methyl-guanosine
  modified_base 83: mod_base = OTHER; note = 2'-O-Methyl-cytidine
  modified_base 84: mod_base = OTHER; note = 2'-O-Methyl-adenosine
  modified_base 85: mod_base = OTHER; note = 2'-O-Methyl-cytidine
  modified_base 86: mod_base = OTHER; note = 2'-O-Methyl-cytidine
  modified_base 87: mod_base = OTHER; note = 2'-O-Methyl-guanosine
  modified_base 89: mod_base = OTHER; note = 2'-O-Methyl-guanosine
  modified_base 92: mod_base = OTHER; note = 2'-O-Methyl-guanosine
  modified_base 93: mod_base = OTHER; note = 2'-O-Methyl-guanosine
  modified_base 94: mod_base = OTHER; note = 2'-O-Methyl-uridine
  modified_base 95: mod_base = OTHER; note = 2'-O-Methyl-guanosine
  modified_base 96: mod_base = OTHER; note = 2'-O-Methyl-cytidine
  modified_base 97: mod_base = OTHER; note = 2'-O-Methyl-uridine
  modified_base 98: mod_base = OTHER; note = 2'-O-Methyl-uridine phosphorothioate
  modified_base 99: mod_base = OTHER; note = 2'-O-Methyl-uridine phosphorothioate
  modified_base 100: mod_base = OTHER; note = 2'-O-Methyl-uridine
  misc_difference 101: note = modified_base - a, c, u, g, unknown or other - a, c, g, inosine, u, deoxyadenosine, deoxyguanosine, deoxycytidine, deoxyinosine, thymine, ribonebularine, 2'-O-methylnebularine, or 2'-deoxynebularine
  misc_difference 102: note = modified_base - a, c, u, g, unknown or other - a, c, g, inosine, u, deoxyadenosine, deoxyguanosine, deoxycytidine, deoxyinosine, thymine, ribonebularine, 2'-O-methylnebularine, or 2'-deoxynebularine
  misc_difference 103: note = modified_base - a, c, u, g, unknown or other - a, c, g, inosine, u, deoxyadenosine, deoxyguanosine, deoxycytidine, deoxyinosine, thymine, ribonebularine, 2'-O-methylnebularine, or 2'-deoxynebularine

SEQ ID NO: 1886 - RNA, 103 nt, synthetic construct; identical to SEQ ID NO: 1797
  source 1..103: mol_type = other RNA; note = Description of Artificial Sequence: Synthetic polynucleotide
  modified_base 1: mod_base = OTHER; note = 2'-O-Methyl-cytidine phosphorothioate
  modified_base 2: mod_base = OTHER; note = 2'-O-Methyl-adenosine phosphorothioate
  modified_base 3: mod_base = OTHER; note = 2'-O-Methyl-guanosine
  modified_base 21: mod_base = OTHER; note = 2'-O-Methyl-guanosine
  modified_base 28: mod_base = OTHER; note = 2'-O-Methyl-adenosine
  modified_base 29: mod_base = OTHER; note = 2'-O-Methyl-guanosine
  modified_base 30: mod_base = OTHER; note = 2'-O-Methyl-cytidine
  modified_base 31: mod_base = OTHER; note = 2'-O-Methyl-uridine
  modified_base 32: mod_base = OTHER; note = 2'-O-Methyl-adenosine
  modified_base 34: mod_base = OTHER; note = 2'-O-Methyl-adenosine
  modified_base 35: mod_base = OTHER; note = 2'-O-Methyl-adenosine
  modified_base 36: mod_base = OTHER; note = 2'-O-Methyl-adenosine
  modified_base 37: mod_base = OTHER; note = 2'-O-Methyl-uridine
  modified_base 38: mod_base = OTHER; note = 2'-O-Methyl-adenosine
  modified_base 39: mod_base = OTHER; note = 2'-O-Methyl-guanosine
  modified_base 40: mod_base = OTHER; note = 2'-O-Methyl-cytidine
  modified_base 41: mod_base = OTHER; note = 2'-O-Methyl-adenosine
  modified_base 42: mod_base = OTHER; note = 2'-O-Methyl-adenosine
  modified_base 45: mod_base = OTHER; note = uridine phosphorothioate
  modified_base 46: mod_base = OTHER; note = 2'-O-Methyl-adenosine
  modified_base 48: mod_base = OTHER; note = 2'-O-Methyl-adenosine
  modified_base 50: mod_base = OTHER; note = 2'-O-Methyl-uridine
  modified_base 52: mod_base = OTHER; note = 2'-O-Methyl-adenosine
  modified_base 53: mod_base = OTHER; note = 2'-O-Methyl-guanosine
  modified_base 54: mod_base = OTHER; note = 2'-O-Methyl-guanosine
  modified_base 55: mod_base = OTHER; note = 2'-O-Methyl-cytidine
  modified_base 56: mod_base = OTHER; note = 2'-O-Methyl-uridine
  modified_base 57: mod_base = OTHER; note = 2'-O-Methyl-adenosine
  modified_base 60: mod_base = OTHER; note = 2'-O-Methyl-cytidine
  modified_base 61: mod_base = OTHER; note = 2'-O-Methyl-cytidine
  modified_base 64: mod_base = OTHER; note = uridine phosphorothioate
  modified_base 66: mod_base = OTHER; note = 2'-O-Methyl-uridine
  modified_base 67: mod_base = OTHER; note = 2'-O-Methyl-cytidine
  modified_base 70: mod_base = OTHER; note = 2'-O-Methyl-cytidine
  modified_base 71: mod_base = OTHER; note = 2'-O-Methyl-uridine
  modified_base 72: mod_base = OTHER; note = 2'-O-Methyl-uridine
  modified_base 74: mod_base = OTHER; note = 2'-O-Methyl-adenosine
  modified_base 75: mod_base = OTHER; note = 2'-O-Methyl-adenosine
  modified_base 76: mod_base = OTHER; note = 2'-O-Methyl-adenosine
  modified_base 77: mod_base = OTHER; note = 2'-O-Methyl-adenosine
  modified_base 78: mod_base = OTHER; note = 2'-O-Methyl-adenosine
  modified_base 79: mod_base = OTHER; note = 2'-O-Methyl-guanosine
  modified_base 80: mod_base = OTHER; note = 2'-O-Methyl-uridine
  modified_base 81: mod_base = OTHER; note = 2'-O-Methyl-guanosine
  modified_base 83: mod_base = OTHER; note = 2'-O-Methyl-cytidine
  modified_base 84: mod_base = OTHER; note = 2'-O-Methyl-adenosine
  modified_base 85: mod_base = OTHER; note = 2'-O-Methyl-cytidine
  modified_base 86: mod_base = OTHER; note = 2'-O-Methyl-cytidine
  modified_base 87: mod_base = OTHER; note = 2'-O-Methyl-guanosine
  modified_base 88: mod_base = OTHER; note = 2'-O-Methyl-adenosine
  modified_base 89: mod_base = OTHER; note = 2'-O-Methyl-guanosine
  modified_base 90: mod_base = OTHER; note = 2'-O-Methyl-uridine
  modified_base 91: mod_base = OTHER; note = 2'-O-Methyl-cytidine
  modified_base 92: mod_base = OTHER; note = 2'-O-Methyl-guanosine
  modified_base 93: mod_base = OTHER; note = 2'-O-Methyl-guanosine
  modified_base 94: mod_base = OTHER; note = 2'-O-Methyl-uridine
  modified_base 95: mod_base = OTHER; note = 2'-O-Methyl-guanosine
  modified_base 96: mod_base = OTHER; note = 2'-O-Methyl-cytidine
  modified_base 97: mod_base = OTHER; note = 2'-O-Methyl-uridine
  modified_base 98: mod_base = OTHER; note = 2'-O-Methyl-uridine phosphorothioate
  modified_base 99: mod_base = OTHER; note = 2'-O-Methyl-uridine phosphorothioate
  modified_base 100: mod_base = OTHER; note = 2'-O-Methyl-uridine
  misc_difference 101: note = modified_base - a, c, u, g, unknown or other - a, c, g, inosine, u, deoxyadenosine, deoxyguanosine, deoxycytidine, deoxyinosine, thymine, ribonebularine, 2'-O-methylnebularine, or 2'-deoxynebularine
  misc_difference 102: note = modified_base - a, c, u, g, unknown or other - a, c, g, inosine, u, deoxyadenosine, deoxyguanosine, deoxycytidine, deoxyinosine, thymine, ribonebularine, 2'-O-methylnebularine, or 2'-deoxynebularine
  misc_difference 103: note = modified_base - a, c, u, g, unknown or other - a, c, g, inosine, u, deoxyadenosine, deoxyguanosine, deoxycytidine, deoxyinosine, thymine, ribonebularine, 2'-O-methylnebularine, or 2'-deoxynebularine

SEQ ID NO: 1887 - RNA, 103 nt, synthetic construct; identical to SEQ ID NO: 1795
  source 1..103: mol_type = other RNA; note = Description of Artificial Sequence: Synthetic polynucleotide
  modified_base 1: mod_base = OTHER; note = 2'-O-Methyl-cytidine phosphorothioate
  modified_base 2: mod_base = OTHER; note = 2'-O-Methyl-cytidine phosphorothioate
  modified_base 3: mod_base = OTHER; note = 2'-O-Methyl-cytidine
  modified_base 21: mod_base = OTHER; note = 2'-O-Methyl-guanosine
  modified_base 25: mod_base = OTHER; note = uridine phosphorothioate
  modified_base 28: mod_base = OTHER; note = 2'-O-Methyl-adenosine
  modified_base 29: mod_base = OTHER; note = 2'-O-Methyl-guanosine
  modified_base 30: mod_base = OTHER; note = 2'-O-Methyl-cytidine
  modified_base 31: mod_base = OTHER; note = 2'-O-Methyl-uridine
  modified_base 32: mod_base = OTHER; note = 2'-O-Methyl-adenosine
  modified_base 34: mod_base = OTHER; note = 2'-O-Methyl-adenosine
  modified_base 35: mod_base = OTHER; note = 2'-O-Methyl-adenosine
  modified_base 36: mod_base = OTHER; note = 2'-O-Methyl-adenosine
  modified_base 37: mod_base = OTHER; note = 2'-O-Methyl-uridine
  modified_base 38: mod_base = OTHER; note = 2'-O-Methyl-adenosine
  modified_base 39: mod_base = OTHER; note = 2'-O-Methyl-guanosine
  modified_base 40: mod_base = OTHER; note = 2'-O-Methyl-cytidine
  modified_base 41: mod_base = OTHER; note = 2'-O-Methyl-adenosine
  modified_base 42: mod_base = OTHER; note = 2'-O-Methyl-adenosine
  modified_base 45: mod_base = OTHER; note = uridine phosphorothioate
  modified_base 46: mod_base = OTHER; note = 2'-O-Methyl-adenosine
  modified_base 48: mod_base = OTHER; note = 2'-O-Methyl-adenosine
  modified_base 50: mod_base = OTHER; note = 2'-O-Methyl-uridine
  modified_base 52: mod_base = OTHER; note = 2'-O-Methyl-adenosine
  modified_base 53: mod_base = OTHER; note = 2'-O-Methyl-guanosine
  modified_base 54: mod_base = OTHER; note = 2'-O-Methyl-guanosine
  modified_base 57: mod_base = OTHER; note = 2'-O-Methyl-adenosine
  modified_base 61: mod_base = OTHER; note = 2'-O-Methyl-cytidine
  modified_base 66: mod_base = OTHER; note = 2'-O-Methyl-uridine
  modified_base 67: mod_base = OTHER; note = 2'-O-Methyl-cytidine
  modified_base 70: mod_base = OTHER; note = 2'-O-Methyl-cytidine
  modified_base 71: mod_base = OTHER; note = 2'-O-Methyl-uridine
  modified_base 72: mod_base = OTHER; note = 2'-O-Methyl-uridine
  modified_base 74: mod_base = OTHER; note = 2'-O-Methyl-adenosine
  modified_base 75: mod_base = OTHER; note = 2'-O-Methyl-adenosine
  modified_base 76: mod_base = OTHER; note = 2'-O-Methyl-adenosine
  modified_base 77: mod_base = OTHER; note = 2'-O-Methyl-adenosine
  modified_base 78: mod_base = OTHER; note = 2'-O-Methyl-adenosine
  modified_base 79: mod_base = OTHER; note = 2'-O-Methyl-guanosine
  modified_base 80: mod_base = OTHER; note = 2'-O-Methyl-uridine
  modified_base 82: mod_base = OTHER; note = 2'-O-Methyl-guanosine
  modified_base 83: mod_base = OTHER; note = 2'-O-Methyl-cytidine
  modified_base 84: mod_base = OTHER; note = 2'-O-Methyl-adenosine
  modified_base 85: mod_base = OTHER; note = 2'-O-Methyl-cytidine
  modified_base 86: mod_base = OTHER; note = 2'-O-Methyl-cytidine
  modified_base 87: mod_base = OTHER; note = 2'-O-Methyl-guanosine
  modified_base 89: mod_base = OTHER; note = 2'-O-Methyl-guanosine
  modified_base 92: mod_base = OTHER; note = 2'-O-Methyl-guanosine
  modified_base 93: mod_base = OTHER; note = 2'-O-Methyl-guanosine
  modified_base 94: mod_base = OTHER; note = 2'-O-Methyl-uridine
  modified_base 95: mod_base = OTHER; note = 2'-O-Methyl-guanosine
  modified_base 96: mod_base = OTHER; note = 2'-O-Methyl-cytidine
  modified_base 97: mod_base = OTHER; note = 2'-O-Methyl-uridine
  modified_base 98: mod_base = OTHER; note = 2'-O-Methyl-uridine phosphorothioate
  modified_base 99: mod_base = OTHER; note = 2'-O-Methyl-uridine phosphorothioate
  modified_base 100: mod_base = OTHER; note = 2'-O-Methyl-uridine
  misc_difference 101: note = modified_base - a, c, u, g, unknown or other - a, c, g, inosine, u, deoxyadenosine, deoxyguanosine, deoxycytidine, deoxyinosine, thymine, ribonebularine, 2'-O-methylnebularine, or 2'-deoxynebularine
  misc_difference 102: note = modified_base - a, c, u, g, unknown or other - a, c, g, inosine, u, deoxyadenosine, deoxyguanosine, deoxycytidine, deoxyinosine, thymine, ribonebularine, 2'-O-methylnebularine, or 2'-deoxynebularine
  misc_difference 103: note = modified_base - a, c, u, g, unknown or other - a, c, g, inosine, u, deoxyadenosine, deoxyguanosine, deoxycytidine, deoxyinosine, thymine, ribonebularine, 2'-O-methylnebularine, or 2'-deoxynebularine

SEQ ID NO: 1888 - RNA, 103 nt, synthetic construct; identical to SEQ ID NO: 1796
  source 1..103: mol_type = other RNA; note = Description of Artificial Sequence: Synthetic polynucleotide
  modified_base 1: mod_base = OTHER; note = 2'-O-Methyl-guanosine phosphorothioate
  modified_base 2: mod_base = OTHER; note = 2'-O-Methyl-adenosine phosphorothioate
  modified_base 3: mod_base = OTHER; note = 2'-O-Methyl-guanosine
  modified_base 21: mod_base = OTHER; note = 2'-O-Methyl-guanosine
  modified_base 25: mod_base = OTHER; note = uridine phosphorothioate
  modified_base 28: mod_base = OTHER; note = 2'-O-Methyl-adenosine
  modified_base 29: mod_base = OTHER; note = 2'-O-Methyl-guanosine
  modified_base 30: mod_base = OTHER; note = 2'-O-Methyl-cytidine
  modified_base 31: mod_base = OTHER; note = 2'-O-Methyl-uridine
  modified_base 32: mod_base = OTHER; note = 2'-O-Methyl-adenosine
  modified_base 34: mod_base = OTHER; note = 2'-O-Methyl-adenosine
  modified_base 35: mod_base = OTHER; note = 2'-O-Methyl-adenosine
  modified_base 36: mod_base = OTHER; note = 2'-O-Methyl-adenosine
  modified_base 37: mod_base = OTHER; note = 2'-O-Methyl-uridine
  modified_base 38: mod_base = OTHER; note = 2'-O-Methyl-adenosine
  modified_base 39: mod_base = OTHER; note = 2'-O-Methyl-guanosine
  modified_base 40: mod_base = OTHER; note = 2'-O-Methyl-cytidine
  modified_base 41: mod_base = OTHER; note = 2'-O-Methyl-adenosine
  modified_base 42: mod_base = OTHER; note = 2'-O-Methyl-adenosine
  modified_base 45: mod_base = OTHER; note = uridine phosphorothioate
  modified_base 46: mod_base = OTHER; note = 2'-O-Methyl-adenosine
  modified_base 48: mod_base = OTHER; note = 2'-O-Methyl-adenosine
  modified_base 50: mod_base = OTHER; note = 2'-O-Methyl-uridine
  modified_base 52: mod_base = OTHER; note = 2'-O-Methyl-adenosine
  modified_base 53: mod_base = OTHER; note = 2'-O-Methyl-guanosine
  modified_base 54: mod_base = OTHER; note = 2'-O-Methyl-guanosine
  modified_base 57: mod_base = OTHER; note = 2'-O-Methyl-adenosine
  modified_base 61: mod_base = OTHER; note = 2'-O-Methyl-cytidine
  modified_base 66: mod_base = OTHER; note = 2'-O-Methyl-uridine
  modified_base 67: mod_base = OTHER; note = 2'-O-Methyl-cytidine
  modified_base 70: mod_base = OTHER; note = 2'-O-Methyl-cytidine
  modified_base 71: mod_base = OTHER; note = 2'-O-Methyl-uridine
  modified_base 72: mod_base = OTHER; note = 2'-O-Methyl-uridine
  modified_base 74: mod_base = OTHER; note = 2'-O-Methyl-adenosine
  modified_base 75: mod_base = OTHER; note = 2'-O-Methyl-adenosine
  modified_base 76: mod_base = OTHER; note = 2'-O-Methyl-adenosine
  modified_base 77: mod_base = OTHER; note = 2'-O-Methyl-adenosine
  modified_base 78: mod_base = OTHER; note = 2'-O-Methyl-adenosine
  modified_base 79: mod_base = OTHER; note = 2'-O-Methyl-guanosine
  modified_base 80: mod_base = OTHER; note = 2'-O-Methyl-uridine
  modified_base 82: mod_base = OTHER; note = 2'-O-Methyl-guanosine
  modified_base 83: mod_base = OTHER; note = 2'-O-Methyl-cytidine
  modified_base 84: mod_base = OTHER; note = 2'-O-Methyl-adenosine
  modified_base 85: mod_base = OTHER; note = 2'-O-Methyl-cytidine
  modified_base 86: mod_base = OTHER; note = 2'-O-Methyl-cytidine
  modified_base 87: mod_base = OTHER; note = 2'-O-Methyl-guanosine
  modified_base 89: mod_base = OTHER; note = 2'-O-Methyl-guanosine
  modified_base 92: mod_base = OTHER; note = 2'-O-Methyl-guanosine
  modified_base 93: mod_base = OTHER; note = 2'-O-Methyl-guanosine
  modified_base 94: mod_base = OTHER; note = 2'-O-Methyl-uridine
  modified_base 95: mod_base = OTHER; note = 2'-O-Methyl-guanosine
  modified_base 96: mod_base = OTHER; note = 2'-O-Methyl-cytidine
  modified_base 97: mod_base = OTHER; note = 2'-O-Methyl-uridine
  modified_base 98: mod_base = OTHER; note = 2'-O-Methyl-uridine phosphorothioate
  modified_base 99: mod_base = OTHER; note = 2'-O-Methyl-uridine phosphorothioate
  modified_base 100: mod_base = OTHER; note = 2'-O-Methyl-uridine
  misc_difference 101: note = modified_base - a, c, u, g, unknown or other - a, c, g, inosine, u, deoxyadenosine, deoxyguanosine, deoxycytidine, deoxyinosine, thymine, ribonebularine, 2'-O-methylnebularine, or 2'-deoxynebularine
  misc_difference 102: note = modified_base - a, c, u, g, unknown or other - a, c, g, inosine, u, deoxyadenosine, deoxyguanosine, deoxycytidine, deoxyinosine, thymine, ribonebularine, 2'-O-methylnebularine, or 2'-deoxynebularine
  misc_difference 103: note = modified_base - a, c, u, g, unknown or other - a, c, g, inosine, u, deoxyadenosine, deoxyguanosine, deoxycytidine, deoxyinosine, thymine, ribonebularine, 2'-O-methylnebularine, or 2'-deoxynebularine

SEQ ID NO: 1889 - RNA, 103 nt, synthetic construct; identical to SEQ ID NO: 1797
  source 1..103: mol_type = other RNA; note = Description of Artificial Sequence: Synthetic polynucleotide
  modified_base 1: mod_base = OTHER; note = 2'-O-Methyl-cytidine phosphorothioate
  modified_base 2: mod_base = OTHER; note = 2'-O-Methyl-adenosine phosphorothioate
  modified_base 3: mod_base = OTHER; note = 2'-O-Methyl-guanosine
  modified_base 21: mod_base = OTHER; note = 2'-O-Methyl-guanosine
  modified_base 25: mod_base = OTHER; note = uridine phosphorothioate
  modified_base 28: mod_base = OTHER; note = 2'-O-Methyl-adenosine
  modified_base 29: mod_base = OTHER; note = 2'-O-Methyl-guanosine
  modified_base 30: mod_base = OTHER; note = 2'-O-Methyl-cytidine
  modified_base 31: mod_base = OTHER; note = 2'-O-Methyl-uridine
  modified_base 32: mod_base = OTHER; note = 2'-O-Methyl-adenosine
  modified_base 34: mod_base = OTHER; note = 2'-O-Methyl-adenosine
  modified_base 35: mod_base = OTHER; note = 2'-O-Methyl-adenosine
  modified_base 36: mod_base = OTHER; note = 2'-O-Methyl-adenosine
  modified_base 37: mod_base = OTHER; note = 2'-O-Methyl-uridine
  modified_base 38: mod_base = OTHER; note = 2'-O-Methyl-adenosine
  modified_base 39: mod_base = OTHER; note = 2'-O-Methyl-guanosine
  modified_base 40: mod_base = OTHER; note = 2'-O-Methyl-cytidine
  modified_base 41: mod_base = OTHER; note = 2'-O-Methyl-adenosine
  modified_base 42: mod_base = OTHER; note = 2'-O-Methyl-adenosine
  modified_base 45: mod_base = OTHER; note = uridine phosphorothioate
  modified_base 46: mod_base = OTHER; note = 2'-O-Methyl-adenosine
  modified_base 48: mod_base = OTHER; note = 2'-O-Methyl-adenosine
  modified_base 50: mod_base = OTHER; note = 2'-O-Methyl-uridine
  modified_base 52: mod_base = OTHER; note = 2'-O-Methyl-adenosine
  modified_base 53: mod_base = OTHER; note = 2'-O-Methyl-guanosine
  modified_base 54: mod_base = OTHER; note = 2'-O-Methyl-guanosine
  modified_base 55: mod_base = OTHER; note = 2'-O-Methyl-cytidine
  modified_base 56: mod_base = OTHER; note = 2'-O-Methyl-uridine
  modified_base 57: mod_base = OTHER; note = 2'-O-Methyl-adenosine
  modified_base 60: mod_base = OTHER; note = 2'-O-Methyl-cytidine
  modified_base 61: mod_base = OTHER; note = 2'-O-Methyl-cytidine
  modified_base 66: mod_base = OTHER; note = 2'-O-Methyl-uridine
  modified_base 67: mod_base = OTHER; note = 2'-O-Methyl-cytidine
  modified_base 70: mod_base = OTHER; note = 2'-O-Methyl-cytidine
  modified_base 71: mod_base = OTHER; note = 2'-O-Methyl-uridine
  modified_base 72: mod_base = OTHER; note = 2'-O-Methyl-uridine
  modified_base 74: mod_base = OTHER; note = 2'-O-Methyl-adenosine
  modified_base 75: mod_base = OTHER; note = 2'-O-Methyl-adenosine
  modified_base 76: mod_base = OTHER; note = 2'-O-Methyl-adenosine
  modified_base 77: mod_base = OTHER; note = 2'-O-Methyl-adenosine
  modified_base 78: mod_base = OTHER; note = 2'-O-Methyl-adenosine
  modified_base 79: mod_base = OTHER; note = 2'-O-Methyl-guanosine
  modified_base 80: mod_base = OTHER; note = 2'-O-Methyl-uridine
  modified_base 81: mod_base = OTHER; note = 2'-O-Methyl-guanosine
  modified_base 83: mod_base = OTHER; note = 2'-O-Methyl-cytidine
  modified_base 84: mod_base = OTHER; note = 2'-O-Methyl-adenosine
  modified_base 85: mod_base = OTHER; note = 2'-O-Methyl-cytidine
  modified_base 86: mod_base = OTHER; note = 2'-O-Methyl-cytidine
  modified_base 87: mod_base = OTHER; note = 2'-O-Methyl-guanosine
  modified_base 88: mod_base = OTHER; note = 2'-O-Methyl-adenosine
  modified_base 89: mod_base = OTHER; note = 2'-O-Methyl-guanosine
  modified_base 90: mod_base = OTHER; note = 2'-O-Methyl-uridine
  modified_base 91: mod_base = OTHER; note = 2'-O-Methyl-cytidine
  modified_base 92: mod_base = OTHER; note = 2'-O-Methyl-guanosine
  modified_base 93: mod_base = OTHER; note = 2'-O-Methyl-guanosine
  modified_base 94: mod_base = OTHER; note = 2'-O-Methyl-uridine
  modified_base 95: mod_base = OTHER; note = 2'-O-Methyl-guanosine
  modified_base 96: mod_base = OTHER; note = 2'-O-Methyl-cytidine
  modified_base 97: mod_base = OTHER; note = 2'-O-Methyl-uridine
  modified_base 98: mod_base = OTHER; note = 2'-O-Methyl-uridine phosphorothioate
  modified_base 99: mod_base = OTHER; note = 2'-O-Methyl-uridine phosphorothioate
  modified_base 100: mod_base = OTHER; note = 2'-O-Methyl-uridine
  misc_difference 101: note = modified_base - a, c, u, g, unknown or other - a, c, g, inosine, u, deoxyadenosine, deoxyguanosine, deoxycytidine, deoxyinosine, thymine, ribonebularine, 2'-O-methylnebularine, or 2'-deoxynebularine
  misc_difference 102: note = modified_base - a, c, u, g, unknown or other - a, c, g, inosine, u, deoxyadenosine, deoxyguanosine, deoxycytidine, deoxyinosine, thymine, ribonebularine, 2'-O-methylnebularine, or 2'-deoxynebularine
  misc_difference 103: note = modified_base - a, c, u, g, unknown or other - a, c, g, inosine, u, deoxyadenosine, deoxyguanosine, deoxycytidine, deoxyinosine, thymine, ribonebularine, 2'-O-methylnebularine, or 2'-deoxynebularine

SEQ ID NO: 1890 - RNA, 103 nt, synthetic construct; identical to SEQ ID NO: 1795
  source 1..103: mol_type = other RNA; note = Description of Artificial Sequence: Synthetic polynucleotide
  modified_base 1: mod_base = OTHER; note = 2'-O-Methyl-cytidine phosphorothioate
  modified_base 2: mod_base = OTHER; note = 2'-O-Methyl-cytidine phosphorothioate
  modified_base 3: mod_base = OTHER; note = 2'-O-Methyl-cytidine
  modified_base 21: mod_base = OTHER; note = 2'-O-Methyl-guanosine
  modified_base 25: mod_base = OTHER; note = uridine phosphorothioate
  modified_base 28: mod_base = OTHER; note = 2'-O-Methyl-adenosine
  modified_base 29: mod_base = OTHER; note = 2'-O-Methyl-guanosine
  modified_base 30: mod_base = OTHER; note = 2'-O-Methyl-cytidine
  modified_base 31: mod_base = OTHER; note = 2'-O-Methyl-uridine
  modified_base 32: mod_base = OTHER; note = 2'-O-Methyl-adenosine
  modified_base 34: mod_base = OTHER; note = 2'-O-Methyl-adenosine
  modified_base 35: mod_base = OTHER; note = 2'-O-Methyl-adenosine
  modified_base 36: mod_base = OTHER; note = 2'-O-Methyl-adenosine
  modified_base 37: mod_base = OTHER; note = 2'-O-Methyl-uridine
  modified_base 38: mod_base = OTHER; note = 2'-O-Methyl-adenosine
  modified_base 39: mod_base = OTHER; note = 2'-O-Methyl-guanosine
  modified_base 40: mod_base = OTHER; note = 2'-O-Methyl-cytidine
  modified_base 41: mod_base = OTHER; note = 2'-O-Methyl-adenosine
  modified_base 42: mod_base = OTHER; note = 2'-O-Methyl-adenosine
  modified_base 46: mod_base = OTHER; note = 2'-O-Methyl-adenosine
  modified_base 48: mod_base = OTHER; note = 2'-O-Methyl-adenosine
  modified_base 50: mod_base = OTHER; note = 2'-O-Methyl-uridine
  modified_base 52: mod_base = OTHER; note = 2'-O-Methyl-adenosine
  modified_base 53: mod_base = OTHER; note = 2'-O-Methyl-guanosine
  modified_base 54: mod_base = OTHER; note = 2'-O-Methyl-guanosine
  modified_base 57: mod_base = OTHER; note = 2'-O-Methyl-adenosine
  modified_base 61: mod_base = OTHER; note = 2'-O-Methyl-cytidine
  modified_base 64: mod_base = OTHER; note = uridine phosphorothioate
  modified_base 66: mod_base = OTHER; note = 2'-O-Methyl-uridine
  modified_base 67: mod_base = OTHER; note = 2'-O-Methyl-cytidine
  modified_base 70: mod_base = OTHER; note = 2'-O-Methyl-cytidine
  modified_base 71: mod_base = OTHER; note = 2'-O-Methyl-uridine
  modified_base 72: mod_base = OTHER; note = 2'-O-Methyl-uridine
  modified_base 74: mod_base = OTHER; note = 2'-O-Methyl-adenosine
  modified_base 75: mod_base = OTHER; note = 2'-O-Methyl-adenosine
  modified_base 76: mod_base = OTHER; note = 2'-O-Methyl-adenosine
  modified_base 77: mod_base = OTHER; note = 2'-O-Methyl-adenosine
  modified_base 78: mod_base = OTHER; note = 2'-O-Methyl-adenosine
  modified_base 79: mod_base = OTHER; note = 2'-O-Methyl-guanosine
  modified_base 80: mod_base = OTHER; note = 2'-O-Methyl-uridine
  modified_base 82: mod_base = OTHER; note = 2'-O-Methyl-guanosine
  modified_base 83: mod_base = OTHER; note = 2'-O-Methyl-cytidine
  modified_base 84: mod_base = OTHER; note = 2'-O-Methyl-adenosine
  modified_base 85: mod_base = OTHER; note = 2'-O-Methyl-cytidine
  modified_base 86: mod_base = OTHER; note = 2'-O-Methyl-cytidine
  modified_base 87: mod_base = OTHER; note = 2'-O-Methyl-guanosine
  modified_base 89: mod_base = OTHER; note = 2'-O-Methyl-guanosine
  modified_base 92: mod_base = OTHER; note = 2'-O-Methyl-guanosine
  modified_base 93: mod_base = OTHER; note = 2'-O-Methyl-guanosine
  modified_base 94: mod_base = OTHER; note = 2'-O-Methyl-uridine
  modified_base 95: mod_base = OTHER; note = 2'-O-Methyl-guanosine
  modified_base 96: mod_base = OTHER; note = 2'-O-Methyl-cytidine
  modified_base 97: mod_base = OTHER; note = 2'-O-Methyl-uridine
  modified_base 98: mod_base = OTHER; note = 2'-O-Methyl-uridine phosphorothioate
  modified_base 99: mod_base = OTHER; note = 2'-O-Methyl-uridine phosphorothioate
  modified_base 100: mod_base = OTHER; note = 2'-O-Methyl-uridine
  misc_difference 101: note = modified_base - a, c, u, g, unknown or other - a, c, g, inosine, u, deoxyadenosine, deoxyguanosine, deoxycytidine, deoxyinosine, thymine, ribonebularine, 2'-O-methylnebularine, or 2'-deoxynebularine
  misc_difference 102: note = modified_base - a, c, u, g, unknown or other - a, c, g, inosine, u, deoxyadenosine, deoxyguanosine, deoxycytidine, deoxyinosine, thymine, ribonebularine, 2'-O-methylnebularine, or 2'-deoxynebularine
  misc_difference 103: note = modified_base - a, c, u, g, unknown or other - a, c, g, inosine, u, deoxyadenosine, deoxyguanosine, deoxycytidine, deoxyinosine, thymine, ribonebularine, 2'-O-methylnebularine, or 2'-deoxynebularine

SEQ ID NO: 1891 - RNA, 103 nt, synthetic construct; identical to SEQ ID NO: 1796
  source 1..103: mol_type = other RNA; note = Description of Artificial Sequence: Synthetic polynucleotide
  modified_base 1: mod_base = OTHER; note = 2'-O-Methyl-guanosine phosphorothioate
  modified_base 2: mod_base = OTHER; note = 2'-O-Methyl-adenosine phosphorothioate
  modified_base 3: mod_base = OTHER; note = 2'-O-Methyl-guanosine
  modified_base 21: mod_base = OTHER; note = 2'-O-Methyl-guanosine
  modified_base 25: mod_base = OTHER; note = uridine phosphorothioate
  modified_base 28: mod_base = OTHER; note = 2'-O-Methyl-adenosine
  modified_base 29: mod_base = OTHER; note = 2'-O-Methyl-guanosine
  modified_base 30: mod_base = OTHER; note = 2'-O-Methyl-cytidine
  modified_base 31: mod_base = OTHER; note = 2'-O-Methyl-uridine
  modified_base 32: mod_base = OTHER; note = 2'-O-Methyl-adenosine
  modified_base 34: mod_base = OTHER; note = 2'-O-Methyl-adenosine
  modified_base 35: mod_base = OTHER; note = 2'-O-Methyl-adenosine
  modified_base 36: mod_base = OTHER; note = 2'-O-Methyl-adenosine
  modified_base 37: mod_base = OTHER; note = 2'-O-Methyl-uridine
  modified_base 38: mod_base = OTHER; note = 2'-O-Methyl-adenosine
  modified_base 39: mod_base = OTHER; note = 2'-O-Methyl-guanosine
  modified_base 40: mod_base = OTHER; note = 2'-O-Methyl-cytidine
  modified_base 41: mod_base = OTHER; note = 2'-O-Methyl-adenosine
  modified_base 42: mod_base = OTHER; note = 2'-O-Methyl-adenosine
  modified_base 46: mod_base = OTHER; note = 2'-O-Methyl-adenosine
  modified_base 48: mod_base = OTHER; note = 2'-O-Methyl-adenosine
  modified_base 50: mod_base = OTHER; note = 2'-O-Methyl-uridine
  modified_base 52: mod_base = OTHER; note = 2'-O-Methyl-adenosine
  modified_base 53: mod_base = OTHER; note = 2'-O-Methyl-guanosine
  modified_base 54: mod_base = OTHER; note = 2'-O-Methyl-guanosine
  modified_base 57: mod_base = OTHER; note = 2'-O-Methyl-adenosine
  modified_base 61: mod_base = OTHER; note = 2'-O-Methyl-cytidine
  modified_base 64: mod_base = OTHER; note = uridine phosphorothioate
  modified_base 66: mod_base = OTHER; note = 2'-O-Methyl-uridine
  modified_base 67: mod_base = OTHER; note = 2'-O-Methyl-cytidine
  modified_base 70: mod_base = OTHER; note = 2'-O-Methyl-cytidine
  modified_base 71: mod_base = OTHER; note = 2'-O-Methyl-uridine
  modified_base 72: mod_base = OTHER; note = 2'-O-Methyl-uridine
  modified_base 74: mod_base = OTHER; note = 2'-O-Methyl-adenosine
  modified_base 75: mod_base = OTHER; note = 2'-O-Methyl-adenosine
  modified_base 76: mod_base = OTHER; note = 2'-O-Methyl-adenosine
  modified_base 77: mod_base = OTHER; note = 2'-O-Methyl-adenosine
  modified_base 78: mod_base = OTHER; note = 2'-O-Methyl-adenosine
  modified_base 79: mod_base = OTHER; note = 2'-O-Methyl-guanosine
  modified_base 80: mod_base = OTHER; note = 2'-O-Methyl-uridine
  modified_base 82: mod_base = OTHER; note = 2'-O-Methyl-guanosine
  modified_base 83: mod_base = OTHER; note = 2'-O-Methyl-cytidine
  modified_base 84: mod_base = OTHER; note = 2'-O-Methyl-adenosine
  modified_base 85: mod_base = OTHER; note = 2'-O-Methyl-cytidine
  modified_base 86: mod_base = OTHER; note = 2'-O-Methyl-cytidine
  modified_base 87: mod_base = OTHER; note = 2'-O-Methyl-guanosine
  modified_base 89: mod_base = OTHER; note = 2'-O-Methyl-guanosine
  modified_base 92: mod_base = OTHER; note = 2'-O-Methyl-guanosine
  modified_base 93: mod_base = OTHER; note = 2'-O-Methyl-guanosine
  modified_base 94: mod_base = OTHER; note = 2'-O-Methyl-uridine
  modified_base 95: mod_base = OTHER; note = 2'-O-Methyl-guanosine
  modified_base 96: mod_base = OTHER; note = 2'-O-Methyl-cytidine
  modified_base 97: mod_base = OTHER; note = 2'-O-Methyl-uridine
  modified_base 98: mod_base = OTHER; note = 2'-O-Methyl-uridine phosphorothioate
  modified_base 99: mod_base = OTHER; note = 2'-O-Methyl-uridine phosphorothioate
  modified_base 100: mod_base = OTHER; note = 2'-O-Methyl-uridine
  misc_difference 101: note = modified_base - a, c, u, g, unknown or other - a, c, g, inosine, u, deoxyadenosine, deoxyguanosine, deoxycytidine, deoxyinosine, thymine, ribonebularine, 2'-O-methylnebularine, or 2'-deoxynebularine
  misc_difference 102: note = modified_base - a, c, u, g, unknown or other - a, c, g, inosine, u, deoxyadenosine, deoxyguanosine, deoxycytidine, deoxyinosine, thymine, ribonebularine, 2'-O-methylnebularine, or 2'-deoxynebularine
  misc_difference 103: note = modified_base - a, c, u, g, unknown or other - a, c, g, inosine, u, deoxyadenosine, deoxyguanosine, deoxycytidine, deoxyinosine, thymine, ribonebularine, 2'-O-methylnebularine, or 2'-deoxynebularine

SEQ ID NO: 1892 - RNA, 103 nt, synthetic construct; identical to SEQ ID NO: 1797
  source 1..103: mol_type = other RNA; note = Description of Artificial Sequence: Synthetic polynucleotide
  modified_base 1: mod_base = OTHER; note = 2'-O-Methyl-cytidine phosphorothioate
  modified_base 2: mod_base = OTHER; note = 2'-O-Methyl-adenosine phosphorothioate
  modified_base 3: mod_base = OTHER; note = 2'-O-Methyl-guanosine
  modified_base 21: mod_base = OTHER; note = 2'-O-Methyl-guanosine
  modified_base 25: mod_base = OTHER; note = uridine phosphorothioate
  modified_base 28: mod_base = OTHER; note = 2'-O-Methyl-adenosine
  modified_base 29: mod_base = OTHER; note = 2'-O-Methyl-guanosine
  modified_base 30: mod_base = OTHER; note = 2'-O-Methyl-cytidine
  modified_base 31: mod_base = OTHER; note = 2'-O-Methyl-uridine
  modified_base 32: mod_base = OTHER; note = 2'-O-Methyl-adenosine
  modified_base 34: mod_base = OTHER; note = 2'-O-Methyl-adenosine
  modified_base 35: mod_base = OTHER; note = 2'-O-Methyl-adenosine
  modified_base 36: mod_base = OTHER; note = 2'-O-Methyl-adenosine
  modified_base 37: mod_base = OTHER; note = 2'-O-Methyl-uridine
  modified_base 38: mod_base = OTHER; note = 2'-O-Methyl-adenosine
  modified_base 39: mod_base = OTHER; note = 2'-O-Methyl-guanosine
  modified_base 40: mod_base = OTHER; note = 2'-O-Methyl-cytidine
  modified_base 41: mod_base = OTHER; note = 2'-O-Methyl-adenosine
  modified_base 42: mod_base = OTHER; note = 2'-O-Methyl-adenosine
  modified_base 46: mod_base = OTHER; note = 2'-O-Methyl-adenosine
  modified_base 48: mod_base = OTHER; note = 2'-O-Methyl-adenosine
  modified_base 50: mod_base = OTHER; note = 2'-O-Methyl-uridine
  modified_base 52: mod_base = OTHER; note = 2'-O-Methyl-adenosine
  modified_base 53: mod_base = OTHER; note = 2'-O-Methyl-guanosine
  modified_base 54: mod_base = OTHER; note = 2'-O-Methyl-guanosine
  modified_base 55: mod_base = OTHER; note = 2'-O-Methyl-cytidine
  modified_base 56: mod_base = OTHER; note = 2'-O-Methyl-uridine
  modified_base 57: mod_base = OTHER; note = 2'-O-Methyl-adenosine
  modified_base 60: mod_base = OTHER; note = 2'-O-Methyl-cytidine
  modified_base 61: mod_base = OTHER; note = 2'-O-Methyl-cytidine
  modified_base 64: mod_base = OTHER; note = uridine phosphorothioate
  modified_base 66: mod_base = OTHER; note = 2'-O-Methyl-uridine
  modified_base 67: mod_base = OTHER; note = 2'-O-Methyl-cytidine
  modified_base 70: mod_base = OTHER; note = 2'-O-Methyl-cytidine
  modified_base 71: mod_base = OTHER; note = 2'-O-Methyl-uridine
  modified_base 72: mod_base = OTHER; note = 2'-O-Methyl-uridine
  modified_base 74: mod_base = OTHER; note = 2'-O-Methyl-adenosine
  modified_base 75: mod_base = OTHER; note = 2'-O-Methyl-adenosine
  modified_base 76: mod_base = OTHER; note = 2'-O-Methyl-adenosine
  modified_base 77: mod_base = OTHER; note = 2'-O-Methyl-adenosine
  modified_base 78: mod_base = OTHER; note = 2'-O-Methyl-adenosine
  modified_base 79: mod_base = OTHER; note = 2'-O-Methyl-guanosine
  modified_base 80: mod_base = OTHER; note = 2'-O-Methyl-uridine
  modified_base 81: mod_base = OTHER; note = 2'-O-Methyl-guanosine
  modified_base 83: mod_base = OTHER; note = 2'-O-Methyl-cytidine
  modified_base 84: mod_base = OTHER; note = 2'-O-Methyl-adenosine
  modified_base 85: mod_base = OTHER; note = 2'-O-Methyl-cytidine
  modified_base 86: mod_base = OTHER; note = 2'-O-Methyl-cytidine
  modified_base 87: mod_base = OTHER; note = 2'-O-Methyl-guanosine
  modified_base 88: mod_base = OTHER; note = 2'-O-Methyl-adenosine
  modified_base 89: mod_base = OTHER; note = 2'-O-Methyl-guanosine
  modified_base 90: mod_base = OTHER; note = 2'-O-Methyl-uridine
  modified_base 91: mod_base = OTHER; note = 2'-O-Methyl-cytidine
  modified_base 92: mod_base = OTHER; note = 2'-O-Methyl-guanosine
  modified_base 93: mod_base = OTHER; note = 2'-O-Methyl-guanosine
  modified_base 94: mod_base = OTHER; note = 2'-O-Methyl-uridine
  modified_base 95: mod_base = OTHER; note = 2'-O-Methyl-guanosine
  modified_base 96: mod_base = OTHER; note = 2'-O-Methyl-cytidine
  modified_base 97: mod_base = OTHER; note = 2'-O-Methyl-uridine
  modified_base 98: mod_base = OTHER; note = 2'-O-Methyl-uridine phosphorothioate
  modified_base 99: mod_base = OTHER; note = 2'-O-Methyl-uridine phosphorothioate
  modified_base 100: mod_base = OTHER; note = 2'-O-Methyl-uridine
  misc_difference 101: note = modified_base - a, c, u, g, unknown or other - a, c, g, inosine, u, deoxyadenosine, deoxyguanosine, deoxycytidine, deoxyinosine, thymine, ribonebularine, 2'-O-methylnebularine, or 2'-deoxynebularine
  misc_difference 102: note = modified_base - a, c, u, g, unknown or other - a, c, g, inosine, u, deoxyadenosine, deoxyguanosine, deoxycytidine, deoxyinosine, thymine, ribonebularine, 2'-O-methylnebularine, or 2'-deoxynebularine
  misc_difference 103: note = modified_base - a, c, u, g, unknown or other - a, c, g, inosine, u, deoxyadenosine, deoxyguanosine, deoxycytidine, deoxyinosine, thymine, ribonebularine, 2'-O-methylnebularine, or 2'-deoxynebularine

SEQ ID NO: 1893 - RNA, 103 nt, synthetic construct; identical to SEQ ID NO: 1795
  source 1..103: mol_type = other RNA; note = Description of Artificial Sequence: Synthetic polynucleotide
  modified_base 1: mod_base = OTHER; note = 2'-O-Methyl-cytidine phosphorothioate
  modified_base 2: mod_base = OTHER; note = 2'-O-Methyl-cytidine phosphorothioate
  modified_base 3: mod_base = OTHER; note = 2'-O-Methyl-cytidine
  modified_base 21: mod_base = OTHER; note = 2'-O-Methyl-guanosine
  modified_base 25: mod_base = OTHER; note = uridine phosphorothioate
  modified_base 28: mod_base = OTHER; note = 2'-O-Methyl-adenosine
  modified_base 29: mod_base = OTHER; note = 2'-O-Methyl-guanosine
  modified_base 30: mod_base = OTHER; note = 2'-O-Methyl-cytidine
  modified_base 31: mod_base = OTHER; note = 2'-O-Methyl-uridine
  modified_base 32: mod_base = OTHER; note = 2'-O-Methyl-adenosine
  modified_base 34: mod_base = OTHER; note = 2'-O-Methyl-adenosine
  modified_base 35: mod_base = OTHER; note = 2'-O-Methyl-adenosine
  modified_base 36: mod_base = OTHER; note = 2'-O-Methyl-adenosine
  modified_base 37: mod_base = OTHER; note = 2'-O-Methyl-uridine
  modified_base 38: mod_base = OTHER; note = 2'-O-Methyl-adenosine
  modified_base 39: mod_base = OTHER; note = 2'-O-Methyl-guanosine
  modified_base 40: mod_base = OTHER; note = 2'-O-Methyl-cytidine
  modified_base 41: mod_base = OTHER; note = 2'-O-Methyl-adenosine
  modified_base 42: mod_base = OTHER; note = 2'-O-Methyl-adenosine
  modified_base 45: mod_base = OTHER; note = uridine phosphorothioate
  modified_base 46: mod_base = OTHER; note = 2'-O-Methyl-adenosine
  modified_base 48: mod_base = OTHER; note = 2'-O-Methyl-adenosine
  modified_base 50: mod_base = OTHER; note = 2'-O-Methyl-uridine
  modified_base 52: mod_base = OTHER; note = 2'-O-Methyl-adenosine
  modified_base 53: mod_base = OTHER; note = 2'-O-Methyl-guanosine
  modified_base 54: mod_base = OTHER; note = 2'-O-Methyl-guanosine
  modified_base 57: mod_base = OTHER; note = 2'-O-Methyl-adenosine
  modified_base 61: mod_base = OTHER; note = 2'-O-Methyl-cytidine
  modified_base 64: mod_base = OTHER; note = uridine phosphorothioate
  modified_base 66: mod_base = OTHER; note = 2'-O-Methyl-uridine
  modified_base 67: mod_base = OTHER; note = 2'-O-Methyl-cytidine
  modified_base 70: mod_base = OTHER; note = 2'-O-Methyl-cytidine
  modified_base 71: mod_base = OTHER; note = 2'-O-Methyl-uridine
  modified_base 72: mod_base = OTHER; note = 2'-O-Methyl-uridine
  modified_base 74: mod_base = OTHER; note = 2'-O-Methyl-adenosine
  modified_base 75: mod_base = OTHER; note = 2'-O-Methyl-adenosine
  modified_base 76: mod_base = OTHER; note = 2'-O-Methyl-adenosine
  modified_base 77: mod_base = OTHER; note = 2'-O-Methyl-adenosine
  modified_base 78: mod_base = OTHER; note = 2'-O-Methyl-adenosine
  modified_base 79: mod_base = OTHER; note = 2'-O-Methyl-guanosine
  modified_base 80: mod_base = OTHER; note = 2'-O-Methyl-uridine
  modified_base 82: mod_base = OTHER; note = 2'-O-Methyl-guanosine
  modified_base 83: mod_base = OTHER; note = 2'-O-Methyl-cytidine
  modified_base 84: mod_base = OTHER; note = 2'-O-Methyl-adenosine
  modified_base 85: mod_base = OTHER; note = 2'-O-Methyl-cytidine
  modified_base 86: mod_base = OTHER; note = 2'-O-Methyl-cytidine
  modified_base 87: mod_base = OTHER; note = 2'-O-Methyl-guanosine
  modified_base 89: mod_base = OTHER; note = 2'-O-Methyl-guanosine
  modified_base 92: mod_base = OTHER; note = 2'-O-Methyl-guanosine
  modified_base 93: mod_base = OTHER; note = 2'-O-Methyl-guanosine
  modified_base 94: mod_base = OTHER; note = 2'-O-Methyl-uridine
  modified_base 95: mod_base = OTHER; note = 2'-O-Methyl-guanosine
  modified_base 96: mod_base = OTHER; note = 2'-O-Methyl-cytidine
  modified_base 97: mod_base = OTHER; note = 2'-O-Methyl-uridine
  modified_base 98: mod_base = OTHER; note = 2'-O-Methyl-uridine phosphorothioate
  modified_base 99: mod_base = OTHER; note = 2'-O-Methyl-uridine phosphorothioate
  modified_base 100: mod_base = OTHER; note = 2'-O-Methyl-uridine
  misc_difference 101: note = modified_base - a, c, u, g, unknown or other - a, c, g, inosine, u, deoxyadenosine, deoxyguanosine, deoxycytidine, deoxyinosine, thymine, ribonebularine, 2'-O-methylnebularine, or 2'-deoxynebularine
  misc_difference 102: note = modified_base - a, c, u, g, unknown or other - a, c, g, inosine, u, deoxyadenosine, deoxyguanosine, deoxycytidine, deoxyinosine, thymine, ribonebularine, 2'-O-methylnebularine, or 2'-deoxynebularine
  misc_difference 103: note = modified_base - a, c, u, g, unknown or other - a, c, g, inosine, u, deoxyadenosine, deoxyguanosine, deoxycytidine, deoxyinosine, thymine, ribonebularine, 2'-O-methylnebularine, or 2'-deoxynebularine

SEQ ID NO: 1894 - RNA, 103 nt, synthetic construct; identical to SEQ ID NO: 1796
  source 1..103: mol_type = other RNA; note = Description of Artificial Sequence: Synthetic polynucleotide
  modified_base 1: mod_base = OTHER; note = 2'-O-Methyl-guanosine phosphorothioate
  modified_base 2: mod_base = OTHER; note = 2'-O-Methyl-adenosine phosphorothioate
  modified_base 3: mod_base = OTHER; note = 2'-O-Methyl-guanosine
  modified_base 21: mod_base = OTHER; note = 2'-O-Methyl-guanosine
  modified_base 25: mod_base = OTHER; note = uridine phosphorothioate
  modified_base 28: mod_base = OTHER; note = 2'-O-Methyl-adenosine
  modified_base 29: mod_base = OTHER; note = 2'-O-Methyl-guanosine
  modified_base 30: mod_base = OTHER; note = 2'-O-Methyl-cytidine
  modified_base 31: mod_base = OTHER; note = 2'-O-Methyl-uridine
  modified_base 32: mod_base = OTHER; note = 2'-O-Methyl-adenosine
  modified_base 34: mod_base = OTHER; note = 2'-O-Methyl-adenosine
  modified_base 35: mod_base = OTHER; note = 2'-O-Methyl-adenosine
  modified_base 36: mod_base = OTHER; note = 2'-O-Methyl-adenosine
  modified_base 37: mod_base = OTHER; note = 2'-O-Methyl-uridine
  modified_base 38: mod_base = OTHER; note = 2'-O-Methyl-adenosine
  modified_base 39: mod_base = OTHER; note = 2'-O-Methyl-guanosine
  modified_base 40: mod_base = OTHER; note = 2'-O-Methyl-cytidine
  modified_base 41: mod_base = OTHER; note = 2'-O-Methyl-adenosine
  modified_base 42: mod_base = OTHER; note = 2'-O-Methyl-adenosine
  modified_base 45: mod_base = OTHER; note = uridine phosphorothioate
  modified_base 46: mod_base = OTHER; note = 2'-O-Methyl-adenosine
  modified_base 48: mod_base = OTHER; note = 2'-O-Methyl-adenosine
  modified_base 50: mod_base = OTHER; note = 2'-O-Methyl-uridine
  modified_base 52: mod_base = OTHER; note = 2'-O-Methyl-adenosine
  modified_base 53: mod_base = OTHER; note = 2'-O-Methyl-guanosine
  modified_base 54: mod_base = OTHER; note = 2'-O-Methyl-guanosine
  modified_base 57: mod_base = OTHER; note = 2'-O-Methyl-adenosine
  modified_base 61: mod_base = OTHER; note = 2'-O-Methyl-cytidine
  modified_base 64: mod_base = OTHER; note = uridine phosphorothioate
  modified_base 66: mod_base = OTHER; note = 2'-O-Methyl-uridine
  modified_base 67: mod_base = OTHER; note = 2'-O-Methyl-cytidine
  modified_base 70: mod_base = OTHER; note = 2'-O-Methyl-cytidine
  modified_base 71: mod_base = OTHER; note = 2'-O-Methyl-uridine
  modified_base 72: mod_base = OTHER; note = 2'-O-Methyl-uridine
  modified_base 74: mod_base = OTHER; note = 2'-O-Methyl-adenosine
  modified_base 75: mod_base = OTHER; note = 2'-O-Methyl-adenosine
  modified_base 76: mod_base = OTHER; note = 2'-O-Methyl-adenosine
  modified_base 77: mod_base = OTHER; note = 2'-O-Methyl-adenosine
  modified_base 78: mod_base = OTHER; note = 2'-O-Methyl-adenosine
  modified_base 79: mod_base = OTHER; note = 2'-O-Methyl-guanosine
  modified_base 80: mod_base = OTHER; note = 2'-O-Methyl-uridine
  modified_base 82: mod_base = OTHER; note = 2'-O-Methyl-guanosine
  modified_base 83: mod_base = OTHER; note = 2'-O-Methyl-cytidine
  modified_base 84: mod_base = OTHER; note = 2'-O-Methyl-adenosine
  modified_base 85: mod_base = OTHER; note = 2'-O-Methyl-cytidine
  modified_base 86: mod_base = OTHER; note = 2'-O-Methyl-cytidine
  modified_base 87: mod_base = OTHER; note = 2'-O-Methyl-guanosine
  modified_base 89: mod_base = OTHER; note = 2'-O-Methyl-guanosine
  modified_base 92: mod_base = OTHER; note = 2'-O-Methyl-guanosine
  modified_base 93: mod_base = OTHER; note = 2'-O-Methyl-guanosine
  modified_base 94: mod_base = OTHER; note = 2'-O-Methyl-uridine
  modified_base 95: mod_base = OTHER; note = 2'-O-Methyl-guanosine
  modified_base 96: mod_base = OTHER; note = 2'-O-Methyl-cytidine
  modified_base 97: mod_base = OTHER; note = 2'-O-Methyl-uridine
  modified_base 98: mod_base = OTHER; note = 2'-O-Methyl-uridine phosphorothioate
  modified_base 99: mod_base = OTHER; note = 2'-O-Methyl-uridine phosphorothioate
  modified_base 100: mod_base = OTHER; note = 2'-O-Methyl-uridine
  misc_difference 101: note = modified_base - a, c, u, g, unknown or other - a, c, g, inosine, u, deoxyadenosine, deoxyguanosine, deoxycytidine, deoxyinosine, thymine, ribonebularine, 2'-O-methylnebularine, or 2'-deoxynebularine
  misc_difference 102: note = modified_base - a, c, u, g, unknown or other - a, c, g, inosine, u, deoxyadenosine, deoxyguanosine, deoxycytidine, deoxyinosine, thymine, ribonebularine, 2'-O-methylnebularine, or 2'-deoxynebularine
  misc_difference 103: note = modified_base - a, c, u, g, unknown or other - a, c, g, inosine, u, deoxyadenosine, deoxyguanosine, deoxycytidine, deoxyinosine, thymine, ribonebularine, 2'-O-methylnebularine, or 2'-deoxynebularine

SEQ ID NO: 1895 - RNA, 103 nt, synthetic construct; identical to SEQ ID NO: 1797
  source 1..103: mol_type = other RNA; note = Description of Artificial Sequence: Synthetic polynucleotide
  modified_base 1: mod_base = OTHER; note = 2'-O-Methyl-cytidine phosphorothioate
  modified_base 2: mod_base = OTHER; note = 2'-O-Methyl-adenosine phosphorothioate
  modified_base 3: mod_base = OTHER; note = 2'-O-Methyl-guanosine
  modified_base 21: mod_base = OTHER; note = 2'-O-Methyl-guanosine
  modified_base 25: mod_base = OTHER; note = uridine phosphorothioate
  modified_base 28: mod_base = OTHER; note = 2'-O-Methyl-adenosine
  modified_base 29: mod_base = OTHER; note = 2'-O-Methyl-guanosine
  modified_base 30: mod_base = OTHER; note = 2'-O-Methyl-cytidine
  modified_base 31: mod_base = OTHER; note = 2'-O-Methyl-uridine
  modified_base 32: mod_base = OTHER; note = 2'-O-Methyl-adenosine
  modified_base 34: mod_base = OTHER; note = 2'-O-Methyl-adenosine
  modified_base 35: mod_base = OTHER; note = 2'-O-Methyl-adenosine
  modified_base 36: mod_base = OTHER; note = 2'-O-Methyl-adenosine
  modified_base 37: mod_base = OTHER; note = 2'-O-Methyl-uridine
  modified_base 38: mod_base = OTHER; note = 2'-O-Methyl-adenosine
  modified_base 39: mod_base = OTHER; note = 2'-O-Methyl-guanosine
  modified_base 40: mod_base = OTHER; note = 2'-O-Methyl-cytidine
  modified_base 41: mod_base = OTHER; note = 2'-O-Methyl-adenosine
  modified_base 42: mod_base = OTHER; note = 2'-O-Methyl-adenosine
  modified_base 45: mod_base = OTHER; note = uridine phosphorothioate
  modified_base 46: mod_base = OTHER; note = 2'-O-Methyl-adenosine
  modified_base 48: mod_base = OTHER; note = 2'-O-Methyl-adenosine
  modified_base 50: mod_base = OTHER; note = 2'-O-Methyl-uridine
  modified_base 52: mod_base = OTHER; note = 2'-O-Methyl-adenosine
  modified_base 53: mod_base = OTHER; note = 2'-O-Methyl-guanosine
  modified_base 54: mod_base = OTHER; note = 2'-O-Methyl-guanosine
  modified_base 55: mod_base = OTHER; note = 2'-O-Methyl-cytidine
  modified_base 56: mod_base = OTHER; note = 2'-O-Methyl-uridine
  modified_base 57: mod_base = OTHER; note = 2'-O-Methyl-adenosine
  modified_base 60: mod_base = OTHER; note = 2'-O-Methyl-cytidine
  modified_base 61: mod_base = OTHER; note = 2'-O-Methyl-cytidine
  modified_base 64: mod_base = OTHER; note = uridine phosphorothioate
  modified_base 66: mod_base = OTHER; note = 2'-O-Methyl-uridine
  modified_base 67: mod_base = OTHER; note = 2'-O-Methyl-cytidine
  modified_base 70: mod_base = OTHER; note = 2'-O-Methyl-cytidine
  modified_base 71: mod_base = OTHER; note = 2'-O-Methyl-uridine
  modified_base 72: mod_base = OTHER; note = 2'-O-Methyl-uridine
  modified_base 74: mod_base = OTHER; note = 2'-O-Methyl-adenosine
  modified_base 75: mod_base = OTHER; note = 2'-O-Methyl-adenosine
  modified_base 76: mod_base = OTHER; note = 2'-O-Methyl-adenosine
  modified_base 77: mod_base = OTHER; note = 2'-O-Methyl-adenosine
  modified_base 78: mod_base = OTHER; note = 2'-O-Methyl-adenosine
  modified_base 79: mod_base = OTHER; note = 2'-O-Methyl-guanosine
  modified_base 80: mod_base = OTHER; note = 2'-O-Methyl-uridine
  modified_base 81: mod_base = OTHER; note = 2'-O-Methyl-guanosine
  modified_base 83: mod_base = OTHER; note = 2'-O-Methyl-cytidine
  modified_base 84: mod_base = OTHER; note = 2'-O-Methyl-adenosine
  modified_base 85: mod_base = OTHER; note = 2'-O-Methyl-cytidine
  modified_base 86: mod_base = OTHER; note = 2'-O-Methyl-cytidine
  modified_base 87: mod_base = OTHER; note = 2'-O-Methyl-guanosine
  modified_base 88: mod_base = OTHER; note = 2'-O-Methyl-adenosine
  modified_base 89: mod_base = OTHER; note = 2'-O-Methyl-guanosine
  modified_base 90: mod_base = OTHER; note = 2'-O-Methyl-uridine
  modified_base 91: mod_base = OTHER; note = 2'-O-Methyl-cytidine
  modified_base 92: mod_base = OTHER; note = 2'-O-Methyl-guanosine
  modified_base 93: mod_base = OTHER; note = 2'-O-Methyl-guanosine
  modified_base 94: mod_base = OTHER; note = 2'-O-Methyl-uridine
  modified_base 95: mod_base = OTHER; note = 2'-O-Methyl-guanosine
  modified_base 96: mod_base = OTHER; note = 2'-O-Methyl-cytidine
  modified_base 97: mod_base = OTHER; note = 2'-O-Methyl-uridine
  modified_base 98: mod_base = OTHER; note = 2'-O-Methyl-uridine phosphorothioate
  modified_base 99: mod_base = OTHER; note = 2'-O-Methyl-uridine phosphorothioate
  modified_base 100: mod_base = OTHER; note = 2'-O-Methyl-uridine
  misc_difference 101: note = modified_base - a, c, u, g, unknown or other - a, c, g, inosine, u, deoxyadenosine, deoxyguanosine, deoxycytidine, deoxyinosine, thymine, ribonebularine, 2'-O-methylnebularine, or 2'-deoxynebularine
  misc_difference 102: note = modified_base - a, c, u, g, unknown or other - a, c, g, inosine, u, deoxyadenosine, deoxyguanosine, deoxycytidine, deoxyinosine, thymine, ribonebularine, 2'-O-methylnebularine, or 2'-deoxynebularine
  misc_difference 103: note = modified_base - a, c, u, g, unknown or other - a, c, g, inosine, u, deoxyadenosine, deoxyguanosine, deoxycytidine, deoxyinosine, thymine, ribonebularine, 2'-O-methylnebularine, or 2'-deoxynebularine

SEQ ID NO: 1896 - RNA, 100 nt, synthetic construct
  source 1..100: mol_type = other RNA; note = Description of Artificial Sequence: Synthetic polynucleotide
  modified_base 1: mod_base = OTHER; note = 2'-O-Methyl-cytidine phosphorothioate
  modified_base 2: mod_base = OTHER; note = 2'-O-Methyl-adenosine phosphorothioate
  modified_base 3: mod_base = OTHER; note = 2'-O-Methyl-guanosine phosphorothioate
  modified_base 9: mod_base = OTHER; note = Nebularine - ribonebularine
  modified_base 14: mod_base = OTHER; note = Nebularine - ribonebularine
  modified_base 21: mod_base = OTHER; note = 2'-O-Methyl-guanosine
  modified_base 28: mod_base = OTHER; note = 2'-O-Methyl-adenosine
  modified_base 29: mod_base = OTHER; note = 2'-O-Methyl-guanosine
  modified_base 30: mod_base = OTHER; note = 2'-O-Methyl-cytidine
  modified_base 31: mod_base = OTHER; note = 2'-O-Methyl-uridine
  modified_base 32: mod_base = OTHER; note = 2'-O-Methyl-adenosine
  modified_base 33: mod_base = OTHER; note = 2'-O-Methyl-guanosine
  modified_base 34: mod_base = OTHER; note = 2'-O-Methyl-adenosine
  modified_base 35: mod_base = OTHER; note = 2'-O-Methyl-adenosine
  modified_base 36: mod_base = OTHER; note = 2'-O-Methyl-adenosine
  modified_base 37: mod_base = OTHER; note = 2'-O-Methyl-uridine
  modified_base 38: mod_base = OTHER; note = 2'-O-Methyl-adenosine
  modified_base 39: mod_base = OTHER; note = 2'-O-Methyl-guanosine
  modified_base 40: mod_base = OTHER; note = 2'-O-Methyl-cytidine
  modified_base 41: mod_base = OTHER; note = 2'-O-Methyl-adenosine
  modified_base 42: mod_base = OTHER; note = 2'-O-Methyl-adenosine
  modified_base 46: mod_base = OTHER; note = 2'-O-Methyl-adenosine
  modified_base 48: mod_base = OTHER; note = 2'-O-Methyl-adenosine
  modified_base 50: mod_base = OTHER; note = 2'-O-Methyl-uridine
  modified_base 52: mod_base = OTHER; note = 2'-O-Methyl-adenosine
  modified_base 53: mod_base = OTHER; note = 2'-O-Methyl-guanosine
  modified_base 54: mod_base = OTHER; note = 2'-O-Methyl-guanosine
  modified_base 55: mod_base = OTHER; note = 2'-O-Methyl-cytidine
  modified_base 56: mod_base = OTHER; note = 2'-O-Methyl-uridine
  modified_base 57: mod_base = OTHER; note = 2'-O-Methyl-adenosine
  modified_base 60: mod_base = OTHER; note = 2'-O-Methyl-cytidine
  modified_base 61: mod_base = OTHER; note = 2'-O-Methyl-cytidine
  modified_base 66: mod_base = OTHER; note = 2'-O-Methyl-uridine
  modified_base 67: mod_base = OTHER; note = 2'-O-Methyl-cytidine
  modified_base 70: mod_base = OTHER; note = 2'-O-Methyl-cytidine
  modified_base 71: mod_base = OTHER; note = 2'-O-Methyl-uridine
  modified_base 72: mod_base = OTHER; note = 2'-O-Methyl-uridine
  modified_base 73: mod_base = OTHER; note = 2'-O-Methyl-guanosine
  modified_base 74: mod_base = OTHER; note = 2'-O-Methyl-adenosine
  modified_base 75: mod_base = OTHER; note = 2'-O-Methyl-adenosine
  modified_base 76: mod_base = OTHER; note = 2'-O-Methyl-adenosine
  modified_base 77: mod_base = OTHER; note = 2'-O-Methyl-adenosine
  modified_base 78: mod_base = OTHER; note = 2'-O-Methyl-adenosine
  modified_base 79: mod_base = OTHER; note = 2'-O-Methyl-guanosine
  modified_base 80: mod_base = OTHER; note = 2'-O-Methyl-uridine
  modified_base 81: mod_base = OTHER; note = 2'-O-Methyl-guanosine
  modified_base 83: mod_base = OTHER; note = 2'-O-Methyl-cytidine
  modified_base 84: mod_base = OTHER; note = 2'-O-Methyl-adenosine
  modified_base 85: mod_base = OTHER; note = 2'-O-Methyl-cytidine
  modified_base 86: mod_base = OTHER; note = 2'-O-Methyl-cytidine
  modified_base 87: mod_base = OTHER; note = 2'-O-Methyl-guanosine
  modified_base 88: mod_base = OTHER; note = 2'-O-Methyl-adenosine
  modified_base 89: mod_base = OTHER; note = 2'-O-Methyl-guanosine
  modified_base 90: mod_base = OTHER; note = 2'-O-Methyl-uridine
  modified_base 91: mod_base = OTHER; note = 2'-O-Methyl-cytidine
  modified_base 92: mod_base = OTHER; note = 2'-O-Methyl-guanosine
  modified_base 93: mod_base = OTHER; note = 2'-O-Methyl-guanosine
  modified_base 94: mod_base = OTHER; note = 2'-O-Methyl-uridine
  modified_base 95: mod_base = OTHER; note = 2'-O-Methyl-guanosine
  modified_base 96: mod_base = OTHER; note = 2'-O-Methyl-cytidine
  modified_base 97: mod_base = OTHER; note = 2'-O-Methyl-uridine phosphorothioate
  modified_base 98: mod_base = OTHER; note = 2'-O-Methyl-uridine phosphorothioate
  modified_base 99: mod_base = OTHER; note = 2'-O-Methyl-uridine phosphorothioate
  modified_base 100: mod_base = OTHER; note = 2'-O-Methyl-uridine
caggttccntgggntgctctgttttagagctagaaatagcaagttaaaataaggctagtccgttatcaacttgaaaaagtggcaccgagtcggtgctttt

SEQ ID NO: 1897 - RNA, 100 nt, synthetic construct
  source 1..100: mol_type = other RNA; note = Description of Artificial Sequence: Synthetic polynucleotide
  modified_base 1: mod_base = OTHER; note = 2'-O-Methyl-cytidine phosphorothioate
  modified_base 2: mod_base = OTHER; note = 2'-O-Methyl-adenosine phosphorothioate
  modified_base 3: mod_base = OTHER; note = 2'-O-Methyl-guanosine phosphorothioate
  modified_base 9: mod_base = OTHER; note = Nebularine - ribonebularine
  modified_base 21: mod_base = OTHER; note = 2'-O-Methyl-guanosine
  modified_base 28: mod_base = OTHER; note = 2'-O-Methyl-adenosine
  modified_base 29: mod_base = OTHER; note = 2'-O-Methyl-guanosine
  modified_base 30: mod_base = OTHER; note = 2'-O-Methyl-cytidine
  modified_base 31: mod_base = OTHER; note = 2'-O-Methyl-uridine
  modified_base 32: mod_base = OTHER; note = 2'-O-Methyl-adenosine
  modified_base 33: mod_base = OTHER; note = 2'-O-Methyl-guanosine
  modified_base 34: mod_base = OTHER; note = 2'-O-Methyl-adenosine
  modified_base 35: mod_base = OTHER; note = 2'-O-Methyl-adenosine
  modified_base 36: mod_base = OTHER; note = 2'-O-Methyl-adenosine
  modified_base 37: mod_base = OTHER; note = 2'-O-Methyl-uridine
  modified_base 38: mod_base = OTHER; note = 2'-O-Methyl-adenosine
  modified_base 39: mod_base = OTHER; note = 2'-O-Methyl-guanosine
  modified_base 40: mod_base = OTHER; note = 2'-O-Methyl-cytidine
  modified_base 41: mod_base = OTHER; note = 2'-O-Methyl-adenosine
  modified_base 42: mod_base = OTHER; note = 2'-O-Methyl-adenosine
  modified_base 46: mod_base = OTHER; note = 2'-O-Methyl-adenosine
  modified_base 48: mod_base = OTHER; note = 2'-O-Methyl-adenosine
  modified_base 50: mod_base = OTHER; note = 2'-O-Methyl-uridine
  modified_base 52: mod_base = OTHER; note = 2'-O-Methyl-adenosine
  modified_base 53: mod_base = OTHER; note = 2'-O-Methyl-guanosine
  modified_base 54: mod_base = OTHER; note = 2'-O-Methyl-guanosine
  modified_base 55: mod_base = OTHER; note = 2'-O-Methyl-cytidine
  modified_base 56: mod_base = OTHER; note = 2'-O-Methyl-uridine
  modified_base 57: mod_base = OTHER; note = 2'-O-Methyl-adenosine
  modified_base 60: mod_base = OTHER; note = 2'-O-Methyl-cytidine
  modified_base 61: mod_base = OTHER; note = 2'-O-Methyl-cytidine
  modified_base 66: mod_base = OTHER; note = 2'-O-Methyl-uridine
  modified_base 67: mod_base = OTHER; note = 2'-O-Methyl-cytidine
  modified_base 70: mod_base = OTHER; note = 2'-O-Methyl-cytidine
  modified_base 71: mod_base = OTHER; note = 2'-O-Methyl-uridine
  modified_base 72: mod_base = OTHER; note = 2'-O-Methyl-uridine
  modified_base 73: mod_base = OTHER; note = 2'-O-Methyl-guanosine
  modified_base 74: mod_base = OTHER; note = 2'-O-Methyl-adenosine
  modified_base 75: mod_base = OTHER; note = 2'-O-Methyl-adenosine
  modified_base 76: mod_base = OTHER; note = 2'-O-Methyl-adenosine
  modified_base 77: mod_base = OTHER; note = 2'-O-Methyl-adenosine
  modified_base 78: mod_base = OTHER; note = 2'-O-Methyl-adenosine
  modified_base 79: mod_base = OTHER; note = 2'-O-Methyl-guanosine
  modified_base 80: mod_base = OTHER; note = 2'-O-Methyl-uridine
  modified_base 81: mod_base = OTHER; note = 2'-O-Methyl-guanosine
  modified_base 83: mod_base = OTHER; note = 2'-O-Methyl-cytidine
  modified_base 84: mod_base = OTHER; note = 2'-O-Methyl-adenosine
  modified_base 85: mod_base = OTHER; note = 2'-O-Methyl-cytidine
  modified_base 86: mod_base = OTHER; note = 2'-O-Methyl-cytidine
  modified_base 87: mod_base = OTHER; note = 2'-O-Methyl-guanosine
  modified_base 88: mod_base = OTHER; note = 2'-O-Methyl-adenosine
  modified_base 89: mod_base = OTHER; note = 2'-O-Methyl-guanosine
  modified_base 90: mod_base = OTHER; note = 2'-O-Methyl-uridine
  modified_base 91: mod_base = OTHER; note = 2'-O-Methyl-cytidine
  modified_base 92: mod_base = OTHER; note = 2'-O-Methyl-guanosine
  modified_base 93: mod_base = OTHER; note = 2'-O-Methyl-guanosine
  modified_base 94: mod_base = OTHER; note = 2'-O-Methyl-uridine
  modified_base 95: mod_base = OTHER; note = 2'-O-Methyl-guanosine
  modified_base 96: mod_base = OTHER; note = 2'-O-Methyl-cytidine
  modified_base 97: mod_base = OTHER; note = 2'-O-Methyl-uridine phosphorothioate
  modified_base 98: mod_base = OTHER; note = 2'-O-Methyl-uridine phosphorothioate
  modified_base 99: mod_base = OTHER; note = 2'-O-Methyl-uridine phosphorothioate
  modified_base 100: mod_base = OTHER; note = 2'-O-Methyl-uridine
caggttccntgggatgctctgttttagagctagaaatagcaagttaaaataaggctagtccgttatcaacttgaaaaagtggcaccgagtcggtgctttt

SEQ ID NO: 1898 - RNA, 100 nt, synthetic construct
  source 1..100: mol_type = other RNA; note = Description of Artificial Sequence: Synthetic polynucleotide
  modified_base 1: mod_base = OTHER; note = 2'-O-Methyl-cytidine phosphorothioate
  modified_base 2: mod_base = OTHER; note = 2'-O-Methyl-adenosine phosphorothioate
  modified_base 3: mod_base = OTHER; note = 2'-O-Methyl-guanosine phosphorothioate
  modified_base 14: mod_base = OTHER; note = Nebularine - ribonebularine
  modified_base 21: mod_base = OTHER; note = 2'-O-Methyl-guanosine
  modified_base 28: mod_base = OTHER; note = 2'-O-Methyl-adenosine
  modified_base 29: mod_base = OTHER; note = 2'-O-Methyl-guanosine
  modified_base 30: mod_base = OTHER; note = 2'-O-Methyl-cytidine
  modified_base 31: mod_base = OTHER; note = 2'-O-Methyl-uridine
  modified_base 32: mod_base = OTHER; note = 2'-O-Methyl-adenosine
  modified_base 33: mod_base = OTHER; note = 2'-O-Methyl-guanosine
  modified_base 34: mod_base = OTHER; note = 2'-O-Methyl-adenosine
  modified_base 35: mod_base = OTHER; note = 2'-O-Methyl-adenosine
  modified_base 36: mod_base = OTHER; note = 2'-O-Methyl-adenosine
  modified_base 37: mod_base = OTHER; note = 2'-O-Methyl-uridine
  modified_base 38: mod_base = OTHER; note = 2'-O-Methyl-adenosine
  modified_base 39: mod_base = OTHER; note = 2'-O-Methyl-guanosine
  modified_base 40: mod_base = OTHER; note = 2'-O-Methyl-cytidine
  modified_base 41: mod_base = OTHER; note = 2'-O-Methyl-adenosine
  modified_base 42: mod_base = OTHER; note = 2'-O-Methyl-adenosine
  modified_base 46: mod_base = OTHER; note = 2'-O-Methyl-adenosine
  modified_base 48: mod_base = OTHER; note = 2'-O-Methyl-adenosine
  modified_base 50: mod_base = OTHER; note = 2'-O-Methyl-uridine
  modified_base 52: mod_base = OTHER; note = 2'-O-Methyl-adenosine
  modified_base 53: mod_base = OTHER; note = 2'-O-Methyl-guanosine
  modified_base 54: mod_base = OTHER; note = 2'-O-Methyl-guanosine
  modified_base 55: mod_base = OTHER; note = 2'-O-Methyl-cytidine
  modified_base 56: mod_base = OTHER; note = 2'-O-Methyl-uridine
  modified_base 57: mod_base = OTHER; note = 2'-O-Methyl-adenosine
  modified_base 60: mod_base = OTHER; note = 2'-O-Methyl-cytidine
  modified_base 61: mod_base = OTHER; note = 2'-O-Methyl-cytidine
  modified_base 66: mod_base = OTHER; note = 2'-O-Methyl-uridine
  modified_base 67: mod_base = OTHER; note = 2'-O-Methyl-cytidine
  modified_base 70: mod_base = OTHER; note = 2'-O-Methyl-cytidine
  modified_base 71: mod_base = OTHER; note = 2'-O-Methyl-uridine
  modified_base 72: mod_base = OTHER; note = 2'-O-Methyl-uridine
  modified_base 73: mod_base = OTHER; note = 2'-O-Methyl-guanosine
  modified_base 74: mod_base = OTHER; note = 2'-O-Methyl-adenosine
  modified_base 75: mod_base = OTHER; note = 2'-O-Methyl-adenosine
  modified_base 76: mod_base = OTHER; note = 2'-O-Methyl-adenosine
  modified_base 77: mod_base = OTHER; note = 2'-O-Methyl-adenosine
  modified_base 78: mod_base = OTHER; note = 2'-O-Methyl-adenosine
  modified_base 79: mod_base = OTHER; note = 2'-O-Methyl-guanosine
  modified_base 80: mod_base = OTHER; note = 2'-O-Methyl-uridine
  modified_base 81: mod_base = OTHER; note = 2'-O-Methyl-guanosine
  modified_base 83: mod_base = OTHER; note = 2'-O-Methyl-cytidine
  modified_base 84: mod_base = OTHER; note = 2'-O-Methyl-adenosine
  modified_base 85: mod_base = OTHER; note = 2'-O-Methyl-cytidine
  modified_base 86: mod_base = OTHER; note = 2'-O-Methyl-cytidine
  modified_base 87: mod_base = OTHER; note = 2'-O-Methyl-guanosine
  modified_base 88: mod_base = OTHER; note = 2'-O-Methyl-adenosine
  modified_base 89: mod_base = OTHER; note = 2'-O-Methyl-guanosine
  modified_base 90: mod_base = OTHER; note = 2'-O-Methyl-uridine
  modified_base 91: mod_base = OTHER; note = 2'-O-Methyl-cytidine
  modified_base 92: mod_base = OTHER; note = 2'-O-Methyl-guanosine
  modified_base 93: mod_base = OTHER; note = 2'-O-Methyl-guanosine
  modified_base 94: mod_base = OTHER; note = 2'-O-Methyl-uridine
  modified_base 95: mod_base = OTHER; note = 2'-O-Methyl-guanosine
  modified_base 96: mod_base = OTHER; note = 2'-O-Methyl-cytidine
  modified_base 97: mod_base = OTHER; note = 2'-O-Methyl-uridine phosphorothioate
  modified_base 98: mod_base = OTHER; note = 2'-O-Methyl-uridine phosphorothioate
  modified_base 99: mod_base = OTHER; note = 2'-O-Methyl-uridine phosphorothioate
  modified_base 100: mod_base = OTHER; note = 2'-O-Methyl-uridine
caggttccatgggntgctctgttttagagctagaaatagcaagttaaaataaggctagtccgttatcaacttgaaaaagtggcaccgagtcggtgctttt

SEQ ID NO: 1899 - RNA, 100 nt, synthetic construct
  source 1..100: mol_type = other RNA; note = Description of Artificial Sequence: Synthetic polynucleotide
  modified_base 1: mod_base = OTHER; note = 2'-O-Methyl-cytidine phosphorothioate
  modified_base 2: mod_base = OTHER; note = 2'-O-Methyl-adenosine phosphorothioate
  modified_base 3: mod_base = OTHER; note = 2'-O-Methyl-guanosine phosphorothioate
  modified_base 21: mod_base = OTHER; note = 2'-O-Methyl-guanosine
  modified_base 28: mod_base = OTHER; note = 2'-O-Methyl-adenosine
  modified_base 29: mod_base = OTHER; note = 2'-O-Methyl-guanosine
  modified_base 30: mod_base = OTHER; note = 2'-O-Methyl-cytidine
  modified_base 31: mod_base = OTHER; note = 2'-O-Methyl-uridine
  modified_base 32: mod_base = OTHER; note = 2'-O-Methyl-adenosine
  modified_base 33: mod_base = OTHER; note = 2'-O-Methyl-guanosine
  modified_base 34: mod_base = OTHER; note = Nebularine - ribonebularine
  modified_base 35: mod_base = OTHER; note = 2'-O-Methyl-adenosine
  modified_base 36: mod_base = OTHER; note = 2'-O-Methyl-adenosine
  modified_base 37: mod_base = OTHER; note = 2'-O-Methyl-uridine
  modified_base 38: mod_base = OTHER; note = 2'-O-Methyl-adenosine
  modified_base 39: mod_base = OTHER; note = 2'-O-Methyl-guanosine
  modified_base 40: mod_base = OTHER; note = 2'-O-Methyl-cytidine
  modified_base 41: mod_base = OTHER; note = 2'-O-Methyl-adenosine
  modified_base 42: mod_base = OTHER; note = 2'-O-Methyl-adenosine
  modified_base 46: mod_base = OTHER; note = 2'-O-Methyl-adenosine
  modified_base 48: mod_base = OTHER; note = 2'-O-Methyl-adenosine
  modified_base 50: mod_base = OTHER; note = 2'-O-Methyl-uridine
  modified_base 52: mod_base = OTHER; note = 2'-O-Methyl-adenosine
  modified_base 53: mod_base = OTHER; note = 2'-O-Methyl-guanosine
  modified_base 54: mod_base = OTHER; note = 2'-O-Methyl-guanosine
  modified_base 55: mod_base = OTHER; note = 2'-O-Methyl-cytidine
  modified_base 56: mod_base = OTHER; note = 2'-O-Methyl-uridine
  modified_base 57: mod_base = OTHER; note = 2'-O-Methyl-adenosine
  modified_base 60: mod_base = OTHER; note = 2'-O-Methyl-cytidine
  modified_base 61: mod_base = OTHER; note = 2'-O-Methyl-cytidine
  modified_base 66: mod_base = OTHER; note = 2'-O-Methyl-uridine
  modified_base 67: mod_base = OTHER; note = 2'-O-Methyl-cytidine
  modified_base 70: mod_base = OTHER; note = 2'-O-Methyl-cytidine
  modified_base 71: mod_base = OTHER; note = 2'-O-Methyl-uridine
  modified_base 72: mod_base = OTHER; note = 2'-O-Methyl-uridine
  modified_base 73: mod_base = OTHER; note = 2'-O-Methyl-guanosine
  modified_base 74: mod_base = OTHER; note = 2'-O-Methyl-adenosine
  modified_base 75: mod_base = OTHER; note = 2'-O-Methyl-adenosine
  modified_base 76: mod_base = OTHER; note = 2'-O-Methyl-adenosine
  modified_base 77: mod_base = OTHER; note = 2'-O-Methyl-adenosine
  modified_base 78: mod_base = OTHER; note = 2'-O-Methyl-adenosine
  modified_base 79: mod_base = OTHER; note = 2'-O-Methyl-guanosine
  modified_base 80: mod_base = OTHER; note = 2'-O-Methyl-uridine
  modified_base 81: mod_base = OTHER; note = 2'-O-Methyl-guanosine
  modified_base 83: mod_base = OTHER; note = 2'-O-Methyl-cytidine
  modified_base 84: mod_base = OTHER; note = 2'-O-Methyl-adenosine
  modified_base 85: mod_base = OTHER; note = 2'-O-Methyl-cytidine
  modified_base 86: mod_base = OTHER; note = 2'-O-Methyl-cytidine
  modified_base 87: mod_base = OTHER; note = 2'-O-Methyl-guanosine
  modified_base 88: mod_base = OTHER; note = 2'-O-Methyl-adenosine
  modified_base 89: mod_base = OTHER; note = 2'-O-Methyl-guanosine
  modified_base 90: mod_base = OTHER; note = 2'-O-Methyl-uridine
  modified_base 91: mod_base = OTHER; note = 2'-O-Methyl-cytidine
  modified_base 92: mod_base = OTHER; note = 2'-O-Methyl-guanosine
  modified_base 93: mod_base = OTHER; note = 2'-O-Methyl-guanosine
  modified_base 94: mod_base = OTHER; note = 2'-O-Methyl-uridine
  modified_base 95: mod_base = OTHER; note = 2'-O-Methyl-guanosine
  modified_base 96: mod_base = OTHER; note = 2'-O-Methyl-cytidine
  modified_base 97: mod_base = OTHER; note = 2'-O-Methyl-uridine phosphorothioate
  modified_base 98: mod_base = OTHER; note = 2'-O-Methyl-uridine phosphorothioate
  modified_base 99: mod_base = OTHER; note = 2'-O-Methyl-uridine phosphorothioate
  modified_base 100: mod_base = OTHER; note = 2'-O-Methyl-uridine
caggttccatgggatgctctgttttagagctagnaatagcaagttaaaataaggctagtccgttatcaacttgaaaaagtggcaccgagtcggtgctttt

SEQ ID NO: 1900 - RNA, 100 nt, synthetic construct
  source 1..100: mol_type = other RNA; note = Description of Artificial Sequence: Synthetic polynucleotide
  modified_base 1: mod_base = OTHER; note = 2'-O-Methyl-cytidine phosphorothioate
  modified_base 2: mod_base = OTHER; note = 2'-O-Methyl-adenosine phosphorothioate
  modified_base 3: mod_base = OTHER; note = 2'-O-Methyl-guanosine phosphorothioate
  modified_base 21: mod_base = OTHER; note = 2'-O-Methyl-guanosine
  modified_base 28: mod_base = OTHER; note = 2'-O-Methyl-adenosine
  modified_base 29: mod_base = OTHER; note = 2'-O-Methyl-guanosine
  modified_base 30: mod_base = OTHER; note = 2'-O-Methyl-cytidine
  modified_base 31: mod_base = OTHER; note = 2'-O-Methyl-uridine
  modified_base 32: mod_base = OTHER; note = 2'-O-Methyl-adenosine
  modified_base 33: mod_base = OTHER; note = 2'-O-Methyl-guanosine
  modified_base 34: mod_base = OTHER; note = Nebularine - ribonebularine
  modified_base 35: mod_base = OTHER; note = 2'-O-Methyl-adenosine
  modified_base 36: mod_base = OTHER; note = 2'-O-Methyl-adenosine
  modified_base 37: mod_base = OTHER; note = 2'-O-Methyl-uridine
  modified_base 38: mod_base = OTHER; note = 2'-O-Methyl-adenosine
  modified_base 39: mod_base = OTHER; note = 2'-O-Methyl-guanosine
  modified_base 40: mod_base = OTHER; note = 2'-O-Methyl-cytidine
  modified_base 41: mod_base = OTHER; note = 2'-O-Methyl-adenosine
  modified_base 42: mod_base = OTHER; note = 2'-O-Methyl-adenosine
  modified_base 46: mod_base = OTHER; note = 2'-O-Methyl-adenosine
  modified_base 48: mod_base = OTHER; note = 2'-O-Methyl-adenosine
  modified_base 50: mod_base = OTHER; note = 2'-O-Methyl-uridine
  modified_base 52: mod_base = OTHER; note = 2'-O-Methyl-adenosine
  modified_base 53: mod_base = OTHER; note = 2'-O-Methyl-guanosine
  modified_base 54: mod_base = OTHER; note = 2'-O-Methyl-guanosine
  modified_base 55: mod_base = OTHER; note = 2'-O-Methyl-cytidine
  modified_base 56: mod_base = OTHER; note = 2'-O-Methyl-uridine
  modified_base 57: mod_base = OTHER; note = Nebularine - ribonebularine
  modified_base 60: mod_base = OTHER; note = 2'-O-Methyl-cytidine
  modified_base 61: mod_base = OTHER; note = 2'-O-Methyl-cytidine
  modified_base 66: mod_base = OTHER; note = 2'-O-Methyl-uridine
  modified_base 67: mod_base = OTHER; note = 2'-O-Methyl-cytidine
  modified_base 70: mod_base = OTHER; note = 2'-O-Methyl-cytidine
  modified_base 71: mod_base = OTHER; note = 2'-O-Methyl-uridine
  modified_base 72: mod_base = OTHER; note = 2'-O-Methyl-uridine
  modified_base 73: mod_base = OTHER; note = 2'-O-Methyl-guanosine
  modified_base 74: mod_base = OTHER; note = 2'-O-Methyl-adenosine
  modified_base 75: mod_base = OTHER; note = 2'-O-Methyl-adenosine
  modified_base 76: mod_base = OTHER; note = 2'-O-Methyl-adenosine
  modified_base 77: mod_base = OTHER; note = 2'-O-Methyl-adenosine
  modified_base 78: mod_base = OTHER; note = 2'-O-Methyl-adenosine
  modified_base 79: mod_base = OTHER; note = 2'-O-Methyl-guanosine
  modified_base 80: mod_base = OTHER; note = 2'-O-Methyl-uridine
  modified_base 81: mod_base = OTHER; note = 2'-O-Methyl-guanosine
  modified_base 83: mod_base = OTHER; note = 2'-O-Methyl-cytidine
  modified_base 84: mod_base = OTHER; note = 2'-O-Methyl-adenosine
  modified_base 85: mod_base = OTHER; note = 2'-O-Methyl-cytidine
  modified_base 86: mod_base = OTHER; note = 2'-O-Methyl-cytidine
  modified_base 87: mod_base = OTHER; note = 2'-O-Methyl-guanosine
  modified_base 88: mod_base = OTHER; note = 2'-O-Methyl-adenosine
  modified_base 89: mod_base = OTHER; note = 2'-O-Methyl-guanosine
  modified_base 90: mod_base = OTHER; note = 2'-O-Methyl-uridine
  modified_base 91: mod_base = OTHER; note = 2'-O-Methyl-cytidine
  modified_base 92: mod_base = OTHER; note = 2'-O-Methyl-guanosine
  modified_base 93: mod_base = OTHER; note = 2'-O-Methyl-guanosine
  modified_base 94: mod_base = OTHER; note = 2'-O-Methyl-uridine
  modified_base 95: mod_base = OTHER; note = 2'-O-Methyl-guanosine
  modified_base 96: mod_base = OTHER; note = 2'-O-Methyl-cytidine
  modified_base 97: mod_base = OTHER; note = 2'-O-Methyl-uridine phosphorothioate
  modified_base 98: mod_base = OTHER; note = 2'-O-Methyl-uridine phosphorothioate
  modified_base 99: mod_base = OTHER; note = 2'-O-Methyl-uridine phosphorothioate
  modified_base 100: mod_base = OTHER; note = 2'-O-Methyl-uridine
caggttccatgggatgctctgttttagagctagnaatagcaagttaaaataaggctngtccgttatcaacttgaaaaagtggcaccgagtcggtgctttt

SEQ ID NO: 1901 - RNA, 100 nt, synthetic construct
  source 1..100: mol_type = other RNA; note = Description of Artificial Sequence: Synthetic polynucleotide
  modified_base 1: mod_base = OTHER; note = 2'-O-Methyl-cytidine phosphorothioate
  modified_base 2: mod_base = OTHER; note = 2'-O-Methyl-adenosine phosphorothioate
  modified_base 3: mod_base = OTHER; note = 2'-O-Methyl-guanosine phosphorothioate
  modified_base 21: mod_base = OTHER; note = 2'-O-Methyl-guanosine
  modified_base 28: mod_base = OTHER; note = 2'-O-Methyl-adenosine
  modified_base 29: mod_base = OTHER; note = 2'-O-Methyl-guanosine
  modified_base 30: mod_base = OTHER; note = 2'-O-Methyl-cytidine
  modified_base 31: mod_base = OTHER; note = 2'-O-Methyl-uridine
  modified_base 32: mod_base = OTHER; note = 2'-O-Methyl-adenosine
  modified_base 33: mod_base = OTHER; note = 2'-O-Methyl-guanosine
  modified_base 34: mod_base = OTHER; note = 2'-O-Methyl-adenosine
  modified_base 35: mod_base = OTHER; note = 2'-O-Methyl-adenosine
  modified_base 36: mod_base = OTHER; note = 2'-O-Methyl-adenosine
  modified_base 37: mod_base = OTHER; note = 2'-O-Methyl-uridine
  modified_base 38: mod_base = OTHER; note = 2'-O-Methyl-adenosine
  modified_base 39: mod_base = OTHER; note = 2'-O-Methyl-guanosine
  modified_base 40: mod_base = OTHER; note = 2'-O-Methyl-cytidine
  modified_base 41: mod_base = OTHER; note = 2'-O-Methyl-adenosine
  modified_base 42: mod_base = OTHER; note = 2'-O-Methyl-adenosine
  modified_base 46: mod_base = OTHER; note = 2'-O-Methyl-adenosine
  modified_base 48: mod_base = OTHER; note = 2'-O-Methyl-adenosine
  modified_base 50: mod_base = OTHER; note = 2'-O-Methyl-uridine
  modified_base 52: mod_base = OTHER; note = 2'-O-Methyl-adenosine
  modified_base 53: mod_base = OTHER; note = 2'-O-Methyl-guanosine
  modified_base 54: mod_base = OTHER; note = 2'-O-Methyl-guanosine
  modified_base 55: mod_base = OTHER; note = 2'-O-Methyl-cytidine
  modified_base 56: mod_base = OTHER; note = 2'-O-Methyl-uridine
  modified_base 57: mod_base = OTHER; note = Nebularine - ribonebularine
  modified_base 60: mod_base = OTHER; note = 2'-O-Methyl-cytidine
  modified_base 61: mod_base = OTHER; note = 2'-O-Methyl-cytidine
  modified_base 66: mod_base = OTHER; note = 2'-O-Methyl-uridine
  modified_base 67: mod_base = OTHER; note = 2'-O-Methyl-cytidine
  modified_base 70: mod_base = OTHER; note = 2'-O-Methyl-cytidine
  modified_base 71: mod_base = OTHER; note = 2'-O-Methyl-uridine
  modified_base 72: mod_base = OTHER; note = 2'-O-Methyl-uridine
  modified_base 73: mod_base = OTHER; note = 2'-O-Methyl-guanosine
  modified_base 74: mod_base = OTHER; note = 2'-O-Methyl-adenosine
  modified_base 75: mod_base = OTHER; note = 2'-O-Methyl-adenosine
  modified_base 76: mod_base = OTHER; note = 2'-O-Methyl-adenosine
  modified_base 77: mod_base = OTHER; note = 2'-O-Methyl-adenosine
  modified_base 78: mod_base = OTHER; note = 2'-O-Methyl-adenosine
  modified_base 79: mod_base = OTHER; note = 2'-O-Methyl-guanosine
  modified_base 80: mod_base = OTHER; note = 2'-O-Methyl-uridine
  modified_base 81: mod_base = OTHER; note = 2'-O-Methyl-guanosine
  modified_base 83: mod_base = OTHER; note = 2'-O-Methyl-cytidine
  modified_base 84: mod_base = OTHER; note = 2'-O-Methyl-adenosine
  modified_base 85: mod_base = OTHER; note = 2'-O-Methyl-cytidine
  modified_base 86: mod_base = OTHER; note = 2'-O-Methyl-cytidine
  modified_base 87: mod_base = OTHER; note = 2'-O-Methyl-guanosine
  modified_base 88: mod_base = OTHER; note = 2'-O-Methyl-adenosine
  modified_base 89: mod_base = OTHER; note = 2'-O-Methyl-guanosine
  modified_base 90: mod_base = OTHER; note = 2'-O-Methyl-uridine
  modified_base 91: mod_base = OTHER; note = 2'-O-Methyl-cytidine
  modified_base 92: mod_base = OTHER; note = 2'-O-Methyl-guanosine
  modified_base 93: mod_base = OTHER; note = 2'-O-Methyl-guanosine
  modified_base 94: mod_base = OTHER; note = 2'-O-Methyl-uridine
  modified_base 95: mod_base = OTHER; note = 2'-O-Methyl-guanosine
  modified_base 96: mod_base = OTHER; note = 2'-O-Methyl-cytidine
  modified_base 97: mod_base = OTHER; note = 2'-O-Methyl-uridine phosphorothioate
  modified_base 98: mod_base = OTHER; note = 2'-O-Methyl-uridine phosphorothioate
  modified_base 99: mod_base = OTHER; note = 2'-O-Methyl-uridine phosphorothioate
  modified_base 100: mod_base = OTHER; note = 2'-O-Methyl-uridine
caggttccatgggatgctctgttttagagctagaaatagcaagttaaaataaggctngtccgttatcaacttgaaaaagtggcaccgagtcggtgctttt

SEQ ID NO: 1902 - RNA, 100 nt, synthetic construct
  source 1..100: mol_type = other RNA; note = Description of Artificial Sequence: Synthetic polynucleotide
  modified_base 1: mod_base = OTHER; note = 2'-O-Methyl-cytidine phosphorothioate
  modified_base 2: mod_base = OTHER; note = 2'-O-Methyl-adenosine phosphorothioate
  modified_base 3: mod_base = OTHER; note = 2'-O-Methyl-guanosine phosphorothioate
  modified_base 21: mod_base = OTHER; note = 2'-O-Methyl-guanosine
  modified_base 28: mod_base = OTHER; note = 2'-O-Methyl-adenosine
  modified_base 29: mod_base = OTHER; note = 2'-O-Methyl-guanosine
  modified_base 30: mod_base = OTHER; note = 2'-O-Methyl-cytidine
  modified_base 31: mod_base = OTHER; note = 2'-O-Methyl-uridine
  modified_base 32: mod_base = OTHER; note = 2'-O-Methyl-adenosine
  modified_base 33: mod_base = OTHER; note = 2'-O-Methyl-guanosine
  modified_base 34: mod_base = OTHER; note = 2'-O-Methyl-adenosine
  modified_base 35: mod_base = OTHER; note = 2'-O-Methyl-adenosine
  modified_base 36: mod_base = OTHER; note = 2'-O-Methyl-adenosine
  modified_base 37: mod_base = OTHER; note = 2'-O-Methyl-uridine
  modified_base 38: mod_base = OTHER; note = 2'-O-Methyl-adenosine
  modified_base 39: mod_base = OTHER; note = 2'-O-Methyl-guanosine
  modified_base 40: mod_base = OTHER; note = 2'-O-Methyl-cytidine
  modified_base 41: mod_base = OTHER; note = 2'-O-Methyl-adenosine
  modified_base 42: mod_base = OTHER; note = 2'-O-Methyl-adenosine
  modified_base 46: mod_base = OTHER; note = 2'-O-Methyl-adenosine
  modified_base 48: mod_base = OTHER; note = 2'-O-Methyl-adenosine
  modified_base 50: mod_base = OTHER; note = 2'-O-Methyl-uridine
  modified_base 52: mod_base = OTHER; note = 2'-O-Methyl-adenosine
  modified_base 53: mod_base = OTHER; note = 2'-O-Methyl-guanosine
  modified_base 54: mod_base = OTHER; note = 2'-O-Methyl-guanosine
  modified_base 55: mod_base = OTHER; note = 2'-O-Methyl-cytidine
  modified_base 56: mod_base = OTHER; note = 2'-O-Methyl-uridine
  modified_base 57: mod_base = OTHER; note = 2'-O-Methyl-adenosine
  modified_base 60: mod_base = OTHER; note = 2'-O-Methyl-cytidine
  modified_base 61: mod_base = OTHER; note = 2'-O-Methyl-cytidine
  modified_base 65: mod_base = OTHER; note = Nebularine - ribonebularine
  modified_base 66: mod_base = OTHER; note = 2'-O-Methyl-uridine
  modified_base 67: mod_base = OTHER; note = 2'-O-Methyl-cytidine
  modified_base 70: mod_base = OTHER; note = 2'-O-Methyl-cytidine
  modified_base 71: mod_base = OTHER; note = 2'-O-Methyl-uridine
  modified_base 72: mod_base = OTHER; note = 2'-O-Methyl-uridine
  modified_base 73: mod_base = OTHER; note = 2'-O-Methyl-guanosine
  modified_base 74: mod_base = OTHER; note = 2'-O-Methyl-adenosine
  modified_base 75: mod_base = OTHER; note = 2'-O-Methyl-adenosine
  modified_base 76: mod_base = OTHER; note = 2'-O-Methyl-adenosine
  modified_base 77: mod_base = OTHER; note = 2'-O-Methyl-adenosine
  modified_base 78: mod_base = OTHER; note = 2'-O-Methyl-adenosine
  modified_base 79: mod_base = OTHER; note = 2'-O-Methyl-guanosine
  modified_base 80: mod_base = OTHER; note = 2'-O-Methyl-uridine
  modified_base 81: mod_base = OTHER; note = 2'-O-Methyl-guanosine
  modified_base 83: mod_base = OTHER; note = 2'-O-Methyl-cytidine
  modified_base 84: mod_base = OTHER; note = 2'-O-Methyl-adenosine
  modified_base 85: mod_base = OTHER; note = 2'-O-Methyl-cytidine
  modified_base 86: mod_base = OTHER; note = 2'-O-Methyl-cytidine
  modified_base 87: mod_base = OTHER; note = 2'-O-Methyl-guanosine
  modified_base 88: mod_base = OTHER; note = 2'-O-Methyl-adenosine
  modified_base 89: mod_base = OTHER; note = 2'-O-Methyl-guanosine
  modified_base 90: mod_base = OTHER; note = 2'-O-Methyl-uridine
  modified_base 91: mod_base = OTHER; note = 2'-O-Methyl-cytidine
  modified_base 92: mod_base = OTHER; note = 2'-O-Methyl-guanosine
  modified_base 93: mod_base = OTHER; note = 2'-O-Methyl-guanosine
  modified_base 94: mod_base = OTHER; note = 2'-O-Methyl-uridine
  modified_base 95: mod_base = OTHER; note = 2'-O-Methyl-guanosine
  modified_base 96: mod_base = OTHER; note = 2'-O-Methyl-cytidine
  modified_base 97: mod_base = OTHER; note = 2'-O-Methyl-uridine phosphorothioate
  modified_base 98: mod_base = OTHER; note = 2'-O-Methyl-uridine phosphorothioate
  modified_base 99: mod_base = OTHER; note = 2'-O-Methyl-uridine phosphorothioate
  modified_base 100: mod_base = OTHER; note = 2'-O-Methyl-uridine
caggttccatgggatgctctgttttagagctagaaatagcaagttaaaataaggctagtccgttntcaacttgaaaaagtggcaccgagtcggtgctttt

SEQ ID NO: 1903 - RNA, 100 nt, synthetic construct
  source 1..100: mol_type = other RNA; note = Description of Artificial Sequence: Synthetic polynucleotide
  modified_base 1: mod_base = OTHER; note = 2'-O-Methyl-cytidine phosphorothioate
  modified_base 2: mod_base = OTHER; note = 2'-O-Methyl-adenosine phosphorothioate
  modified_base 3: mod_base = OTHER; note = 2'-O-Methyl-guanosine phosphorothioate
  modified_base 21: mod_base = OTHER; note = 2'-O-Methyl-guanosine
  modified_base 28: mod_base = OTHER; note = 2'-O-Methyl-adenosine
  modified_base 29: mod_base = OTHER; note = 2'-O-Methyl-guanosine
  modified_base 30: mod_base = OTHER; note = 2'-O-Methyl-cytidine
  modified_base 31: mod_base = OTHER; note = 2'-O-Methyl-uridine
  modified_base 32: mod_base = OTHER; note = 2'-O-Methyl-adenosine
  modified_base 33: mod_base = OTHER; note = 2'-O-Methyl-guanosine
  modified_base 34: mod_base = OTHER; note = Nebularine - ribonebularine
  modified_base 35: mod_base = OTHER; note = 2'-O-Methyl-adenosine
  modified_base 36: mod_base = OTHER; note = 2'-O-Methyl-adenosine
  modified_base 37: mod_base = OTHER; note = 2'-O-Methyl-uridine
  modified_base 38: mod_base = OTHER; note = 2'-O-Methyl-adenosine
  modified_base 39: mod_base = OTHER; note = 2'-O-Methyl-guanosine
  modified_base 40: mod_base = OTHER; note = 2'-O-Methyl-cytidine
  modified_base 41: mod_base = OTHER; note = 2'-O-Methyl-adenosine
  modified_base 42: mod_base = OTHER; note = 2'-O-Methyl-adenosine
  modified_base 46: mod_base = OTHER; note = 2'-O-Methyl-adenosine
  modified_base 48: mod_base = OTHER; note = 2'-O-Methyl-adenosine
  modified_base 50: mod_base = OTHER; note = 2'-O-Methyl-uridine
  modified_base 52: mod_base = OTHER; note = 2'-O-Methyl-adenosine
  modified_base 53: mod_base = OTHER; note = 2'-O-Methyl-guanosine
  modified_base 54: mod_base = OTHER; note = 2'-O-Methyl-guanosine
  modified_base 55: mod_base = OTHER; note = 2'-O-Methyl-cytidine
  modified_base 56: mod_base = OTHER; note = 2'-O-Methyl-uridine
  modified_base 57: mod_base = OTHER; note = Nebularine - ribonebularine
  modified_base 60: mod_base = OTHER; note = 2'-O-Methyl-cytidine
  modified_base 61: mod_base = OTHER; note = 2'-O-Methyl-cytidine
  modified_base 65: mod_base = OTHER; note = Nebularine - ribonebularine
  modified_base 66: mod_base = OTHER; note = 2'-O-Methyl-uridine
  modified_base 67: mod_base = OTHER; note = 2'-O-Methyl-cytidine
  modified_base 70: mod_base = OTHER; note = 2'-O-Methyl-cytidine
  modified_base 71: mod_base = OTHER; note = 2'-O-Methyl-uridine
  modified_base 72: mod_base = OTHER; note = 2'-O-Methyl-uridine
  modified_base 73: mod_base = OTHER; note = 2'-O-Methyl-guanosine
  modified_base 74: mod_base = OTHER; note = 2'-O-Methyl-adenosine
  modified_base 75: mod_base = OTHER; note = 2'-O-Methyl-adenosine
  modified_base 76: mod_base = OTHER; note = 2'-O-Methyl-adenosine
  modified_base 77: mod_base = OTHER; note = 2'-O-Methyl-adenosine
  modified_base 78: mod_base = OTHER; note = 2'-O-Methyl-adenosine
  modified_base 79: mod_base = OTHER; note = 2'-O-Methyl-guanosine
  modified_base 80: mod_base = OTHER; note = 2'-O-Methyl-uridine
  modified_base 81: mod_base = OTHER; note = 2'-O-Methyl-guanosine
  modified_base 83: mod_base = OTHER; note = 2'-O-Methyl-cytidine
  modified_base 84: mod_base = OTHER; note = 2'-O-Methyl-adenosine
  modified_base 85: mod_base = OTHER; note = 2'-O-Methyl-cytidine
  modified_base 86: mod_base = OTHER; note = 2'-O-Methyl-cytidine
  modified_base 87: mod_base = OTHER; note = 2'-O-Methyl-guanosine
  modified_base 88: mod_base = OTHER; note = 2'-O-Methyl-adenosine
  modified_base 89: mod_base = OTHER; note = 2'-O-Methyl-guanosine
  modified_base 90: mod_base = OTHER; note = 2'-O-Methyl-uridine
  modified_base 91: mod_base = OTHER; note = 2'-O-Methyl-cytidine
  modified_base 92: mod_base = OTHER; note = 2'-O-Methyl-guanosine
  modified_base 93: mod_base = OTHER; note = 2'-O-Methyl-guanosine
  modified_base 94: mod_base = OTHER; note = 2'-O-Methyl-uridine
  modified_base 95: mod_base = OTHER; note = 2'-O-Methyl-guanosine
  modified_base 96: mod_base = OTHER; note = 2'-O-Methyl-cytidine
  modified_base 97: mod_base = OTHER; note = 2'-O-Methyl-uridine phosphorothioate
  modified_base 98: mod_base = OTHER; note = 2'-O-Methyl-uridine phosphorothioate
  modified_base 99: mod_base = OTHER; note = 2'-O-Methyl-uridine phosphorothioate
  modified_base 100: mod_base = OTHER; note = 2'-O-Methyl-uridine
caggttccatgggatgctctgttttagagctagnaatagcaagttaaaataaggctngtccgttntcaacttgaaaaagtggcaccgagtcggtgctttt

SEQ ID NO: 1904 - RNA, 100 nt, synthetic construct
  source 1..100: mol_type = other RNA; note = Description of Artificial Sequence: Synthetic polynucleotide
  modified_base 1: mod_base = OTHER; note = 2'-O-Methyl-cytidine phosphorothioate
  modified_base 2: mod_base = OTHER; note = 2'-O-Methyl-adenosine phosphorothioate
  modified_base 3: mod_base = OTHER; note = 2'-O-Methyl-guanosine phosphorothioate
  modified_base 21: mod_base = OTHER; note = 2'-O-Methyl-guanosine
  modified_base 28: mod_base = OTHER; note = Nebularine - ribonebularine
  modified_base 29: mod_base = OTHER; note = 2'-O-Methyl-guanosine
  modified_base 30: mod_base = OTHER; note = 2'-O-Methyl-cytidine
  modified_base 31: mod_base = OTHER; note = 2'-O-Methyl-uridine
  modified_base 32: mod_base = OTHER; note = 2'-O-Methyl-adenosine
  modified_base 33: mod_base = OTHER; note = 2'-O-Methyl-guanosine
  modified_base 34: mod_base = OTHER; note = Nebularine - ribonebularine
  modified_base 35: mod_base = OTHER; note = 2'-O-Methyl-adenosine
  modified_base 36: mod_base = OTHER; note = 2'-O-Methyl-adenosine
  modified_base 37: mod_base = OTHER; note = 2'-O-Methyl-uridine
  modified_base 38: mod_base = OTHER; note = 2'-O-Methyl-adenosine
  modified_base 39: mod_base = OTHER; note = 2'-O-Methyl-guanosine
  modified_base 40: mod_base = OTHER; note = 2'-O-Methyl-cytidine
  modified_base 41: mod_base = OTHER; note = 2'-O-Methyl-adenosine
  modified_base 42: mod_base = OTHER; note = Nebularine - ribonebularine
  modified_base 46: mod_base = OTHER; note = 2'-O-Methyl-adenosine
  modified_base 48: mod_base = OTHER; note = 2'-O-Methyl-adenosine
  modified_base 50: mod_base = OTHER; note = 2'-O-Methyl-uridine
  modified_base 52: mod_base = OTHER; note = 2'-O-Methyl-adenosine
  modified_base 53: mod_base = OTHER; note = 2'-O-Methyl-guanosine
  modified_base 54: mod_base = OTHER; note = 2'-O-Methyl-guanosine
  modified_base 55: mod_base = OTHER; note = 2'-O-Methyl-cytidine
  modified_base 56: mod_base = OTHER; note = 2'-O-Methyl-uridine
  modified_base 57: mod_base = OTHER; note = Nebularine - ribonebularine
  modified_base 60: mod_base = OTHER; note = 2'-O-Methyl-cytidine
  modified_base 61: mod_base = OTHER; note = 2'-O-Methyl-cytidine
  modified_base 65: mod_base = OTHER; note = Nebularine - ribonebularine
  modified_base 66: mod_base = OTHER; note = 2'-O-Methyl-uridine
  modified_base 67: mod_base = OTHER; note = 2'-O-Methyl-cytidine
  modified_base 70: mod_base = OTHER; note = 2'-O-Methyl-cytidine
  modified_base 71: mod_base = OTHER; note = 2'-O-Methyl-uridine
  modified_base 72: mod_base = OTHER; note = 2'-O-Methyl-uridine
  modified_base 73: mod_base = OTHER; note = 2'-O-Methyl-guanosine
  modified_base 74: mod_base = OTHER; note = 2'-O-Methyl-adenosine
  modified_base 75: mod_base = OTHER; note = 2'-O-Methyl-adenosine
  modified_base 76: mod_base = OTHER; note = 2'-O-Methyl-adenosine
  modified_base 77: mod_base = OTHER; note = 2'-O-Methyl-adenosine
  modified_base 78: mod_base = OTHER; note = 2'-O-Methyl-adenosine
  modified_base 79: mod_base = OTHER; note = 2'-O-Methyl-guanosine
  modified_base 80: mod_base = OTHER; note = 2'-O-Methyl-uridine
  modified_base 81: mod_base = OTHER; note = 2'-O-Methyl-guanosine
  modified_base 83: mod_base = OTHER; note = 2'-O-Methyl-cytidine
  modified_base 84: mod_base = OTHER; note = 2'-O-Methyl-adenosine
  modified_base 85: mod_base = OTHER; note = 2'-O-Methyl-cytidine
  modified_base 86: mod_base = OTHER; note = 2'-O-Methyl-cytidine
  modified_base 87: mod_base = OTHER; note = 2'-O-Methyl-guanosine
  modified_base 88: mod_base = OTHER; note = 2'-O-Methyl-adenosine
  modified_base 89: mod_base = OTHER; note = 2'-O-Methyl-guanosine
  modified_base 90: mod_base = OTHER; note = 2'-O-Methyl-uridine
  modified_base 91: mod_base = OTHER; note = 2'-O-Methyl-cytidine
  modified_base 92: mod_base = OTHER; note = 2'-O-Methyl-guanosine
  modified_base 93: mod_base = OTHER; note = 2'-O-Methyl-guanosine
  modified_base 94: mod_base = OTHER; note = 2'-O-Methyl-uridine
  modified_base 95: mod_base = OTHER; note = 2'-O-Methyl-guanosine
  modified_base 96: mod_base = OTHER; note = 2'-O-Methyl-cytidine
  modified_base 97: mod_base = OTHER; note = 2'-O-Methyl-uridine phosphorothioate
  modified_base 98: mod_base = OTHER; note = 2'-O-Methyl-uridine phosphorothioate
  modified_base 99: mod_base = OTHER; note = 2'-O-Methyl-uridine phosphorothioate
  modified_base 100: mod_base = OTHER; note = 2'-O-Methyl-uridine
caggttccatgggatgctctgttttagngctagnaatagcangttaaaataaggctngtccgttntcaacttgaaaaagtggcaccgagtcggtgctttt

SEQ ID NO: 1905 - RNA, 100 nt, synthetic construct
  source 1..100: mol_type = other RNA; note = Description of Artificial Sequence: Synthetic polynucleotide
  modified_base 1: mod_base = OTHER; note = 2'-O-Methyl-cytidine phosphorothioate
  modified_base 2: mod_base = OTHER; note = 2'-O-Methyl-adenosine phosphorothioate
  modified_base 3: mod_base = OTHER; note = 2'-O-Methyl-guanosine phosphorothioate
  modified_base 9: mod_base = OTHER; note = Nebularine - ribonebularine
  modified_base 14: mod_base = OTHER; note = Nebularine - ribonebularine
  modified_base 21: mod_base = OTHER; note = 2'-O-Methyl-guanosine
  modified_base 28: mod_base = OTHER; note = 2'-O-Methyl-adenosine
  modified_base 29: mod_base = OTHER; note = 2'-O-Methyl-guanosine
  modified_base 30: mod_base = OTHER; note = 2'-O-Methyl-cytidine
  modified_base 31: mod_base = OTHER; note = 2'-O-Methyl-uridine
  modified_base 32: mod_base = OTHER; note = 2'-O-Methyl-adenosine
  modified_base 33: mod_base = OTHER; note = 2'-O-Methyl-guanosine
  modified_base 34: mod_base = OTHER; note = Nebularine - ribonebularine
  modified_base 35: mod_base = OTHER; note = 2'-O-Methyl-adenosine
  modified_base 36: mod_base = OTHER; note = 2'-O-Methyl-adenosine
  modified_base 37: mod_base = OTHER; note = 2'-O-Methyl-uridine
  modified_base 38: mod_base = OTHER; note = 2'-O-Methyl-adenosine
  modified_base 39: mod_base = OTHER; note = 2'-O-Methyl-guanosine
  modified_base 40: mod_base = OTHER; note = 2'-O-Methyl-cytidine
  modified_base 41: mod_base = OTHER; note = 2'-O-Methyl-adenosine
  modified_base 42: mod_base = OTHER; note = 2'-O-Methyl-adenosine
  modified_base 46: mod_base = OTHER; note = 2'-O-Methyl-adenosine
  modified_base 48: mod_base = OTHER; note = 2'-O-Methyl-adenosine
  modified_base 50: mod_base = OTHER; note = 2'-O-Methyl-uridine
  modified_base 52: mod_base = OTHER; note = 2'-O-Methyl-adenosine
  modified_base 53: mod_base = OTHER; note = 2'-O-Methyl-guanosine
  modified_base 54: mod_base = OTHER; note = 2'-O-Methyl-guanosine
  modified_base 55: mod_base = OTHER; note = 2'-O-Methyl-cytidine
  modified_base 56: mod_base = OTHER; note = 2'-O-Methyl-uridine
  modified_base 57: mod_base = OTHER; note = 2'-O-Methyl-adenosine
  modified_base 60: mod_base = OTHER; note = 2'-O-Methyl-cytidine
  modified_base 61: mod_base = OTHER; note = 2'-O-Methyl-cytidine
  modified_base 66: mod_base = OTHER; note = 2'-O-Methyl-uridine
  modified_base 67: mod_base = OTHER; note = 2'-O-Methyl-cytidine
  modified_base 70: mod_base = OTHER; note = 2'-O-Methyl-cytidine
  modified_base 71: mod_base = OTHER; note = 2'-O-Methyl-uridine
  modified_base 72: mod_base = OTHER; note = 2'-O-Methyl-uridine
  modified_base 73: mod_base = OTHER; note = 2'-O-Methyl-guanosine
  modified_base 74: mod_base = OTHER; note = 2'-O-Methyl-adenosine
  modified_base 75: mod_base = OTHER; note = 2'-O-Methyl-adenosine
  modified_base 76: mod_base = OTHER; note = 2'-O-Methyl-adenosine
  modified_base 77: mod_base = OTHER; note = 2'-O-Methyl-adenosine
  modified_base 78: mod_base = OTHER; note = 2'-O-Methyl-adenosine
  modified_base 79: mod_base = OTHER; note = 2'-O-Methyl-guanosine
  modified_base 80: mod_base = OTHER; note = 2'-O-Methyl-uridine
  modified_base 81: mod_base = OTHER; note = 2'-O-Methyl-guanosine
  modified_base 83: mod_base = OTHER; note = 2'-O-Methyl-cytidine
  modified_base 84: mod_base = OTHER; note = 2'-O-Methyl-adenosine
  modified_base 85: mod_base = OTHER; note = 2'-O-Methyl-cytidine
  modified_base 86: mod_base = OTHER; note = 2'-O-Methyl-cytidine
  modified_base 87: mod_base = OTHER; note = 2'-O-Methyl-guanosine
  modified_base 88: mod_base = OTHER; note = 2'-O-Methyl-adenosine
  modified_base 89: mod_base = OTHER; note = 2'-O-Methyl-guanosine
  modified_base 90: mod_base = OTHER; note = 2'-O-Methyl-uridine
  modified_base 91: mod_base = OTHER; note = 2'-O-Methyl-cytidine
  modified_base 92: mod_base = OTHER; note = 2'-O-Methyl-guanosine
  modified_base 93: mod_base = OTHER; note = 2'-O-Methyl-guanosine
  modified_base 94: mod_base = OTHER; note = 2'-O-Methyl-uridine
  modified_base 95: mod_base = OTHER; note = 2'-O-Methyl-guanosine
  modified_base 96: mod_base = OTHER; note = 2'-O-Methyl-cytidine
  modified_base 97: mod_base = OTHER; note = 2'-O-Methyl-uridine phosphorothioate
  modified_base 98: mod_base = OTHER; note = 2'-O-Methyl-uridine phosphorothioate
  modified_base 99: mod_base = OTHER; note = 2'-O-Methyl-uridine phosphorothioate
  modified_base 100: mod_base = OTHER; note = 2'-O-Methyl-uridine
caggttccntgggntgctctgttttagagctagnaatagcaagttaaaataaggctagtccgttatcaacttgaaaaagtggcaccgagtcggtgctttt

SEQ ID NO: 1906 - RNA, 100 nt, synthetic construct
  source 1..100: mol_type = other RNA; note = Description of Artificial Sequence: Synthetic polynucleotide
  modified_base 1: mod_base = OTHER; note = 2'-O-Methyl-cytidine phosphorothioate
  modified_base 2: mod_base = OTHER; note = 2'-O-Methyl-adenosine phosphorothioate
  modified_base 3: mod_base = OTHER; note = 2'-O-Methyl-guanosine phosphorothioate
  modified_base 9: mod_base = OTHER; note = Nebularine - ribonebularine
  modified_base 14: mod_base = OTHER; note = Nebularine - ribonebularine
  modified_base 21: mod_base = OTHER; note = 2'-O-Methyl-guanosine
  modified_base 28: mod_base = OTHER; note = 2'-O-Methyl-adenosine
  modified_base 29: mod_base = OTHER; note = 2'-O-Methyl-guanosine
  modified_base 30: mod_base = OTHER; note = 2'-O-Methyl-cytidine
  modified_base 31: mod_base = OTHER; note = 2'-O-Methyl-uridine
  modified_base 32: mod_base = OTHER; note = 2'-O-Methyl-adenosine
  modified_base 33: mod_base = OTHER; note = 2'-O-Methyl-guanosine
  modified_base 34: mod_base = OTHER; note = Nebularine - ribonebularine
  modified_base 35: mod_base = OTHER; note = 2'-O-Methyl-adenosine
  modified_base 36: mod_base = OTHER; note = 2'-O-Methyl-adenosine
  modified_base 37: mod_base = OTHER; note = 2'-O-Methyl-uridine
  modified_base 38: mod_base = OTHER; note = 2'-O-Methyl-adenosine
  modified_base 39: mod_base = OTHER; note = 2'-O-Methyl-guanosine
  modified_base 40: mod_base = OTHER; note = 2'-O-Methyl-cytidine
  modified_base 41: mod_base = OTHER; note = 2'-O-Methyl-adenosine
  modified_base 42: mod_base = OTHER; note = 2'-O-Methyl-adenosine
  modified_base 46: mod_base = OTHER; note = 2'-O-Methyl-adenosine
  modified_base 48: mod_base = OTHER; note = 2'-O-Methyl-adenosine
  modified_base 50: mod_base = OTHER; note = 2'-O-Methyl-uridine
  modified_base 52: mod_base = OTHER; note = 2'-O-Methyl-adenosine
  modified_base 53: mod_base = OTHER; note = 2'-O-Methyl-guanosine
  modified_base 54: mod_base = OTHER; note = 2'-O-Methyl-guanosine
  modified_base 55: mod_base = OTHER; note = 2'-O-Methyl-cytidine
  modified_base 56: mod_base = OTHER; note = 2'-O-Methyl-uridine
  modified_base 57: mod_base = OTHER; note = Nebularine - ribonebularine
  modified_base 60: mod_base = OTHER; note = 2'-O-Methyl-cytidine
  modified_base 61: mod_base = OTHER; note = 2'-O-Methyl-cytidine
  modified_base 66: mod_base = OTHER; note = 2'-O-Methyl-uridine
  modified_base 67: mod_base = OTHER; note = 2'-O-Methyl-cytidine
  modified_base 70: mod_base = OTHER; note = 2'-O-Methyl-cytidine
  modified_base 71: mod_base = OTHER; note = 2'-O-Methyl-uridine
  modified_base 72: mod_base = OTHER; note = 2'-O-Methyl-uridine
  modified_base 73: mod_base = OTHER; note = 2'-O-Methyl-guanosine
  modified_base 74: mod_base = OTHER; note = 2'-O-Methyl-adenosine
  modified_base 75: mod_base = OTHER; note = 2'-O-Methyl-adenosine
  modified_base 76: mod_base = OTHER; note = 2'-O-Methyl-adenosine
  modified_base 77: mod_base = OTHER; note = 2'-O-Methyl-adenosine
  modified_base 78: mod_base = OTHER; note = 2'-O-Methyl-adenosine
  modified_base 79: mod_base = OTHER; note = 2'-O-Methyl-guanosine
  modified_base 80: mod_base = OTHER; note = 2'-O-Methyl-uridine
  modified_base 81: mod_base = OTHER; note = 2'-O-Methyl-guanosine
  modified_base 83: mod_base = OTHER; note = 2'-O-Methyl-cytidine
  modified_base 84: mod_base = OTHER; note = 2'-O-Methyl-adenosine
  modified_base 85: mod_base = OTHER; note = 2'-O-Methyl-cytidine
  modified_base 86: mod_base = OTHER; note = 2'-O-Methyl-cytidine
  modified_base 87: mod_base = OTHER; note = 2'-O-Methyl-guanosine
  modified_base 88: mod_base = OTHER; note = 2'-O-Methyl-adenosine
  modified_base 89: mod_base = OTHER; note = 2'-O-Methyl-guanosine
  modified_base 90: mod_base = OTHER; note = 2'-O-Methyl-uridine
  modified_base 91: mod_base = OTHER; note = 2'-O-Methyl-cytidine
  modified_base 92: mod_base = OTHER; note = 2'-O-Methyl-guanosine
  modified_base 93: mod_base = OTHER; note = 2'-O-Methyl-guanosine
  modified_base 94: mod_base = OTHER; note = 2'-O-Methyl-uridine
  modified_base 95: mod_base = OTHER; note = 2'-O-Methyl-guanosine
  modified_base 96: mod_base = OTHER; note = 2'-O-Methyl-cytidine
  modified_base 97: mod_base = OTHER; note = 2'-O-Methyl-uridine phosphorothioate
  modified_base 98: mod_base = OTHER; note = 2'-O-Methyl-uridine phosphorothioate
  modified_base 99: mod_base = OTHER; note = 2'-O-Methyl-uridine phosphorothioate
  modified_base 100: mod_base = OTHER; note = 2'-O-Methyl-uridine
caggttccntgggntgctctgttttagagctagnaatagcaagttaaaataaggctngtccgttatcaacttgaaaaagtggcaccgagtcggtgctttt

SEQ ID NO: 1907 - RNA, 100 nt, synthetic construct
  source 1..100: mol_type = other RNA; note = Description of Artificial Sequence: Synthetic polynucleotide
  modified_base 1: mod_base = OTHER; note = 2'-O-Methyl-cytidine phosphorothioate
  modified_base 2: mod_base = OTHER; note = 2'-O-Methyl-adenosine phosphorothioate
  modified_base 3: mod_base = OTHER; note = 2'-O-Methyl-guanosine phosphorothioate
  modified_base 9: mod_base = OTHER; note = Nebularine - ribonebularine
  modified_base 14: mod_base = OTHER; note = Nebularine - ribonebularine
  modified_base 21: mod_base = OTHER; note = 2'-O-Methyl-guanosine
  modified_base 28: mod_base = OTHER; note = 2'-O-Methyl-adenosine
  modified_base 29: mod_base = OTHER; note = 2'-O-Methyl-guanosine
  modified_base 30: mod_base = OTHER; note = 2'-O-Methyl-cytidine
  modified_base 31: mod_base = OTHER; note = 2'-O-Methyl-uridine
  modified_base 32: mod_base = OTHER; note = 2'-O-Methyl-adenosine
  modified_base 33: mod_base = OTHER; note = 2'-O-Methyl-guanosine
  modified_base 34: mod_base = OTHER; note = 2'-O-Methyl-adenosine
  modified_base 35: mod_base = OTHER; note = 2'-O-Methyl-adenosine
  modified_base 36: mod_base = OTHER; note = 2'-O-Methyl-adenosine
  modified_base 37: mod_base = OTHER; note = 2'-O-Methyl-uridine
  modified_base 38: mod_base = OTHER; note = 2'-O-Methyl-adenosine
  modified_base 39: mod_base = OTHER; note = 2'-O-Methyl-guanosine
  modified_base 40: mod_base = OTHER; note = 2'-O-Methyl-cytidine
  modified_base 41: mod_base = OTHER; note = 2'-O-Methyl-adenosine
  modified_base 42: mod_base = OTHER; note = 2'-O-Methyl-adenosine
  modified_base 46: mod_base = OTHER; note = 2'-O-Methyl-adenosine
  modified_base 48: mod_base = OTHER; note = 2'-O-Methyl-adenosine
  modified_base 50: mod_base = OTHER; note = 2'-O-Methyl-uridine
  modified_base 52: mod_base = OTHER; note = 2'-O-Methyl-adenosine
  modified_base 53: mod_base = OTHER; note = 2'-O-Methyl-guanosine
  modified_base 54: mod_base = OTHER; note = 2'-O-Methyl-guanosine
  modified_base 55: mod_base = OTHER; note = 2'-O-Methyl-cytidine
  modified_base 56: mod_base = OTHER; note = 2'-O-Methyl-uridine
  modified_base 57: mod_base = OTHER; note = 2'-O-Methyl-adenosine
  modified_base 60: mod_base = OTHER; note = 2'-O-Methyl-cytidine
  modified_base 61: mod_base = OTHER; note = 2'-O-Methyl-cytidine
  modified_base 65: mod_base = OTHER; note = Nebularine - ribonebularine
  modified_base 66: mod_base = OTHER; note = 2'-O-Methyl-uridine
  modified_base 67: mod_base = OTHER; note = 2'-O-Methyl-cytidine
  modified_base 70: mod_base = OTHER; note = 2'-O-Methyl-cytidine
  modified_base 71: mod_base = OTHER; note = 2'-O-Methyl-uridine
  modified_base 72: mod_base = OTHER; note = 2'-O-Methyl-uridine
  modified_base 73: mod_base = OTHER; note = 2'-O-Methyl-guanosine
  modified_base 74: mod_base = OTHER; note = 2'-O-Methyl-adenosine
  modified_base 75: mod_base = OTHER; note = 2'-O-Methyl-adenosine
  modified_base 76: mod_base = OTHER; note = 2'-O-Methyl-adenosine
  modified_base 77: mod_base = OTHER; note = 2'-O-Methyl-adenosine
  modified_base 78: mod_base = OTHER; note = 2'-O-Methyl-adenosine
  modified_base 79: mod_base = OTHER; note = 2'-O-Methyl-guanosine
  modified_base 80: mod_base = OTHER; note = 2'-O-Methyl-uridine
  modified_base 81: mod_base = OTHER; note = 2'-O-Methyl-guanosine
  modified_base 83: mod_base = OTHER; note = 2'-O-Methyl-cytidine
  modified_base 84: mod_base = OTHER; note = 2'-O-Methyl-adenosine
  modified_base 85: mod_base = OTHER; note = 2'-O-Methyl-cytidine
  modified_base 86: mod_base = OTHER; note = 2'-O-Methyl-cytidine
  modified_base 87: mod_base = OTHER; note = 2'-O-Methyl-guanosine
  modified_base 88: mod_base = OTHER; note = 2'-O-Methyl-adenosine
  modified_base 89: mod_base = OTHER; note = 2'-O-Methyl-guanosine
  modified_base 90: mod_base = OTHER; note = 2'-O-Methyl-uridine
  modified_base 91: mod_base = OTHER; note = 2'-O-Methyl-cytidine
  modified_base 92: mod_base = OTHER; note = 2'-O-Methyl-guanosine
  modified_base 93: mod_base = OTHER; note = 2'-O-Methyl-guanosine
  modified_base 94: mod_base = OTHER; note = 2'-O-Methyl-uridine
  modified_base 95: mod_base = OTHER; note = 2'-O-Methyl-guanosine
  modified_base 96: mod_base = OTHER; note = 2'-O-Methyl-cytidine
  modified_base 97: mod_base = OTHER; note = 2'-O-Methyl-uridine phosphorothioate
  modified_base 98: mod_base = OTHER; note = 2'-O-Methyl-uridine phosphorothioate
  modified_base 99: mod_base = OTHER; note = 2'-O-Methyl-uridine phosphorothioate
  modified_base 100: mod_base = OTHER; note = 2'-O-Methyl-uridine
caggttccntgggntgctctgttttagagctagaaatagcaagttaaaataaggctagtccgttntcaacttgaaaaagtggcaccgagtcggtgctttt

SEQ ID NO: 1908 - RNA, 100 nt, synthetic construct
  source 1..100: mol_type = other RNA; note = Description of Artificial Sequence: Synthetic polynucleotide
  modified_base 1: mod_base = OTHER; note = 2'-O-Methyl-cytidine phosphorothioate
  modified_base 2: mod_base = OTHER; note = 2'-O-Methyl-adenosine phosphorothioate
  modified_base 3: mod_base = OTHER; note = 2'-O-Methyl-guanosine phosphorothioate
  modified_base 9: mod_base = OTHER; note = Nebularine - ribonebularine
  modified_base 14: mod_base = OTHER; note = Nebularine - ribonebularine
  modified_base 21: mod_base = OTHER; note = 2'-O-Methyl-guanosine
  modified_base 28: mod_base = OTHER; note = 2'-O-Methyl-adenosine
  modified_base 29: mod_base = OTHER; note = 2'-O-Methyl-guanosine
  modified_base 30: mod_base = OTHER; note = 2'-O-Methyl-cytidine
  modified_base 31: mod_base = OTHER; note = 2'-O-Methyl-uridine
  modified_base 32: mod_base = OTHER; note = 2'-O-Methyl-adenosine
  modified_base 33: mod_base = OTHER; note = 2'-O-Methyl-guanosine
  modified_base 34: mod_base = OTHER; note = Nebularine - ribonebularine
  modified_base 35: mod_base = OTHER; note = 2'-O-Methyl-adenosine
  modified_base 36: mod_base = OTHER; note = 2'-O-Methyl-adenosine
  modified_base 37: mod_base = OTHER; note = 2'-O-Methyl-uridine
  modified_base 38: mod_base = OTHER; note = 2'-O-Methyl-adenosine
  modified_base 39: mod_base = OTHER; note = 2'-O-Methyl-guanosine
  modified_base 40: mod_base = OTHER; note = 2'-O-Methyl-cytidine
  modified_base 41: mod_base = OTHER; note = 2'-O-Methyl-adenosine
  modified_base 42: mod_base = OTHER; note = 2'-O-Methyl-adenosine
  modified_base 46: mod_base = OTHER; note = 2'-O-Methyl-adenosine
  modified_base 48: mod_base = OTHER; note = 2'-O-Methyl-adenosine
  modified_base 50: mod_base = OTHER; note = 2'-O-Methyl-uridine
  modified_base 52: mod_base = OTHER; note = 2'-O-Methyl-adenosine
  modified_base 53: mod_base = OTHER; note = 2'-O-Methyl-guanosine
  modified_base 54: mod_base = OTHER; note = 2'-O-Methyl-guanosine
  modified_base 55: mod_base = OTHER; note = 2'-O-Methyl-cytidine
  modified_base 56: mod_base = OTHER; note = 2'-O-Methyl-uridine
  modified_base 57: mod_base = OTHER; note = Nebularine - ribonebularine
  modified_base 60: mod_base = OTHER; note = 2'-O-Methyl-cytidine
  modified_base 61: mod_base = OTHER; note = 2'-O-Methyl-cytidine
  modified_base 65: mod_base = OTHER; note = Nebularine - ribonebularine
  modified_base 66: mod_base = OTHER; note = 2'-O-Methyl-uridine
  modified_base 67: mod_base = OTHER; note = 2'-O-Methyl-cytidine
  modified_base 70: mod_base = OTHER; note = 2'-O-Methyl-cytidine
  modified_base 71: mod_base = OTHER; note = 2'-O-Methyl-uridine
  modified_base 72: mod_base = OTHER; note = 2'-O-Methyl-uridine
  modified_base 73: mod_base = OTHER; note = 2'-O-Methyl-guanosine
  modified_base 74: mod_base = OTHER; note = 2'-O-Methyl-adenosine
  modified_base 75: mod_base = OTHER; note = 2'-O-Methyl-adenosine
  modified_base 76: mod_base = OTHER; note = 2'-O-Methyl-adenosine
  modified_base 77: mod_base = OTHER; note = 2'-O-Methyl-adenosine
  modified_base 78: mod_base = OTHER; note = 2'-O-Methyl-adenosine
  modified_base 79: mod_base = OTHER; note = 2'-O-Methyl-guanosine
  modified_base 80: mod_base = OTHER; note = 2'-O-Methyl-uridine
  modified_base 81: mod_base = OTHER; note = 2'-O-Methyl-guanosine
  modified_base 83: mod_base = OTHER; note = 2'-O-Methyl-cytidine
  modified_base 84: mod_base = OTHER; note = 2'-O-Methyl-adenosine
  modified_base 85: mod_base = OTHER; note = 2'-O-Methyl-cytidine
  modified_base 86: mod_base = OTHER; note = 2'-O-Methyl-cytidine
  modified_base 87: mod_base = OTHER; note = 2'-O-Methyl-guanosine
  modified_base 88: mod_base = OTHER; note = 2'-O-Methyl-adenosine
  modified_base 89: mod_base = OTHER; note = 2'-O-Methyl-guanosine
  modified_base 90: mod_base = OTHER; note = 2'-O-Methyl-uridine
  modified_base 91: mod_base = OTHER; note = 2'-O-Methyl-cytidine
  modified_base 92: mod_base = OTHER; note = 2'-O-Methyl-guanosine
  modified_base 93: mod_base = OTHER; note = 2'-O-Methyl-guanosine
  modified_base 94: mod_base = OTHER; note = 2'-O-Methyl-uridine
  modified_base 95: mod_base = OTHER; note = 2'-O-Methyl-guanosine
  modified_base 96: mod_base = OTHER; note = 2'-O-Methyl-cytidine
  modified_base 97: mod_base = OTHER; note = 2'-O-Methyl-uridine phosphorothioate
  modified_base 98: mod_base = OTHER; note = 2'-O-Methyl-uridine phosphorothioate
  modified_base 99: mod_base = OTHER; note = 2'-O-Methyl-uridine phosphorothioate
  modified_base 100: mod_base = OTHER; note = 2'-O-Methyl-uridine
caggttccntgggntgctctgttttagagctagnaatagcaagttaaaataaggctngtccgttntcaacttgaaaaagtggcaccgagtcggtgctttt

SEQ ID NO: 1909 - RNA, 100 nt, synthetic construct
  source 1..100: mol_type = other RNA; note = Description of Artificial Sequence: Synthetic polynucleotide
  modified_base 1: mod_base = OTHER; note = 2'-O-Methyl-cytidine phosphorothioate
  modified_base 2: mod_base = OTHER; note = 2'-O-Methyl-adenosine phosphorothioate
  modified_base 3: mod_base = OTHER; note = 2'-O-Methyl-guanosine phosphorothioate
  modified_base 9: mod_base = OTHER; note = Nebularine - ribonebularine
  modified_base 14: mod_base = OTHER; note = Nebularine - ribonebularine
  modified_base 21: mod_base = OTHER; note = 2'-O-Methyl-guanosine
  modified_base 28: mod_base = OTHER; note = Nebularine - ribonebularine
  modified_base 29: mod_base = OTHER; note = 2'-O-Methyl-guanosine
  modified_base 30: mod_base = OTHER; note = 2'-O-Methyl-cytidine
  modified_base 31: mod_base = OTHER; note = 2'-O-Methyl-uridine
  modified_base 32: mod_base = OTHER; note = 2'-O-Methyl-adenosine
  modified_base 33: mod_base = OTHER; note = 2'-O-Methyl-guanosine
  modified_base 34: mod_base = OTHER; note = Nebularine - ribonebularine
  modified_base 35: mod_base = OTHER; note = 2'-O-Methyl-adenosine
  modified_base 36: mod_base = OTHER; note = 2'-O-Methyl-adenosine
  modified_base 37: mod_base = OTHER; note = 2'-O-Methyl-uridine
  modified_base 38: mod_base = OTHER; note = 2'-O-Methyl-adenosine
  modified_base 39: mod_base = OTHER; note = 2'-O-Methyl-guanosine
  modified_base 40: mod_base = OTHER; note = 2'-O-Methyl-cytidine
  modified_base 41: mod_base = OTHER; note = 2'-O-Methyl-adenosine
  modified_base 42: mod_base = OTHER; note = Nebularine - ribonebularine
  modified_base 46: mod_base = OTHER; note = 2'-O-Methyl-adenosine
  modified_base 48: mod_base = OTHER; note = 2'-O-Methyl-adenosine
  modified_base 50: mod_base = OTHER; note = 2'-O-Methyl-uridine
  modified_base 52: mod_base = OTHER; note = 2'-O-Methyl-adenosine
  modified_base 53: mod_base = OTHER; note = 2'-O-Methyl-guanosine
  modified_base 54: mod_base = OTHER; note = 2'-O-Methyl-guanosine
  modified_base 55: mod_base = OTHER; note = 2'-O-Methyl-cytidine
  modified_base 56: mod_base = OTHER; note = 2'-O-Methyl-uridine
  modified_base 57: mod_base = OTHER; note = Nebularine - ribonebularine
  modified_base 60: mod_base = OTHER; note = 2'-O-Methyl-cytidine
  modified_base 61: mod_base = OTHER; note = 2'-O-Methyl-cytidine
  modified_base 65: mod_base = OTHER; note = Nebularine - ribonebularine
  modified_base 66: mod_base = OTHER; note = 2'-O-Methyl-uridine
  modified_base 67: mod_base = OTHER; note = 2'-O-Methyl-cytidine
  modified_base 70: mod_base = OTHER; note = 2'-O-Methyl-cytidine
  modified_base 71: mod_base = OTHER; note = 2'-O-Methyl-uridine
  modified_base 72: mod_base = OTHER; note = 2'-O-Methyl-uridine
  modified_base 73: mod_base = OTHER; note = 2'-O-Methyl-guanosine
  modified_base 74: mod_base = OTHER; note = 2'-O-Methyl-adenosine
  modified_base 75: mod_base = OTHER; note = 2'-O-Methyl-adenosine
  modified_base 76: mod_base = OTHER; note = 2'-O-Methyl-adenosine
  modified_base 77: mod_base = OTHER; note = 2'-O-Methyl-adenosine
  modified_base 78: mod_base = OTHER; note = 2'-O-Methyl-adenosine
  modified_base 79: mod_base = OTHER; note = 2'-O-Methyl-guanosine
  modified_base 80: mod_base = OTHER; note = 2'-O-Methyl-uridine
  modified_base 81: mod_base = OTHER; note = 2'-O-Methyl-guanosine
  modified_base 83: mod_base = OTHER; note = 2'-O-Methyl-cytidine
  modified_base 84: mod_base = OTHER; note = 2'-O-Methyl-adenosine
  modified_base 85: mod_base = OTHER; note = 2'-O-Methyl-cytidine
  modified_base 86: mod_base = OTHER; note = 2'-O-Methyl-cytidine
  modified_base 87: mod_base = OTHER; note = 2'-O-Methyl-guanosine
  modified_base 88: mod_base = OTHER; note = 2'-O-Methyl-adenosine
  modified_base 89: mod_base = OTHER; note = 2'-O-Methyl-guanosine
  modified_base 90: mod_base = OTHER; note = 2'-O-Methyl-uridine
  modified_base 91: mod_base = OTHER; note = 2'-O-Methyl-cytidine
  modified_base 92: mod_base = OTHER; note = 2'-O-Methyl-guanosine
  modified_base 93: mod_base = OTHER; note = 2'-O-Methyl-guanosine
  modified_base 94: mod_base = OTHER; note = 2'-O-Methyl-uridine
  modified_base 95: mod_base = OTHER; note = 2'-O-Methyl-guanosine
  modified_base 96: mod_base = OTHER; note = 2'-O-Methyl-cytidine
  modified_base 97: mod_base = OTHER; note = 2'-O-Methyl-uridine phosphorothioate
  modified_base 98: mod_base = OTHER; note = 2'-O-Methyl-uridine phosphorothioate
  modified_base 99: mod_base = OTHER; note = 2'-O-Methyl-uridine phosphorothioate
  modified_base 100: mod_base = OTHER; note = 2'-O-Methyl-uridine
caggttccntgggntgctctgttttagngctagnaatagcangttaaaataaggctngtccgttntcaacttgaaaaagtggcaccgagtcggtgctttt

SEQ ID NO: 1910 - RNA, 100 nt, synthetic construct
  source 1..100: mol_type = other RNA; note = Description of Artificial Sequence: Synthetic polynucleotide
  modified_base 1: mod_base = OTHER; note = 2'-O-Methyl-cytidine phosphorothioate
  modified_base 2: mod_base = OTHER; note = 2'-O-Methyl-adenosine phosphorothioate
  modified_base 3: mod_base = OTHER; note = 2'-O-Methyl-guanosine phosphorothioate
  modified_base 9: mod_base = OTHER; note = Nebularine - ribonebularine
  modified_base 21: mod_base = OTHER; note = 2'-O-Methyl-guanosine
  modified_base 28: mod_base = OTHER; note = 2'-O-Methyl-adenosine
  modified_base 29: mod_base = OTHER; note = 2'-O-Methyl-guanosine
  modified_base 30: mod_base = OTHER; note = 2'-O-Methyl-cytidine
  modified_base 31: mod_base = OTHER; note = 2'-O-Methyl-uridine
  modified_base 32: mod_base = OTHER; note = 2'-O-Methyl-adenosine
  modified_base 33: mod_base = OTHER; note = 2'-O-Methyl-guanosine
  modified_base 34: mod_base = OTHER; note = Nebularine - ribonebularine
  modified_base 35: mod_base = OTHER; note = 2'-O-Methyl-adenosine
  modified_base 36: mod_base = OTHER; note = 2'-O-Methyl-adenosine
  modified_base 37: mod_base = OTHER; note = 2'-O-Methyl-uridine
  modified_base 38: mod_base = OTHER; note = 2'-O-Methyl-adenosine
  modified_base 39: mod_base = OTHER; note = 2'-O-Methyl-guanosine
  modified_base 40: mod_base = OTHER; note = 2'-O-Methyl-cytidine
  modified_base 41: mod_base = OTHER; note = 2'-O-Methyl-adenosine
  modified_base 42: mod_base = OTHER; note = 2'-O-Methyl-adenosine
  modified_base 46: mod_base = OTHER; note = 2'-O-Methyl-adenosine
  modified_base 48: mod_base = OTHER; note = 2'-O-Methyl-adenosine
  modified_base 50: mod_base = OTHER; note = 2'-O-Methyl-uridine
  modified_base 52: mod_base = OTHER; note = 2'-O-Methyl-adenosine
  modified_base 53: mod_base = OTHER; note = 2'-O-Methyl-guanosine
  modified_base 54: mod_base = OTHER; note = 2'-O-Methyl-guanosine
  modified_base 55: mod_base = OTHER; note = 2'-O-Methyl-cytidine
  modified_base 56: mod_base = OTHER; note = 2'-O-Methyl-uridine
  modified_base 57: mod_base = OTHER; note = Nebularine - ribonebularine
  modified_base 60: mod_base = OTHER; note = 2'-O-Methyl-cytidine
  modified_base 61: mod_base = OTHER; note = 2'-O-Methyl-cytidine
  modified_base 66: mod_base = OTHER; note = 2'-O-Methyl-uridine
  modified_base 67: mod_base = OTHER; note = 2'-O-Methyl-cytidine
  modified_base 70: mod_base = OTHER; note = 2'-O-Methyl-cytidine
  modified_base 71: mod_base = OTHER; note = 2'-O-Methyl-uridine
  modified_base 72: mod_base = OTHER; note = 2'-O-Methyl-uridine
  modified_base 73: mod_base = OTHER; note = 2'-O-Methyl-guanosine
  modified_base 74: mod_base = OTHER; note = 2'-O-Methyl-adenosine
  modified_base 75: mod_base = OTHER; note = 2'-O-Methyl-adenosine
  modified_base 76: mod_base = OTHER; note = 2'-O-Methyl-adenosine
  modified_base 77: mod_base = OTHER; note = 2'-O-Methyl-adenosine
  modified_base 78: mod_base = OTHER; note = 2'-O-Methyl-adenosine
  modified_base 79: mod_base = OTHER; note = 2'-O-Methyl-guanosine
  modified_base 80: mod_base = OTHER; note = 2'-O-Methyl-uridine
  modified_base 81: mod_base = OTHER; note = 2'-O-Methyl-guanosine
  modified_base 83: mod_base = OTHER; note = 2'-O-Methyl-cytidine
  modified_base 84: mod_base = OTHER; note = 2'-O-Methyl-adenosine
  modified_base 85: mod_base = OTHER; note = 2'-O-Methyl-cytidine
  modified_base 86: mod_base = OTHER; note = 2'-O-Methyl-cytidine
  modified_base 87: mod_base = OTHER; note = 2'-O-Methyl-guanosine
  modified_base 88: mod_base = OTHER; note = 2'-O-Methyl-adenosine
  modified_base 89: mod_base = OTHER; note = 2'-O-Methyl-guanosine
  modified_base 90: mod_base = OTHER; note = 2'-O-Methyl-uridine
  modified_base 91: mod_base = OTHER; note = 2'-O-Methyl-cytidine
  modified_base 92: mod_base = OTHER; note = 2'-O-Methyl-guanosine
  modified_base 93: mod_base = OTHER; note = 2'-O-Methyl-guanosine
  modified_base 94: mod_base = OTHER; note = 2'-O-Methyl-uridine
  modified_base 95: mod_base = OTHER; note = 2'-O-Methyl-guanosine
  modified_base 96: mod_base = OTHER; note = 2'-O-Methyl-cytidine
  modified_base 97: mod_base = OTHER; note = 2'-O-Methyl-uridine phosphorothioate
  modified_base 98: mod_base = OTHER; note = 2'-O-Methyl-uridine phosphorothioate
  modified_base 99: mod_base = OTHER; note = 2'-O-Methyl-uridine phosphorothioate
  modified_base 100: mod_base = OTHER; note = 2'-O-Methyl-uridine
caggttccntgggatgctctgttttagagctagnaatagcaagttaaaataaggctngtccgttatcaacttgaaaaagtggcaccgagtcggtgctttt

SEQ ID NO: 1911 - RNA, 100 nt, synthetic construct
  source 1..100: mol_type = other RNA; note = Description of Artificial Sequence: Synthetic polynucleotide
  modified_base 1: mod_base = OTHER; note = 2'-O-Methyl-cytidine phosphorothioate
  modified_base 2: mod_base = OTHER; note = 2'-O-Methyl-adenosine phosphorothioate
  modified_base 3: mod_base = OTHER; note = 2'-O-Methyl-guanosine phosphorothioate
  modified_base 9: mod_base = OTHER; note = Nebularine - ribonebularine
  modified_base 21: mod_base = OTHER; note = 2'-O-Methyl-guanosine
  modified_base 28: mod_base = OTHER; note = 2'-O-Methyl-adenosine
  modified_base 29: mod_base = OTHER; note = 2'-O-Methyl-guanosine
  modified_base 30: mod_base = OTHER; note = 2'-O-Methyl-cytidine
  modified_base 31: mod_base = OTHER; note = 2'-O-Methyl-uridine
  modified_base 32: mod_base = OTHER; note = 2'-O-Methyl-adenosine
  modified_base 33: mod_base = OTHER; note = 2'-O-Methyl-guanosine
  modified_base 34: mod_base = OTHER; note = 2'-O-Methyl-adenosine
  modified_base 35: mod_base = OTHER; note = 2'-O-Methyl-adenosine
  modified_base 36: mod_base = OTHER; note = 2'-O-Methyl-adenosine
  modified_base 37: mod_base = OTHER; note = 2'-O-Methyl-uridine
  modified_base 38: mod_base = OTHER; note = 2'-O-Methyl-adenosine
  modified_base 39: mod_base = OTHER; note = 2'-O-Methyl-guanosine
  modified_base 40: mod_base = OTHER; note = 2'-O-Methyl-cytidine
  modified_base 41: mod_base = OTHER; note = 2'-O-Methyl-adenosine
  modified_base 42: mod_base = OTHER; note = 2'-O-Methyl-adenosine
  modified_base 46: mod_base = OTHER; note = 2'-O-Methyl-adenosine
  modified_base 48: mod_base = OTHER; note = 2'-O-Methyl-adenosine
  modified_base 50: mod_base = OTHER; note = 2'-O-Methyl-uridine
  modified_base 52: mod_base = OTHER; note = 2'-O-Methyl-adenosine
  modified_base 53: mod_base = OTHER; note = 2'-O-Methyl-guanosine
  modified_base 54: mod_base = OTHER; note = 2'-O-Methyl-guanosine
  modified_base 55: mod_base = OTHER; note = 2'-O-Methyl-cytidine
  modified_base 56: mod_base = OTHER; note = 2'-O-Methyl-uridine
  modified_base 57: mod_base = OTHER; note = Nebularine - ribonebularine
  modified_base 60: mod_base = OTHER; note = 2'-O-Methyl-cytidine
  modified_base 61: mod_base = OTHER; note = 2'-O-Methyl-cytidine
  modified_base 66: mod_base = OTHER; note = 2'-O-Methyl-uridine
  modified_base 67: mod_base = OTHER; note = 2'-O-Methyl-cytidine
  modified_base 70: mod_base = OTHER; note = 2'-O-Methyl-cytidine
  modified_base 71: mod_base = OTHER; note = 2'-O-Methyl-uridine
  modified_base 72: mod_base = OTHER; note = 2'-O-Methyl-uridine
  modified_base 73: mod_base = OTHER; note = 2'-O-Methyl-guanosine
  modified_base 74: mod_base = OTHER; note = 2'-O-Methyl-adenosine
  modified_base 75: mod_base = OTHER; note = 2'-O-Methyl-adenosine
  modified_base 76: mod_base = OTHER; note = 2'-O-Methyl-adenosine
  modified_base 77: mod_base = OTHER; note = 2'-O-Methyl-adenosine
  modified_base 78: mod_base = OTHER; note = 2'-O-Methyl-adenosine
  modified_base 79: mod_base = OTHER; note = 2'-O-Methyl-guanosine
  modified_base 80: mod_base = OTHER; note = 2'-O-Methyl-uridine
  modified_base 81: mod_base = OTHER; note = 2'-O-Methyl-guanosine
  modified_base 83: mod_base = OTHER; note = 2'-O-Methyl-cytidine
  modified_base 84: mod_base = OTHER; note = 2'-O-Methyl-adenosine
  modified_base 85: mod_base = OTHER; note = 2'-O-Methyl-cytidine
  modified_base 86: mod_base = OTHER; note = 2'-O-Methyl-cytidine
  modified_base 87: mod_base = OTHER; note = 2'-O-Methyl-guanosine
  modified_base 88: mod_base = OTHER; note = 2'-O-Methyl-adenosine
  modified_base 89: mod_base = OTHER; note = 2'-O-Methyl-guanosine
  modified_base 90: mod_base = OTHER; note = 2'-O-Methyl-uridine
  modified_base 91: mod_base = OTHER; note = 2'-O-Methyl-cytidine
  modified_base 92: mod_base = OTHER; note = 2'-O-Methyl-guanosine
  modified_base 93: mod_base = OTHER; note = 2'-O-Methyl-guanosine
  modified_base 94: mod_base = OTHER; note = 2'-O-Methyl-uridine
  modified_base 95: mod_base = OTHER; note = 2'-O-Methyl-guanosine
  modified_base 96: mod_base = OTHER; note = 2'-O-Methyl-cytidine
  modified_base 97: mod_base = OTHER; note = 2'-O-Methyl-uridine phosphorothioate
  modified_base 98: mod_base = OTHER; note = 2'-O-Methyl-uridine phosphorothioate
  modified_base 99: mod_base = OTHER; note = 2'-O-Methyl-uridine phosphorothioate
  modified_base 100: mod_base = OTHER; note = 2'-O-Methyl-uridine
caggttccntgggatgctctgttttagagctagaaatagcaagttaaaataaggctngtccgttatcaacttgaaaaagtggcaccgagtcggtgctttt

SEQ ID NO: 1912 - RNA, 100 nt, synthetic construct
  source 1..100: mol_type = other RNA; note = Description of Artificial Sequence: Synthetic polynucleotide
  modified_base 1: mod_base = OTHER; note = 2'-O-Methyl-cytidine phosphorothioate
  modified_base 2: mod_base = OTHER; note = 2'-O-Methyl-adenosine phosphorothioate
  modified_base 3: mod_base = OTHER; note = 2'-O-Methyl-guanosine phosphorothioate
  modified_base 9: mod_base = OTHER; note = Nebularine - ribonebularine
  modified_base 21: mod_base = OTHER; note = 2'-O-Methyl-guanosine
  modified_base 28: mod_base = OTHER; note = 2'-O-Methyl-adenosine
  modified_base 29: mod_base = OTHER; note = 2'-O-Methyl-guanosine
  modified_base 30: mod_base = OTHER; note = 2'-O-Methyl-cytidine
  modified_base 31: mod_base = OTHER; note = 2'-O-Methyl-uridine
  modified_base 32: mod_base = OTHER; note = 2'-O-Methyl-adenosine
  modified_base 33: mod_base = OTHER; note = 2'-O-Methyl-guanosine
  modified_base 34: mod_base = OTHER; note = 2'-O-Methyl-adenosine
  modified_base 35: mod_base = OTHER; note = 2'-O-Methyl-adenosine
  modified_base 36: mod_base = OTHER; note = 2'-O-Methyl-adenosine
  modified_base 37: mod_base = OTHER; note = 2'-O-Methyl-uridine
  modified_base 38: mod_base = OTHER; note = 2'-O-Methyl-adenosine
  modified_base 39: mod_base = OTHER; note = 2'-O-Methyl-guanosine
  modified_base 40: mod_base = OTHER; note = 2'-O-Methyl-cytidine
  modified_base 41: mod_base = OTHER; note = 2'-O-Methyl-adenosine
  modified_base 42: mod_base = OTHER; note = 2'-O-Methyl-adenosine
  modified_base 46: mod_base = OTHER; note = 2'-O-Methyl-adenosine
  modified_base 48: mod_base = OTHER; note = 2'-O-Methyl-adenosine
  modified_base 50: mod_base = OTHER; note = 2'-O-Methyl-uridine
  modified_base 52: mod_base = OTHER; note = 2'-O-Methyl-adenosine
  modified_base 53: mod_base = OTHER; note = 2'-O-Methyl-guanosine
  modified_base 54: mod_base = OTHER; note = 2'-O-Methyl-guanosine
  modified_base 55: mod_base = OTHER; note = 2'-O-Methyl-cytidine
  modified_base 56: mod_base = OTHER; note = 2'-O-Methyl-uridine
  modified_base 57: mod_base = OTHER; note = 2'-O-Methyl-adenosine
  modified_base 60: mod_base = OTHER; note = 2'-O-Methyl-cytidine
  modified_base 61: mod_base = OTHER; note = 2'-O-Methyl-cytidine
  modified_base 65: mod_base = OTHER; note = Nebularine - ribonebularine
  modified_base 66: mod_base = OTHER; note = 2'-O-Methyl-uridine
  modified_base 67: mod_base = OTHER; note = 2'-O-Methyl-cytidine
  modified_base 70: mod_base = OTHER; note = 2'-O-Methyl-cytidine
  modified_base 71: mod_base = OTHER; note = 2'-O-Methyl-uridine
  modified_base 72: mod_base = OTHER; note = 2'-O-Methyl-uridine
  modified_base 73: mod_base = OTHER; note = 2'-O-Methyl-guanosine
  modified_base 74: mod_base = OTHER; note = 2'-O-Methyl-adenosine
  modified_base 75: mod_base = OTHER; note = 2'-O-Methyl-adenosine
  modified_base 76: mod_base = OTHER; note = 2'-O-Methyl-adenosine
  modified_base 77: mod_base = OTHER; note = 2'-O-Methyl-adenosine
  modified_base 78: mod_base = OTHER; note = 2'-O-Methyl-adenosine
  modified_base 79: mod_base = OTHER; note = 2'-O-Methyl-guanosine
  modified_base 80: mod_base = OTHER; note = 2'-O-Methyl-uridine
  modified_base 81: mod_base = OTHER; note = 2'-O-Methyl-guanosine
  modified_base 83: mod_base = OTHER; note = 2'-O-Methyl-cytidine
  modified_base 84: mod_base = OTHER; note = 2'-O-Methyl-adenosine
  modified_base 85: mod_base = OTHER; note = 2'-O-Methyl-cytidine
  modified_base 86: mod_base = OTHER; note = 2'-O-Methyl-cytidine
  modified_base 87: mod_base = OTHER; note = 2'-O-Methyl-guanosine
  modified_base 88: mod_base = OTHER; note = 2'-O-Methyl-adenosine
  modified_base 89: mod_base = OTHER; note = 2'-O-Methyl-guanosine
  modified_base 90: mod_base = OTHER; note = 2'-O-Methyl-uridine
  modified_base 91: mod_base = OTHER; note = 2'-O-Methyl-cytidine
  modified_base 92: mod_base = OTHER; note = 2'-O-Methyl-guanosine
  modified_base 93: mod_base = OTHER; note = 2'-O-Methyl-guanosine
  modified_base 94: mod_base = OTHER; note = 2'-O-Methyl-uridine
  modified_base 95: mod_base = OTHER; note = 2'-O-Methyl-guanosine
  modified_base 96: mod_base = OTHER; note = 2'-O-Methyl-cytidine
  modified_base 97: mod_base = OTHER; note = 2'-O-Methyl-uridine phosphorothioate
  modified_base 98: mod_base = OTHER; note = 2'-O-Methyl-uridine phosphorothioate
  modified_base 99: mod_base = OTHER; note = 2'-O-Methyl-uridine phosphorothioate
  modified_base 100: mod_base = OTHER; note = 2'-O-Methyl-uridine
caggttccntgggatgctctgttttagagctagaaatagcaagttaaaataaggctagtccgttntcaacttgaaaaagtggcaccgagtcggtgctttt

SEQ ID NO: 1913 - RNA, 100 nt, synthetic construct
  source 1..100: mol_type = other RNA; note = Description of Artificial Sequence: Synthetic polynucleotide
  modified_base 1: mod_base = OTHER; note = 2'-O-Methyl-cytidine phosphorothioate
  modified_base 2: mod_base = OTHER; note = 2'-O-Methyl-adenosine phosphorothioate
  modified_base 3: mod_base = OTHER; note = 2'-O-Methyl-guanosine phosphorothioate
  modified_base 9: mod_base = OTHER; note = Nebularine - ribonebularine
  modified_base 21: mod_base = OTHER; note = 2'-O-Methyl-guanosine
  modified_base 28: mod_base = OTHER; note = 2'-O-Methyl-adenosine
  modified_base 29: mod_base = OTHER; note = 2'-O-Methyl-guanosine
  modified_base 30: mod_base = OTHER; note = 2'-O-Methyl-cytidine
  modified_base 31: mod_base = OTHER; note = 2'-O-Methyl-uridine
  modified_base 32: mod_base = OTHER; note = 2'-O-Methyl-adenosine
  modified_base 33: mod_base = OTHER; note = 2'-O-Methyl-guanosine
  modified_base 34: mod_base = OTHER; note = Nebularine - ribonebularine
  modified_base 35: mod_base = OTHER; note = 2'-O-Methyl-adenosine
  modified_base 36: mod_base = OTHER; note = 2'-O-Methyl-adenosine
  modified_base 37: mod_base = OTHER; note = 2'-O-Methyl-uridine
  modified_base 38: mod_base = OTHER; note = 2'-O-Methyl-adenosine
  modified_base 39: mod_base = OTHER; note = 2'-O-Methyl-guanosine
  modified_base 40: mod_base = OTHER; note = 2'-O-Methyl-cytidine
  modified_base 41: mod_base = OTHER; note = 2'-O-Methyl-adenosine
  modified_base 42: mod_base = OTHER; note = 2'-O-Methyl-adenosine
  modified_base 46: mod_base = OTHER; note = 2'-O-Methyl-adenosine
  modified_base 48: mod_base = OTHER; note = 2'-O-Methyl-adenosine
  modified_base 50: mod_base = OTHER; note = 2'-O-Methyl-uridine
  modified_base 52: mod_base = OTHER; note = 2'-O-Methyl-adenosine
  modified_base 53: mod_base = OTHER; note = 2'-O-Methyl-guanosine
  modified_base 54: mod_base = OTHER; note = 2'-O-Methyl-guanosine
  modified_base 55: mod_base = OTHER; note = 2'-O-Methyl-cytidine
  modified_base 56: mod_base = OTHER; note = 2'-O-Methyl-uridine
  modified_base 57: mod_base = OTHER; note = Nebularine - ribonebularine
  modified_base 60: mod_base = OTHER; note = 2'-O-Methyl-cytidine
  modified_base 61: mod_base = OTHER; note = 2'-O-Methyl-cytidine
  modified_base 65: mod_base = OTHER; note = Nebularine - ribonebularine
  modified_base 66: mod_base = OTHER; note = 2'-O-Methyl-uridine
  modified_base 67: mod_base = OTHER; note = 2'-O-Methyl-cytidine
  modified_base 70: mod_base = OTHER; note = 2'-O-Methyl-cytidine
  modified_base 71: mod_base = OTHER; note = 2'-O-Methyl-uridine
  modified_base 72: mod_base = OTHER; note = 2'-O-Methyl-uridine
  modified_base 73: mod_base = OTHER; note = 2'-O-Methyl-guanosine
  modified_base 74: mod_base = OTHER; note = 2'-O-Methyl-adenosine
  modified_base 75: mod_base = OTHER; note = 2'-O-Methyl-adenosine
  modified_base 76: mod_base = OTHER; note = 2'-O-Methyl-adenosine
  modified_base 77: mod_base = OTHER; note = 2'-O-Methyl-adenosine
  modified_base 78: mod_base = OTHER; note = 2'-O-Methyl-adenosine
  modified_base 79: mod_base = OTHER; note = 2'-O-Methyl-guanosine
  modified_base 80: mod_base = OTHER; note = 2'-O-Methyl-uridine
  modified_base 81: mod_base = OTHER; note = 2'-O-Methyl-guanosine
  modified_base 83: mod_base = OTHER; note = 2'-O-Methyl-cytidine
  modified_base 84: mod_base = OTHER; note = 2'-O-Methyl-adenosine
  modified_base 85: mod_base = OTHER; note = 2'-O-Methyl-cytidine
  modified_base 86: mod_base = OTHER; note = 2'-O-Methyl-cytidine
  modified_base 87: mod_base = OTHER; note = 2'-O-Methyl-guanosine
  modified_base 88: mod_base = OTHER; note = 2'-O-Methyl-adenosine
  modified_base 89: mod_base = OTHER; note = 2'-O-Methyl-guanosine
  modified_base 90: mod_base = OTHER; note = 2'-O-Methyl-uridine
  modified_base 91: mod_base = OTHER; note = 2'-O-Methyl-cytidine
  modified_base 92: mod_base = OTHER; note = 2'-O-Methyl-guanosine
  modified_base 93: mod_base = OTHER; note = 2'-O-Methyl-guanosine
  modified_base 94: mod_base = OTHER; note = 2'-O-Methyl-uridine
  modified_base 95: mod_base = OTHER; note = 2'-O-Methyl-guanosine
  modified_base 96: mod_base = OTHER; note = 2'-O-Methyl-cytidine
  modified_base 97: mod_base = OTHER; note = 2'-O-Methyl-uridine phosphorothioate
  modified_base 98: mod_base = OTHER; note = 2'-O-Methyl-uridine phosphorothioate
  modified_base 99: mod_base = OTHER; note = 2'-O-Methyl-uridine phosphorothioate
  modified_base 100: mod_base = OTHER; note = 2'-O-Methyl-uridine
caggttccntgggatgctctgttttagagctagnaatagcaagttaaaataaggctngtccgttntcaacttgaaaaagtggcaccgagtcggtgctttt

SEQ ID NO: 1914 - RNA, 100 nt, synthetic construct
  source 1..100: mol_type = other RNA; note = Description of Artificial Sequence: Synthetic polynucleotide
  modified_base 1: mod_base = OTHER; note = 2'-O-Methyl-cytidine phosphorothioate
  modified_base 2: mod_base = OTHER; note = 2'-O-Methyl-adenosine phosphorothioate
  modified_base 3: mod_base = OTHER; note = 2'-O-Methyl-guanosine phosphorothioate
  modified_base 9: mod_base = OTHER; note = Nebularine - ribonebularine
  modified_base 21: mod_base = OTHER; note = 2'-O-Methyl-guanosine
  modified_base 28: mod_base = OTHER; note = Nebularine - ribonebularine
  modified_base 29: mod_base = OTHER; note = 2'-O-Methyl-guanosine
  modified_base 30: mod_base = OTHER; note = 2'-O-Methyl-cytidine
  modified_base 31: mod_base = OTHER; note = 2'-O-Methyl-uridine
  modified_base 32: mod_base = OTHER; note = 2'-O-Methyl-adenosine
  modified_base 33: mod_base = OTHER; note = 2'-O-Methyl-guanosine
  modified_base 34: mod_base = OTHER; note = Nebularine - ribonebularine
  modified_base 35: mod_base = OTHER; note = 2'-O-Methyl-adenosine
  modified_base 36: mod_base = OTHER; note = 2'-O-Methyl-adenosine
  modified_base 37: mod_base = OTHER; note = 2'-O-Methyl-uridine
  modified_base 38: mod_base = OTHER; note = 2'-O-Methyl-adenosine
  modified_base 39: mod_base = OTHER; note = 2'-O-Methyl-guanosine
  modified_base 40: mod_base = OTHER; note = 2'-O-Methyl-cytidine
  modified_base 41: mod_base = OTHER; note = 2'-O-Methyl-adenosine
  modified_base 42: mod_base = OTHER; note = Nebularine - ribonebularine
  modified_base 46: mod_base = OTHER; note = 2'-O-Methyl-adenosine
  modified_base 48: mod_base = OTHER; note = 2'-O-Methyl-adenosine
  modified_base 50: mod_base = OTHER; note = 2'-O-Methyl-uridine
  modified_base 52: mod_base = OTHER; note = 2'-O-Methyl-adenosine
  modified_base 53: mod_base = OTHER; note = 2'-O-Methyl-guanosine
  modified_base 54: mod_base = OTHER; note = 2'-O-Methyl-guanosine
  modified_base 55: mod_base = OTHER; note = 2'-O-Methyl-cytidine
  modified_base 56: mod_base = OTHER; note = 2'-O-Methyl-uridine
  modified_base 57: mod_base = OTHER; note = Nebularine - ribonebularine
  modified_base 60: mod_base = OTHER; note = 2'-O-Methyl-cytidine
  modified_base 61: mod_base = OTHER; note = 2'-O-Methyl-cytidine
  modified_base 65: mod_base = OTHER; note = Nebularine - ribonebularine
  modified_base 66: mod_base = OTHER; note = 2'-O-Methyl-uridine
  modified_base 67: mod_base = OTHER; note = 2'-O-Methyl-cytidine
  modified_base 70: mod_base = OTHER; note = 2'-O-Methyl-cytidine
  modified_base 71: mod_base = OTHER; note = 2'-O-Methyl-uridine
  modified_base 72: mod_base = OTHER; note = 2'-O-Methyl-uridine
  modified_base 73: mod_base = OTHER; note = 2'-O-Methyl-guanosine
  modified_base 74: mod_base = OTHER; note = 2'-O-Methyl-adenosine
  modified_base 75: mod_base = OTHER; note = 2'-O-Methyl-adenosine
  modified_base 76: mod_base = OTHER; note = 2'-O-Methyl-adenosine
  modified_base 77: mod_base = OTHER; note = 2'-O-Methyl-adenosine
  modified_base 78: mod_base = OTHER; note = 2'-O-Methyl-adenosine
  modified_base 79: mod_base = OTHER; note = 2'-O-Methyl-guanosine
  modified_base 80: mod_base = OTHER; note = 2'-O-Methyl-uridine
  modified_base 81: mod_base = OTHER; note = 2'-O-Methyl-guanosine
  modified_base 83: mod_base = OTHER; note = 2'-O-Methyl-cytidine
  modified_base 84: mod_base = OTHER; note = 2'-O-Methyl-adenosine
  modified_base 85: mod_base = OTHER; note = 2'-O-Methyl-cytidine
  modified_base 86: mod_base = OTHER; note = 2'-O-Methyl-cytidine
  modified_base 87: mod_base = OTHER; note = 2'-O-Methyl-guanosine
  modified_base 88: mod_base = OTHER; note = 2'-O-Methyl-adenosine
  modified_base 89: mod_base = OTHER; note = 2'-O-Methyl-guanosine
  modified_base 90: mod_base = OTHER; note = 2'-O-Methyl-uridine
  modified_base 91: mod_base = OTHER; note = 2'-O-Methyl-cytidine
  modified_base 92: mod_base = OTHER; note = 2'-O-Methyl-guanosine
  modified_base 93: mod_base = OTHER; note = 2'-O-Methyl-guanosine
  modified_base 94: mod_base = OTHER; note = 2'-O-Methyl-uridine
  modified_base 95: mod_base = OTHER; note = 2'-O-Methyl-guanosine
  modified_base 96: mod_base = OTHER; note = 2'-O-Methyl-cytidine
  modified_base 97: mod_base = OTHER; note = 2'-O-Methyl-uridine phosphorothioate
  modified_base 98: mod_base = OTHER; note = 2'-O-Methyl-uridine phosphorothioate
  modified_base 99: mod_base = OTHER; note = 2'-O-Methyl-uridine phosphorothioate
  modified_base 100: mod_base = OTHER; note = 2'-O-Methyl-uridine
caggttccntgggatgctctgttttagngctagnaatagcangttaaaataaggctngtccgttntcaacttgaaaaagtggcaccgagtcggtgctttt

SEQ ID NO: 1915 - RNA, 100 nt, synthetic construct
  source 1..100: mol_type = other RNA; note = Description of Artificial Sequence: Synthetic polynucleotide
  modified_base 1: mod_base = OTHER; note = 2'-O-Methyl-cytidine phosphorothioate
  modified_base 2: mod_base = OTHER; note = 2'-O-Methyl-adenosine phosphorothioate
  modified_base 3: mod_base = OTHER; note = 2'-O-Methyl-guanosine phosphorothioate
  modified_base 14: mod_base = OTHER; note = Nebularine - ribonebularine
  modified_base 21: mod_base = OTHER; note = 2'-O-Methyl-guanosine
  modified_base 28: mod_base = OTHER; note = 2'-O-Methyl-adenosine
  modified_base 29: mod_base = OTHER; note = 2'-O-Methyl-guanosine
  modified_base 30: mod_base = OTHER; note = 2'-O-Methyl-cytidine
  modified_base 31: mod_base = OTHER; note = 2'-O-Methyl-uridine
  modified_base 32: mod_base = OTHER; note = 2'-O-Methyl-adenosine
  modified_base 33: mod_base = OTHER; note = 2'-O-Methyl-guanosine
  modified_base 34: mod_base = OTHER; note = Nebularine - ribonebularine
  modified_base 35: mod_base = OTHER; note = 2'-O-Methyl-adenosine
  modified_base 36: mod_base = OTHER; note = 2'-O-Methyl-adenosine
  modified_base 37: mod_base = OTHER; note = 2'-O-Methyl-uridine
  modified_base 38: mod_base = OTHER; note = 2'-O-Methyl-adenosine
  modified_base 39: mod_base = OTHER; note = 2'-O-Methyl-guanosine
  modified_base 40: mod_base = OTHER; note = 2'-O-Methyl-cytidine
  modified_base 41: mod_base = OTHER; note = 2'-O-Methyl-adenosine
  modified_base 42: mod_base = OTHER; note = 2'-O-Methyl-adenosine
  modified_base 46: mod_base = OTHER; note = 2'-O-Methyl-adenosine
  modified_base 48: mod_base = OTHER; note = 2'-O-Methyl-adenosine
  modified_base 50: mod_base = OTHER; note = 2'-O-Methyl-uridine
  modified_base 52: mod_base = OTHER; note = 2'-O-Methyl-adenosine
  modified_base 53: mod_base = OTHER; note = 2'-O-Methyl-guanosine
  modified_base 54: mod_base = OTHER; note = 2'-O-Methyl-guanosine
  modified_base 55: mod_base = OTHER; note = 2'-O-Methyl-cytidine
  modified_base 56: mod_base = OTHER; note = 2'-O-Methyl-uridine
  modified_base 57: mod_base = OTHER; note = 2'-O-Methyl-adenosine
  modified_base 60: mod_base = OTHER; note = 2'-O-Methyl-cytidine
  modified_base 61: mod_base = OTHER; note = 2'-O-Methyl-cytidine
  modified_base 66: mod_base = OTHER; note = 2'-O-Methyl-uridine
  modified_base 67: mod_base = OTHER; note = 2'-O-Methyl-cytidine
  modified_base 70: mod_base = OTHER; note = 2'-O-Methyl-cytidine
  modified_base 71: mod_base = OTHER; note = 2'-O-Methyl-uridine
  modified_base 72: mod_base = OTHER; note = 2'-O-Methyl-uridine
  modified_base 73: mod_base = OTHER; note = 2'-O-Methyl-guanosine
  modified_base 74: mod_base = OTHER; note = 2'-O-Methyl-adenosine
  modified_base 75: mod_base = OTHER; note = 2'-O-Methyl-adenosine
  modified_base 76: mod_base = OTHER; note = 2'-O-Methyl-adenosine
  modified_base 77: mod_base = OTHER; note = 2'-O-Methyl-adenosine
  modified_base 78: mod_base = OTHER; note = 2'-O-Methyl-adenosine
  modified_base 79: mod_base = OTHER; note = 2'-O-Methyl-guanosine
  modified_base 80: mod_base = OTHER; note = 2'-O-Methyl-uridine
  modified_base 81: mod_base = OTHER; note = 2'-O-Methyl-guanosine
  modified_base 83: mod_base = OTHER; note = 2'-O-Methyl-cytidine
  modified_base 84: mod_base = OTHER; note = 2'-O-Methyl-adenosine
  modified_base 85: mod_base = OTHER; note = 2'-O-Methyl-cytidine
  modified_base 86: mod_base = OTHER; note = 2'-O-Methyl-cytidine
  modified_base 87: mod_base = OTHER; note = 2'-O-Methyl-guanosine
  modified_base 88: mod_base = OTHER; note = 2'-O-Methyl-adenosine
  modified_base 89: mod_base = OTHER; note = 2'-O-Methyl-guanosine
  modified_base 90: mod_base = OTHER; note = 2'-O-Methyl-uridine
  modified_base 91: mod_base = OTHER; note = 2'-O-Methyl-cytidine
  modified_base 92: mod_base = OTHER; note = 2'-O-Methyl-guanosine
  modified_base 93: mod_base = OTHER; note = 2'-O-Methyl-guanosine
  modified_base 94: mod_base = OTHER; note = 2'-O-Methyl-uridine
  modified_base 95: mod_base = OTHER; note = 2'-O-Methyl-guanosine
  modified_base 96: mod_base = OTHER; note = 2'-O-Methyl-cytidine
  modified_base 97: mod_base = OTHER; note = 2'-O-Methyl-uridine phosphorothioate
  modified_base 98: mod_base = OTHER; note = 2'-O-Methyl-uridine phosphorothioate
  modified_base 99: mod_base = OTHER; note = 2'-O-Methyl-uridine phosphorothioate
  modified_base 100: mod_base = OTHER; note = 2'-O-Methyl-uridine
caggttccatgggntgctctgttttagagctagnaatagcaagttaaaataaggctagtccgttatcaacttgaaaaagtggcaccgagtcggtgctttt

SEQ ID NO: 1916 - RNA, 100 nt, synthetic construct
  source 1..100: mol_type = other RNA; note = Description of Artificial Sequence: Synthetic polynucleotide
  modified_base 1: mod_base = OTHER; note = 2'-O-Methyl-cytidine phosphorothioate
  modified_base 2: mod_base = OTHER; note = 2'-O-Methyl-adenosine phosphorothioate
  modified_base 3: mod_base = OTHER; note = 2'-O-Methyl-guanosine phosphorothioate
  modified_base 14: mod_base = OTHER; note = Nebularine - ribonebularine
  modified_base 21: mod_base = OTHER; note = 2'-O-Methyl-guanosine
  modified_base 28: mod_base = OTHER; note = 2'-O-Methyl-adenosine
  modified_base 29: mod_base = OTHER; note = 2'-O-Methyl-guanosine
  modified_base 30: mod_base = OTHER; note = 2'-O-Methyl-cytidine
  modified_base 31: mod_base = OTHER; note = 2'-O-Methyl-uridine
  modified_base 32: mod_base = OTHER; note = 2'-O-Methyl-adenosine
  modified_base 33: mod_base = OTHER; note = 2'-O-Methyl-guanosine
  modified_base 34: mod_base = OTHER; note = Nebularine - ribonebularine
  modified_base 35: mod_base = OTHER; note = 2'-O-Methyl-adenosine
  modified_base 36: mod_base = OTHER; note = 2'-O-Methyl-adenosine
  modified_base 37: mod_base = OTHER; note = 2'-O-Methyl-uridine
  modified_base 38: mod_base = OTHER; note = 2'-O-Methyl-adenosine
  modified_base 39: mod_base = OTHER; note = 2'-O-Methyl-guanosine
  modified_base 40: mod_base = OTHER; note = 2'-O-Methyl-cytidine
  modified_base 41: mod_base = OTHER; note = 2'-O-Methyl-adenosine
  modified_base 42: mod_base = OTHER; note = 2'-O-Methyl-adenosine
  modified_base 46: mod_base = OTHER; note = 2'-O-Methyl-adenosine
  modified_base 48: mod_base = OTHER; note = 2'-O-Methyl-adenosine
  modified_base 50: mod_base = OTHER; note = 2'-O-Methyl-uridine
  modified_base 52: mod_base = OTHER; note = 2'-O-Methyl-adenosine
  modified_base 53: mod_base = OTHER; note = 2'-O-Methyl-guanosine
  modified_base 54: mod_base = OTHER; note = 2'-O-Methyl-guanosine
  modified_base 55: mod_base = OTHER; note = 2'-O-Methyl-cytidine
  modified_base 56: mod_base = OTHER; note = 2'-O-Methyl-uridine
  modified_base 57: mod_base = OTHER; note = Nebularine - ribonebularine
  modified_base 60: mod_base = OTHER; note = 2'-O-Methyl-cytidine
  modified_base 61: mod_base = OTHER; note = 2'-O-Methyl-cytidine
  modified_base 66: mod_base = OTHER; note = 2'-O-Methyl-uridine
  modified_base 67: mod_base = OTHER; note = 2'-O-Methyl-cytidine
  modified_base 70: mod_base = OTHER; note = 2'-O-Methyl-cytidine
  modified_base 71: mod_base = OTHER; note = 2'-O-Methyl-uridine
  modified_base 72: mod_base = OTHER; note = 2'-O-Methyl-uridine
  modified_base 73: mod_base = OTHER; note = 2'-O-Methyl-guanosine
  modified_base 74: mod_base = OTHER; note = 2'-O-Methyl-adenosine
  modified_base 75: mod_base = OTHER; note = 2'-O-Methyl-adenosine
  modified_base 76: mod_base = OTHER; note = 2'-O-Methyl-adenosine
  modified_base 77: mod_base = OTHER; note = 2'-O-Methyl-adenosine
  modified_base 78: mod_base = OTHER; note = 2'-O-Methyl-adenosine
  modified_base 79: mod_base = OTHER; note = 2'-O-Methyl-guanosine
  modified_base 80: mod_base = OTHER; note = 2'-O-Methyl-uridine
  modified_base 81: mod_base = OTHER; note = 2'-O-Methyl-guanosine
  modified_base 83: mod_base = OTHER; note = 2'-O-Methyl-cytidine
  modified_base 84: mod_base = OTHER; note = 2'-O-Methyl-adenosine
  modified_base 85: mod_base = OTHER; note = 2'-O-Methyl-cytidine
  modified_base 86: mod_base = OTHER; note = 2'-O-Methyl-cytidine
  modified_base 87: mod_base = OTHER; note = 2'-O-Methyl-guanosine
  modified_base 88: mod_base = OTHER; note = 2'-O-Methyl-adenosine
  modified_base 89: mod_base = OTHER; note = 2'-O-Methyl-guanosine
  modified_base 90: mod_base = OTHER; note = 2'-O-Methyl-uridine
  modified_base 91: mod_base = OTHER; note = 2'-O-Methyl-cytidine
  modified_base 92: mod_base = OTHER; note = 2'-O-Methyl-guanosine
  modified_base 93: mod_base = OTHER; note = 2'-O-Methyl-guanosine
  modified_base 94: mod_base = OTHER; note = 2'-O-Methyl-uridine
  modified_base 95: mod_base = OTHER; note = 2'-O-Methyl-guanosine
  modified_base 96: mod_base = OTHER; note = 2'-O-Methyl-cytidine
  modified_base 97: mod_base = OTHER; note = 2'-O-Methyl-uridine phosphorothioate
  modified_base 98: mod_base = OTHER; note = 2'-O-Methyl-uridine phosphorothioate
  modified_base 99: mod_base = OTHER; note = 2'-O-Methyl-uridine phosphorothioate
  modified_base 100: mod_base = OTHER; note = 2'-O-Methyl-uridine
caggttccatgggntgctctgttttagagctagnaatagcaagttaaaataaggctngtccgttatcaacttgaaaaagtggcaccgagtcggtgctttt

SEQ ID NO: 1917 - RNA, 100 nt, synthetic construct
  source 1..100: mol_type = other RNA; note = Description of Artificial Sequence: Synthetic polynucleotide
  modified_base 1: mod_base = OTHER; note = 2'-O-Methyl-cytidine phosphorothioate
  modified_base 2: mod_base = OTHER; note = 2'-O-Methyl-adenosine phosphorothioate
  modified_base 3: mod_base = OTHER; note = 2'-O-Methyl-guanosine phosphorothioate
  modified_base 14: mod_base = OTHER; note = Nebularine - ribonebularine
  modified_base 21: mod_base = OTHER; note = 2'-O-Methyl-guanosine
  modified_base 28: mod_base = OTHER; note = 2'-O-Methyl-adenosine
  modified_base 29: mod_base = OTHER; note = 2'-O-Methyl-guanosine
  modified_base 30: mod_base = OTHER; note = 2'-O-Methyl-cytidine
  modified_base 31: mod_base = OTHER; note = 2'-O-Methyl-uridine
  modified_base 32: mod_base = OTHER; note = 2'-O-Methyl-adenosine
  modified_base 33: mod_base = OTHER; note = 2'-O-Methyl-guanosine
  modified_base 34: mod_base = OTHER; note = 2'-O-Methyl-adenosine
  modified_base 35: mod_base = OTHER; note = 2'-O-Methyl-adenosine
  modified_base 36: mod_base = OTHER; note = 2'-O-Methyl-adenosine
  modified_base 37: mod_base = OTHER; note = 2'-O-Methyl-uridine
  modified_base 38: mod_base = OTHER; note = 2'-O-Methyl-adenosine
  modified_base 39: mod_base = OTHER; note = 2'-O-Methyl-guanosine
  modified_base 40: mod_base = OTHER; note = 2'-O-Methyl-cytidine
  modified_base 41: mod_base = OTHER; note = 2'-O-Methyl-adenosine
  modified_base 42: mod_base = OTHER; note = 2'-O-Methyl-adenosine
  modified_base 46: mod_base = OTHER; note = 2'-O-Methyl-adenosine
  modified_base 48: mod_base = OTHER; note = 2'-O-Methyl-adenosine
  modified_base 50: mod_base = OTHER; note = 2'-O-Methyl-uridine
  modified_base 52: mod_base = OTHER; note = 2'-O-Methyl-adenosine
  modified_base 53: mod_base = OTHER; note = 2'-O-Methyl-guanosine
  modified_base 54: mod_base = OTHER; note = 2'-O-Methyl-guanosine
  modified_base 55: mod_base = OTHER; note = 2'-O-Methyl-cytidine
  modified_base 56: mod_base = OTHER; note = 2'-O-Methyl-uridine
  modified_base 57: mod_base = OTHER; note = Nebularine - ribonebularine
  modified_base 60: mod_base = OTHER; note = 2'-O-Methyl-cytidine
  modified_base 61: mod_base = OTHER; note = 2'-O-Methyl-cytidine
  modified_base 66: mod_base = OTHER; note = 2'-O-Methyl-uridine
  modified_base 67: mod_base = OTHER; note = 2'-O-Methyl-cytidine
  modified_base 70: mod_base = OTHER; note = 2'-O-Methyl-cytidine
  modified_base 71: mod_base = OTHER; note = 2'-O-Methyl-uridine
  modified_base 72: mod_base = OTHER; note = 2'-O-Methyl-uridine
  modified_base 73: mod_base = OTHER; note = 2'-O-Methyl-guanosine
  modified_base 74: mod_base = OTHER; note = 2'-O-Methyl-adenosine
  modified_base 75: mod_base = OTHER; note = 2'-O-Methyl-adenosine
  modified_base 76: mod_base = OTHER; note = 2'-O-Methyl-adenosine
  modified_base 77: mod_base = OTHER; note = 2'-O-Methyl-adenosine
  modified_base 78: mod_base = OTHER; note = 2'-O-Methyl-adenosine
  modified_base 79: mod_base = OTHER; note = 2'-O-Methyl-guanosine
  modified_base 80: mod_base = OTHER; note = 2'-O-Methyl-uridine
  modified_base 81: mod_base = OTHER; note = 2'-O-Methyl-guanosine
  modified_base 83: mod_base = OTHER; note = 2'-O-Methyl-cytidine
  modified_base 84: mod_base = OTHER; note = 2'-O-Methyl-adenosine
  modified_base 85: mod_base = OTHER; note = 2'-O-Methyl-cytidine
  modified_base 86: mod_base = OTHER; note = 2'-O-Methyl-cytidine
  modified_base 87: mod_base = OTHER; note = 2'-O-Methyl-guanosine
  modified_base 88: mod_base = OTHER; note = 2'-O-Methyl-adenosine
  modified_base 89: mod_base = OTHER; note = 2'-O-Methyl-guanosine
  modified_base 90: mod_base = OTHER; note = 2'-O-Methyl-uridine
  modified_base 91: mod_base = OTHER; note = 2'-O-Methyl-cytidine
  modified_base 92: mod_base = OTHER; note = 2'-O-Methyl-guanosine
  modified_base 93: mod_base = OTHER; note = 2'-O-Methyl-guanosine
  modified_base 94: mod_base = OTHER; note = 2'-O-Methyl-uridine
  modified_base 95: mod_base = OTHER; note = 2'-O-Methyl-guanosine
  modified_base 96: mod_base = OTHER; note = 2'-O-Methyl-cytidine
  modified_base 97: mod_base = OTHER; note = 2'-O-Methyl-uridine phosphorothioate
  modified_base 98: mod_base = OTHER; note = 2'-O-Methyl-uridine phosphorothioate
  modified_base 99: mod_base = OTHER; note = 2'-O-Methyl-uridine phosphorothioate
  modified_base 100: mod_base = OTHER; note = 2'-O-Methyl-uridine
caggttccatgggntgctctgttttagagctagaaatagcaagttaaaataaggctngtccgttatcaacttgaaaaagtggcaccgagtcggtgctttt

SEQ ID NO: 1918 - RNA, 100 nt, synthetic construct
  source 1..100: mol_type = other RNA; note = Description of Artificial Sequence: Synthetic polynucleotide
  modified_base 1: mod_base = OTHER; note = 2'-O-Methyl-cytidine phosphorothioate
  modified_base 2: mod_base = OTHER; note = 2'-O-Methyl-adenosine phosphorothioate
  modified_base 3: mod_base = OTHER; note = 2'-O-Methyl-guanosine phosphorothioate
  modified_base 14: mod_base = OTHER; note = Nebularine - ribonebularine
  modified_base 21: mod_base = OTHER; note = 2'-O-Methyl-guanosine
  modified_base 28: mod_base = OTHER; note = 2'-O-Methyl-adenosine
  modified_base 29: mod_base = OTHER; note = 2'-O-Methyl-guanosine
  modified_base 30: mod_base = OTHER; note = 2'-O-Methyl-cytidine
  modified_base 31: mod_base = OTHER; note = 2'-O-Methyl-uridine
  modified_base 32: mod_base = OTHER; note = 2'-O-Methyl-adenosine
  modified_base 33: mod_base = OTHER; note = 2'-O-Methyl-guanosine
  modified_base 34: mod_base = OTHER; note = 2'-O-Methyl-adenosine
  modified_base 35: mod_base = OTHER; note = 2'-O-Methyl-adenosine
  modified_base 36: mod_base = OTHER; note = 2'-O-Methyl-adenosine
  modified_base 37: mod_base = OTHER; note = 2'-O-Methyl-uridine
  modified_base 38: mod_base = OTHER; note = 2'-O-Methyl-adenosine
  modified_base 39: mod_base = OTHER; note = 2'-O-Methyl-guanosine
  modified_base 40: mod_base = OTHER; note = 2'-O-Methyl-cytidine
  modified_base 41: mod_base = OTHER; note = 2'-O-Methyl-adenosine
  modified_base 42: mod_base = OTHER; note = 2'-O-Methyl-adenosine
  modified_base 46: mod_base = OTHER; note = 2'-O-Methyl-adenosine
  modified_base 48: mod_base = OTHER; note = 2'-O-Methyl-adenosine
  modified_base 50: mod_base = OTHER; note = 2'-O-Methyl-uridine
  modified_base 52: mod_base = OTHER; note = 2'-O-Methyl-adenosine
  modified_base 53: mod_base = OTHER; note = 2'-O-Methyl-guanosine
  modified_base 54: mod_base = OTHER; note = 2'-O-Methyl-guanosine
  modified_base 55: mod_base = OTHER; note = 2'-O-Methyl-cytidine
  modified_base 56: mod_base = OTHER; note = 2'-O-Methyl-uridine
  modified_base 57: mod_base = OTHER; note = 2'-O-Methyl-adenosine
  modified_base 60: mod_base = OTHER; note = 2'-O-Methyl-cytidine
  modified_base 61: mod_base = OTHER; note = 2'-O-Methyl-cytidine
  modified_base 65: mod_base = OTHER; note = Nebularine - ribonebularine
  modified_base 66: mod_base = OTHER; note = 2'-O-Methyl-uridine
  modified_base 67: mod_base = OTHER; note = 2'-O-Methyl-cytidine
  modified_base 70: mod_base = OTHER; note = 2'-O-Methyl-cytidine
  modified_base 71: mod_base = OTHER; note = 2'-O-Methyl-uridine
  modified_base 72: mod_base = OTHER; note = 2'-O-Methyl-uridine
  modified_base 73: mod_base = OTHER; note = 2'-O-Methyl-guanosine
  modified_base 74: mod_base = OTHER; note = 2'-O-Methyl-adenosine
  modified_base 75: mod_base = OTHER; note = 2'-O-Methyl-adenosine
  modified_base 76: mod_base = OTHER; note = 2'-O-Methyl-adenosine
  modified_base 77: mod_base = OTHER; note = 2'-O-Methyl-adenosine
  modified_base 78: mod_base = OTHER; note = 2'-O-Methyl-adenosine
  modified_base 79: mod_base = OTHER; note = 2'-O-Methyl-guanosine
  modified_base 80: mod_base = OTHER; note = 2'-O-Methyl-uridine
  modified_base 81: mod_base = OTHER; note = 2'-O-Methyl-guanosine
  modified_base 83: mod_base = OTHER; note = 2'-O-Methyl-cytidine
  modified_base 84: mod_base = OTHER; note = 2'-O-Methyl-adenosine
  modified_base 85: mod_base = OTHER; note = 2'-O-Methyl-cytidine
  modified_base 86: mod_base = OTHER; note = 2'-O-Methyl-cytidine
  modified_base 87: mod_base = OTHER; note = 2'-O-Methyl-guanosine
  modified_base 88: mod_base = OTHER; note = 2'-O-Methyl-adenosine
  modified_base 89: mod_base = OTHER; note = 2'-O-Methyl-guanosine
  modified_base 90: mod_base = OTHER; note = 2'-O-Methyl-uridine
  modified_base 91: mod_base = OTHER; note = 2'-O-Methyl-cytidine
  modified_base 92: mod_base = OTHER; note = 2'-O-Methyl-guanosine
  modified_base 93: mod_base = OTHER; note = 2'-O-Methyl-guanosine
  modified_base 94: mod_base = OTHER; note = 2'-O-Methyl-uridine
  modified_base 95: mod_base = OTHER; note = 2'-O-Methyl-guanosine
  modified_base 96: mod_base = OTHER; note = 2'-O-Methyl-cytidine
  modified_base 97: mod_base = OTHER; note = 2'-O-Methyl-uridine phosphorothioate
  modified_base 98: mod_base = OTHER; note = 2'-O-Methyl-uridine phosphorothioate
  modified_base 99: mod_base = OTHER; note = 2'-O-Methyl-uridine phosphorothioate
  modified_base 100: mod_base = OTHER; note = 2'-O-Methyl-uridine
caggttccatgggntgctctgttttagagctagaaatagcaagttaaaataaggctagtccgttntcaacttgaaaaagtggcaccgagtcggtgctttt

SEQ ID NO: 1919 - RNA, 100 nt, synthetic construct
  source 1..100: mol_type = other RNA; note = Description of Artificial Sequence: Synthetic polynucleotide
  modified_base 1: mod_base = OTHER; note = 2'-O-Methyl-cytidine phosphorothioate
  modified_base 2: mod_base = OTHER; note = 2'-O-Methyl-adenosine phosphorothioate
  modified_base 3: mod_base = OTHER; note = 2'-O-Methyl-guanosine phosphorothioate
  modified_base 14: mod_base = OTHER; note = Nebularine - ribonebularine
  modified_base 21: mod_base = OTHER; note = 2'-O-Methyl-guanosine
  modified_base 28: mod_base = OTHER; note = 2'-O-Methyl-adenosine
  modified_base 29: mod_base = OTHER; note = 2'-O-Methyl-guanosine
  modified_base 30: mod_base = OTHER; note = 2'-O-Methyl-cytidine
  modified_base 31: mod_base = OTHER; note = 2'-O-Methyl-uridine
  modified_base 32: mod_base = OTHER; note = 2'-O-Methyl-adenosine
  modified_base 33: mod_base = OTHER; note = 2'-O-Methyl-guanosine
  modified_base 34: mod_base = OTHER; note = Nebularine - ribonebularine
  modified_base 35: mod_base = OTHER; note = 2'-O-Methyl-adenosine
  modified_base 36: mod_base = OTHER; note = 2'-O-Methyl-adenosine
  modified_base 37: mod_base = OTHER; note = 2'-O-Methyl-uridine
  modified_base 38: mod_base = OTHER; note = 2'-O-Methyl-adenosine
  modified_base 39: mod_base = OTHER; note = 2'-O-Methyl-guanosine
  modified_base 40: mod_base = OTHER; note = 2'-O-Methyl-cytidine
  modified_base 41: mod_base = OTHER; note = 2'-O-Methyl-adenosine
  modified_base 42: mod_base = OTHER; note = 2'-O-Methyl-adenosine
  modified_base 46: mod_base = OTHER; note = 2'-O-Methyl-adenosine
  modified_base 48: mod_base = OTHER; note = 2'-O-Methyl-adenosine
  modified_base 50: mod_base = OTHER; note = 2'-O-Methyl-uridine
  modified_base 52: mod_base = OTHER; note = 2'-O-Methyl-adenosine
  modified_base 53: mod_base = OTHER; note = 2'-O-Methyl-guanosine
  modified_base 54: mod_base = OTHER; note = 2'-O-Methyl-guanosine
  modified_base 55: mod_base = OTHER; note = 2'-O-Methyl-cytidine
  modified_base 56: mod_base = OTHER; note = 2'-O-Methyl-uridine
  modified_base 57: mod_base = OTHER; note = Nebularine - ribonebularine
  modified_base 60: mod_base = OTHER; note = 2'-O-Methyl-cytidine
  modified_base 61: mod_base = OTHER; note = 2'-O-Methyl-cytidine
  modified_base 65: mod_base = OTHER; note = Nebularine - ribonebularine
  modified_base 66: mod_base = OTHER; note = 2'-O-Methyl-uridine
  modified_base 67: mod_base = OTHER; note = 2'-O-Methyl-cytidine
  modified_base 70: mod_base = OTHER; note = 2'-O-Methyl-cytidine
  modified_base 71: mod_base = OTHER; note = 2'-O-Methyl-uridine
  modified_base 72: mod_base = OTHER; note = 2'-O-Methyl-uridine
  modified_base 73: mod_base = OTHER; note = 2'-O-Methyl-guanosine
  modified_base 74: mod_base = OTHER; note = 2'-O-Methyl-adenosine
  modified_base 75: mod_base = OTHER; note = 2'-O-Methyl-adenosine
  modified_base 76: mod_base = OTHER; note = 2'-O-Methyl-adenosine
  modified_base 77: mod_base = OTHER; note = 2'-O-Methyl-adenosine
  modified_base 78: mod_base = OTHER; note = 2'-O-Methyl-adenosine
  modified_base 79: mod_base = OTHER; note = 2'-O-Methyl-guanosine
  modified_base 80: mod_base = OTHER; note = 2'-O-Methyl-uridine
  modified_base 81: mod_base = OTHER; note = 2'-O-Methyl-guanosine
  modified_base 83: mod_base = OTHER; note = 2'-O-Methyl-cytidine
  modified_base 84: mod_base = OTHER; note = 2'-O-Methyl-adenosine
  modified_base 85: mod_base = OTHER; note = 2'-O-Methyl-cytidine
  modified_base 86: mod_base = OTHER; note = 2'-O-Methyl-cytidine
  modified_base 87: mod_base = OTHER; note = 2'-O-Methyl-guanosine
  modified_base 88: mod_base = OTHER; note = 2'-O-Methyl-adenosine
  modified_base 89: mod_base = OTHER; note = 2'-O-Methyl-guanosine
  modified_base 90: mod_base = OTHER; note = 2'-O-Methyl-uridine
  modified_base 91: mod_base = OTHER; note = 2'-O-Methyl-cytidine
  modified_base 92: mod_base = OTHER; note = 2'-O-Methyl-guanosine
  modified_base 93: mod_base = OTHER; note = 2'-O-Methyl-guanosine
  modified_base 94: mod_base = OTHER; note = 2'-O-Methyl-uridine
  modified_base 95: mod_base = OTHER; note = 2'-O-Methyl-guanosine
  modified_base 96: mod_base = OTHER; note = 2'-O-Methyl-cytidine
  modified_base 97: mod_base = OTHER; note = 2'-O-Methyl-uridine phosphorothioate
  modified_base 98: mod_base = OTHER; note = 2'-O-Methyl-uridine phosphorothioate
  modified_base 99: mod_base = OTHER; note = 2'-O-Methyl-uridine phosphorothioate
  modified_base 100: mod_base = OTHER; note = 2'-O-Methyl-uridine
caggttccatgggntgctctgttttagagctagnaatagcaagttaaaataaggctngtccgttntcaacttgaaaaagtggcaccgagtcggtgctttt

SEQ ID NO: 1920 - RNA, 100 nt, synthetic construct
  source 1..100: mol_type = other RNA; note = Description of Artificial Sequence: Synthetic polynucleotide
  modified_base 1: mod_base = OTHER; note = 2'-O-Methyl-cytidine phosphorothioate
  modified_base 2: mod_base = OTHER; note = 2'-O-Methyl-adenosine phosphorothioate
  modified_base 3: mod_base = OTHER; note = 2'-O-Methyl-guanosine phosphorothioate
  modified_base 14: mod_base = OTHER; note = Nebularine - ribonebularine
  modified_base 21: mod_base = OTHER; note = 2'-O-Methyl-guanosine
  modified_base 28: mod_base = OTHER; note = Nebularine - ribonebularine
  modified_base 29: mod_base = OTHER; note = 2'-O-Methyl-guanosine
  modified_base 30: mod_base = OTHER; note = 2'-O-Methyl-cytidine
  modified_base 31: mod_base = OTHER; note = 2'-O-Methyl-uridine
  modified_base 32: mod_base = OTHER; note = 2'-O-Methyl-adenosine
  modified_base 33: mod_base = OTHER; note = 2'-O-Methyl-guanosine
  modified_base 34: mod_base = OTHER; note = Nebularine - ribonebularine
  modified_base 35: mod_base = OTHER; note = 2'-O-Methyl-adenosine
  modified_base 36: mod_base = OTHER; note = 2'-O-Methyl-adenosine
  modified_base 37: mod_base = OTHER; note = 2'-O-Methyl-uridine
  modified_base 38: mod_base = OTHER; note = 2'-O-Methyl-adenosine
  modified_base 39: mod_base = OTHER; note = 2'-O-Methyl-guanosine
  modified_base 40: mod_base = OTHER; note = 2'-O-Methyl-cytidine
  modified_base 41: mod_base = OTHER; note = 2'-O-Methyl-adenosine
  modified_base 42: mod_base = OTHER; note = Nebularine - ribonebularine
  modified_base 46: mod_base = OTHER; note = 2'-O-Methyl-adenosine
  modified_base 48: mod_base = OTHER; note = 2'-O-Methyl-adenosine
  modified_base 50: mod_base = OTHER; note = 2'-O-Methyl-uridine
  modified_base 52: mod_base = OTHER; note = 2'-O-Methyl-adenosine
  modified_base 53: mod_base = OTHER; note = 2'-O-Methyl-guanosine
  modified_base 54: mod_base = OTHER; note = 2'-O-Methyl-guanosine
  modified_base 55: mod_base = OTHER; note = 2'-O-Methyl-cytidine
  modified_base 56: mod_base = OTHER; note = 2'-O-Methyl-uridine
  modified_base 57: mod_base = OTHER; note = Nebularine - ribonebularine
  modified_base 60: mod_base = OTHER; note = 2'-O-Methyl-cytidine
  modified_base 61: mod_base = OTHER; note = 2'-O-Methyl-cytidine
  modified_base 65: mod_base = OTHER; note = Nebularine - ribonebularine
  modified_base 66: mod_base = OTHER; note = 2'-O-Methyl-uridine
  modified_base 67: mod_base = OTHER; note = 2'-O-Methyl-cytidine
  modified_base 70: mod_base = OTHER; note = 2'-O-Methyl-cytidine
  modified_base 71: mod_base = OTHER; note = 2'-O-Methyl-uridine
  modified_base 72: mod_base = OTHER; note = 2'-O-Methyl-uridine
  modified_base 73: mod_base = OTHER; note = 2'-O-Methyl-guanosine
  modified_base 74: mod_base = OTHER; note = 2'-O-Methyl-adenosine
  modified_base 75: mod_base = OTHER; note = 2'-O-Methyl-adenosine
  modified_base 76: mod_base = OTHER; note = 2'-O-Methyl-adenosine
  modified_base 77: mod_base = OTHER; note = 2'-O-Methyl-adenosine
  modified_base 78: mod_base = OTHER; note = 2'-O-Methyl-adenosine
  modified_base 79: mod_base = OTHER; note = 2'-O-Methyl-guanosine
  modified_base 80: mod_base = OTHER; note = 2'-O-Methyl-uridine
  modified_base 81: mod_base = OTHER; note = 2'-O-Methyl-guanosine
  modified_base 83: mod_base = OTHER; note = 2'-O-Methyl-cytidine
  modified_base 84: mod_base = OTHER; note = 2'-O-Methyl-adenosine
  modified_base 85: mod_base = OTHER; note = 2'-O-Methyl-cytidine
  modified_base 86: mod_base = OTHER; note = 2'-O-Methyl-cytidine
  modified_base 87: mod_base = OTHER; note = 2'-O-Methyl-guanosine
  modified_base 88: mod_base = OTHER; note = 2'-O-Methyl-adenosine
  modified_base 89: mod_base = OTHER; note = 2'-O-Methyl-guanosine
  modified_base 90: mod_base = OTHER; note = 2'-O-Methyl-uridine
  modified_base 91: mod_base = OTHER; note = 2'-O-Methyl-cytidine
  modified_base 92: mod_base = OTHER; note = 2'-O-Methyl-guanosine
  modified_base 93: mod_base = OTHER; note = 2'-O-Methyl-guanosine
  modified_base 94: mod_base = OTHER; note = 2'-O-Methyl-uridine
  modified_base 95: mod_base = OTHER; note = 2'-O-Methyl-guanosine
  modified_base 96: mod_base = OTHER; note = 2'-O-Methyl-cytidine
  modified_base 97: mod_base = OTHER; note = 2'-O-Methyl-uridine phosphorothioate
  modified_base 98: mod_base = OTHER; note = 2'-O-Methyl-uridine phosphorothioate
  modified_base 99: mod_base = OTHER; note = 2'-O-Methyl-uridine phosphorothioate
  modified_base 100: mod_base = OTHER; note = 2'-O-Methyl-uridine
caggttccatgggntgctctgttttagngctagnaatagcangttaaaataaggctngtccgttntcaacttgaaaaagtggcaccgagtcggtgctttt

SEQ ID NO: 1921 - RNA, 100 nt, synthetic construct
  source 1..100: mol_type = other RNA; note = Description of Artificial Sequence: Synthetic polynucleotide
  modified_base 1: mod_base = OTHER; note = 2'-O-Methyl-cytidine phosphorothioate
  modified_base 2: mod_base = OTHER; note = 2'-O-Methyl-adenosine phosphorothioate
  modified_base 3: mod_base = OTHER; note = 2'-O-Methyl-guanosine phosphorothioate
  modified_base 9: mod_base = OTHER; note = Nebularine - ribonebularine
  modified_base 14: mod_base = OTHER; note = Nebularine - ribonebularine
  modified_base 21: mod_base = OTHER; note = 2'-O-Methyl-guanosine
  modified_base 28: mod_base = OTHER; note = Nebularine - 2'-O-methylnebularine
  modified_base 29: mod_base = OTHER; note = 2'-O-Methyl-guanosine
  modified_base 30: mod_base = OTHER; note = 2'-O-Methyl-cytidine
  modified_base 31: mod_base = OTHER; note = 2'-O-Methyl-uridine
  modified_base 32: mod_base = OTHER; note = 2'-O-Methyl-adenosine
  modified_base 33: mod_base = OTHER; note = 2'-O-Methyl-guanosine
  modified_base 34: mod_base = OTHER; note = Nebularine - 2'-O-methylnebularine
  modified_base 35: mod_base = OTHER; note = 2'-O-Methyl-adenosine
  modified_base 36: mod_base = OTHER; note = 2'-O-Methyl-adenosine
  modified_base 37: mod_base = OTHER; note = 2'-O-Methyl-uridine
  modified_base 38: mod_base = OTHER; note = 2'-O-Methyl-adenosine
  modified_base 39: mod_base = OTHER; note = 2'-O-Methyl-guanosine
  modified_base 40: mod_base = OTHER; note = 2'-O-Methyl-cytidine
  modified_base 41: mod_base = OTHER; note = 2'-O-Methyl-adenosine
  modified_base 42: mod_base = OTHER; note = Nebularine - 2'-O-methylnebularine
  modified_base 46: mod_base = OTHER; note = 2'-O-Methyl-adenosine
  modified_base 48: mod_base = OTHER; note = 2'-O-Methyl-adenosine
  modified_base 50: mod_base = OTHER; note = 2'-O-Methyl-uridine
  modified_base 52: mod_base = OTHER; note = 2'-O-Methyl-adenosine
  modified_base 53: mod_base = OTHER; note = 2'-O-Methyl-guanosine
  modified_base 54: mod_base = OTHER; note = 2'-O-Methyl-guanosine
  modified_base 55: mod_base = OTHER; note = 2'-O-Methyl-cytidine
  modified_base 56: mod_base = OTHER; note = 2'-O-Methyl-uridine
  modified_base 57: mod_base = OTHER; note = Nebularine - 2'-O-methylnebularine
  modified_base 60: mod_base = OTHER; note = 2'-O-Methyl-cytidine
  modified_base 61: mod_base = OTHER; note = 2'-O-Methyl-cytidine
  modified_base 66: mod_base = OTHER; note = 2'-O-Methyl-uridine
  modified_base 67: mod_base = OTHER; note = 2'-O-Methyl-cytidine
  modified_base 70: mod_base = OTHER; note = 2'-O-Methyl-cytidine
  modified_base 71: mod_base = OTHER; note = 2'-O-Methyl-uridine
  modified_base 72: mod_base = OTHER; note = 2'-O-Methyl-uridine
  modified_base 73: mod_base = OTHER; note = 2'-O-Methyl-guanosine
  modified_base 74: mod_base = OTHER; note = 2'-O-Methyl-adenosine
  modified_base 75: mod_base = OTHER; note = 2'-O-Methyl-adenosine
  modified_base 76: mod_base = OTHER; note = 2'-O-Methyl-adenosine
  modified_base 77: mod_base = OTHER; note = 2'-O-Methyl-adenosine
  modified_base 78: mod_base = OTHER; note = 2'-O-Methyl-adenosine
  modified_base 79: mod_base = OTHER; note = 2'-O-Methyl-guanosine
  modified_base 80: mod_base = OTHER; note = 2'-O-Methyl-uridine
  modified_base 81: mod_base = OTHER; note = 2'-O-Methyl-guanosine
  modified_base 83: mod_base = OTHER; note = 2'-O-Methyl-cytidine
  modified_base 84: mod_base = OTHER; note = 2'-O-Methyl-adenosine
  modified_base 85: mod_base = OTHER; note = 2'-O-Methyl-cytidine
  modified_base 86: mod_base = OTHER; note = 2'-O-Methyl-cytidine
  modified_base 87: mod_base = OTHER; note = 2'-O-Methyl-guanosine
  modified_base 88: mod_base = OTHER; note = 2'-O-Methyl-adenosine
  modified_base 89: mod_base = OTHER; note = 2'-O-Methyl-guanosine
  modified_base 90: mod_base = OTHER; note = 2'-O-Methyl-uridine
  modified_base 91: mod_base = OTHER; note = 2'-O-Methyl-cytidine
  modified_base 92: mod_base = OTHER; note = 2'-O-Methyl-guanosine
  modified_base 93: mod_base = OTHER; note = 2'-O-Methyl-guanosine
  modified_base 94: mod_base = OTHER; note = 2'-O-Methyl-uridine
  modified_base 95: mod_base = OTHER; note = 2'-O-Methyl-guanosine
  modified_base 96: mod_base = OTHER; note = 2'-O-Methyl-cytidine
  modified_base 97: mod_base = OTHER; note = 2'-O-Methyl-uridine phosphorothioate
  modified_base 98: mod_base = OTHER; note = 2'-O-Methyl-uridine phosphorothioate
  modified_base 99: mod_base = OTHER; note = 2'-O-Methyl-uridine phosphorothioate
  modified_base 100: mod_base = OTHER; note = 2'-O-Methyl-uridine
caggttccntgggntgctctgttttagngctagnaatagcangttaaaataaggctngtccgttatcaacttgaaaaagtggcaccgagtcggtgctttt

SEQ ID NO: 1922 - RNA, 100 nt, synthetic construct
  source 1..100: mol_type = other RNA; note = Description of Artificial Sequence: Synthetic polynucleotide
  modified_base 1: mod_base = OTHER; note = 2'-O-Methyl-cytidine phosphorothioate
  modified_base 2: mod_base = OTHER; note = 2'-O-Methyl-adenosine phosphorothioate
  modified_base 3: mod_base = OTHER; note = 2'-O-Methyl-guanosine phosphorothioate
  modified_base 9: mod_base = OTHER; note = Nebularine - ribonebularine
  modified_base 14: mod_base = OTHER; note = Nebularine - ribonebularine
  modified_base 21: mod_base = OTHER; note = 2'-O-Methyl-guanosine
  modified_base 28: mod_base = OTHER; note = 2'-O-Methyl-adenosine
  modified_base 29: mod_base = OTHER; note = 2'-O-Methyl-guanosine
  modified_base 30: mod_base = OTHER; note = 2'-O-Methyl-cytidine
  modified_base 31: mod_base = OTHER; note = 2'-O-Methyl-uridine
  modified_base 32: mod_base = OTHER; note = 2'-O-Methyl-adenosine
  modified_base 33: mod_base = OTHER; note = 2'-O-Methyl-guanosine
  modified_base 34: mod_base = OTHER; note = Nebularine - 2'-O-methylnebularine
  modified_base 35: mod_base = OTHER; note = 2'-O-Methyl-adenosine
  modified_base 36: mod_base = OTHER; note = 2'-O-Methyl-adenosine
  modified_base 37: mod_base = OTHER; note = 2'-O-Methyl-uridine
  modified_base 38: mod_base = OTHER; note = 2'-O-Methyl-adenosine
  modified_base 39: mod_base = OTHER; note = 2'-O-Methyl-guanosine
  modified_base 40: mod_base = OTHER; note = 2'-O-Methyl-cytidine
  modified_base 41: mod_base = OTHER; note = 2'-O-Methyl-adenosine
  modified_base 42: mod_base = OTHER; note = Nebularine - 2'-O-methylnebularine
  modified_base 46: mod_base = OTHER; note = 2'-O-Methyl-adenosine
  modified_base 48: mod_base = OTHER; note = 2'-O-Methyl-adenosine
  modified_base 50: mod_base = OTHER; note = 2'-O-Methyl-uridine
  modified_base 52: mod_base = OTHER; note = 2'-O-Methyl-adenosine
  modified_base 53: mod_base = OTHER; note = 2'-O-Methyl-guanosine
  modified_base 54: mod_base = OTHER; note = 2'-O-Methyl-guanosine
  modified_base 55: mod_base = OTHER; note = 2'-O-Methyl-cytidine
  modified_base 56: mod_base = OTHER; note = 2'-O-Methyl-uridine
  modified_base 57: mod_base = OTHER; note = Nebularine - 2'-O-methylnebularine
  modified_base 60: mod_base = OTHER; note = 2'-O-Methyl-cytidine
  modified_base 61: mod_base = OTHER; note = 2'-O-Methyl-cytidine
  modified_base 66: mod_base = OTHER; note = 2'-O-Methyl-uridine
  modified_base 67: mod_base = OTHER; note = 2'-O-Methyl-cytidine
  modified_base 70: mod_base = OTHER; note = 2'-O-Methyl-cytidine
  modified_base 71: mod_base = OTHER; note = 2'-O-Methyl-uridine
  modified_base 72: mod_base = OTHER; note = 2'-O-Methyl-uridine
  modified_base 73: mod_base = OTHER; note = 2'-O-Methyl-guanosine
  modified_base 74: mod_base = OTHER; note = 2'-O-Methyl-adenosine
  modified_base 75: mod_base = OTHER; note = 2'-O-Methyl-adenosine
  modified_base 76: mod_base = OTHER; note = 2'-O-Methyl-adenosine
  modified_base 77: mod_base = OTHER; note = 2'-O-Methyl-adenosine
  modified_base 78: mod_base = OTHER; note = 2'-O-Methyl-adenosine
  modified_base 79: mod_base = OTHER; note = 2'-O-Methyl-guanosine
  modified_base 80: mod_base = OTHER; note = 2'-O-Methyl-uridine
  modified_base 81: mod_base = OTHER; note = 2'-O-Methyl-guanosine
  modified_base 83: mod_base = OTHER; note = 2'-O-Methyl-cytidine
  modified_base 84: mod_base = OTHER; note = 2'-O-Methyl-adenosine
  modified_base 85: mod_base = OTHER; note = 2'-O-Methyl-cytidine
  modified_base 86: mod_base = OTHER; note = 2'-O-Methyl-cytidine
  modified_base 87: mod_base = OTHER; note = 2'-O-Methyl-guanosine
  modified_base 88: mod_base = OTHER; note = 2'-O-Methyl-adenosine
  modified_base 89: mod_base = OTHER; note = 2'-O-Methyl-guanosine
  modified_base 90: mod_base = OTHER; note = 2'-O-Methyl-uridine
  modified_base 91: mod_base = OTHER; note = 2'-O-Methyl-cytidine
  modified_base 92: mod_base = OTHER; note = 2'-O-Methyl-guanosine
  modified_base 93: mod_base = OTHER; note = 2'-O-Methyl-guanosine
  modified_base 94: mod_base = OTHER; note = 2'-O-Methyl-uridine
  modified_base 95: mod_base = OTHER; note = 2'-O-Methyl-guanosine
  modified_base 96: mod_base = OTHER; note = 2'-O-Methyl-cytidine
  modified_base 97: mod_base = OTHER; note = 2'-O-Methyl-uridine phosphorothioate
  modified_base 98: mod_base = OTHER; note = 2'-O-Methyl-uridine phosphorothioate
  modified_base 99: mod_base = OTHER; note = 2'-O-Methyl-uridine phosphorothioate
  modified_base 100: mod_base = OTHER; note = 2'-O-Methyl-uridine
caggttccntgggntgctctgttttagagctagnaatagcangttaaaataaggctngtccgttatcaacttgaaaaagtggcaccgagtcggtgctttt

SEQ ID NO: 1923 - RNA, 100 nt, synthetic construct
  source 1..100: mol_type = other RNA; note = Description of Artificial Sequence: Synthetic polynucleotide
  modified_base 1: mod_base = OTHER; note = 2'-O-Methyl-cytidine phosphorothioate
  modified_base 2: mod_base = OTHER; note = 2'-O-Methyl-adenosine phosphorothioate
  modified_base 3: mod_base = OTHER; note = 2'-O-Methyl-guanosine phosphorothioate
  modified_base 9: mod_base = OTHER; note = Nebularine - ribonebularine
  modified_base 14: mod_base = OTHER; note = Nebularine - ribonebularine
  modified_base 21: mod_base = OTHER; note = 2'-O-Methyl-guanosine
  modified_base 28: mod_base = OTHER; note = 2'-O-Methyl-adenosine
  modified_base 29: mod_base = OTHER; note = 2'-O-Methyl-guanosine
  modified_base 30: mod_base = OTHER; note = 2'-O-Methyl-cytidine
  modified_base 31: mod_base = OTHER; note = 2'-O-Methyl-uridine
  modified_base 32: mod_base = OTHER; note = 2'-O-Methyl-adenosine
  modified_base 33: mod_base = OTHER; note = 2'-O-Methyl-guanosine
  modified_base 34: mod_base = OTHER; note = 2'-O-Methyl-adenosine
  modified_base 35: mod_base = OTHER; note = 2'-O-Methyl-adenosine
  modified_base 36: mod_base = OTHER; note = 2'-O-Methyl-adenosine
  modified_base 37: mod_base = OTHER; note = 2'-O-Methyl-uridine
  modified_base 38: mod_base = OTHER; note = 2'-O-Methyl-adenosine
  modified_base 39: mod_base = OTHER; note = 2'-O-Methyl-guanosine
  modified_base 40: mod_base = OTHER; note = 2'-O-Methyl-cytidine
  modified_base 41: mod_base = OTHER; note = 2'-O-Methyl-adenosine
  modified_base 42: mod_base = OTHER; note = Nebularine - 2'-O-methylnebularine
  modified_base 46: mod_base = OTHER; note = 2'-O-Methyl-adenosine
  modified_base 48: mod_base = OTHER; note = 2'-O-Methyl-adenosine
  modified_base 50: mod_base = OTHER; note = 2'-O-Methyl-uridine
  modified_base 52: mod_base = OTHER; note = 2'-O-Methyl-adenosine
  modified_base 53: mod_base = OTHER; note = 2'-O-Methyl-guanosine
  modified_base 54: mod_base = OTHER; note = 2'-O-Methyl-guanosine
  modified_base 55: mod_base = OTHER; note = 2'-O-Methyl-cytidine
  modified_base 56: mod_base = OTHER; note = 2'-O-Methyl-uridine
  modified_base 57: mod_base = OTHER; note = Nebularine - 2'-O-methylnebularine
  modified_base 60: mod_base = OTHER; note = 2'-O-Methyl-cytidine
  modified_base 61: mod_base = OTHER; note = 2'-O-Methyl-cytidine
  modified_base 66: mod_base = OTHER; note = 2'-O-Methyl-uridine
  modified_base 67: mod_base = OTHER; note = 2'-O-Methyl-cytidine
  modified_base 70: mod_base = OTHER; note = 2'-O-Methyl-cytidine
  modified_base 71: mod_base = OTHER; note = 2'-O-Methyl-uridine
  modified_base 72: mod_base = OTHER; note = 2'-O-Methyl-uridine
  modified_base 73: mod_base = OTHER; note = 2'-O-Methyl-guanosine
  modified_base 74: mod_base = OTHER; note = 2'-O-Methyl-adenosine
  modified_base 75: mod_base = OTHER; note = 2'-O-Methyl-adenosine
  modified_base 76: mod_base = OTHER; note = 2'-O-Methyl-adenosine
  modified_base 77: mod_base = OTHER; note = 2'-O-Methyl-adenosine
  modified_base 78: mod_base = OTHER; note = 2'-O-Methyl-adenosine
  modified_base 79: mod_base = OTHER; note = 2'-O-Methyl-guanosine
  modified_base 80: mod_base = OTHER; note = 2'-O-Methyl-uridine
  modified_base 81: mod_base = OTHER; note = 2'-O-Methyl-guanosine
  modified_base 83: mod_base = OTHER; note = 2'-O-Methyl-cytidine
  modified_base 84: mod_base = OTHER; note = 2'-O-Methyl-adenosine
  modified_base 85: mod_base = OTHER; note = 2'-O-Methyl-cytidine
  modified_base 86: mod_base = OTHER; note = 2'-O-Methyl-cytidine
  modified_base 87: mod_base = OTHER; note = 2'-O-Methyl-guanosine
  modified_base 88: mod_base = OTHER; note = 2'-O-Methyl-adenosine
  modified_base 89: mod_base = OTHER; note = 2'-O-Methyl-guanosine
  modified_base 90: mod_base = OTHER; note = 2'-O-Methyl-uridine
  modified_base 91: mod_base = OTHER; note = 2'-O-Methyl-cytidine
  modified_base 92: mod_base = OTHER; note = 2'-O-Methyl-guanosine
  modified_base 93: mod_base = OTHER; note = 2'-O-Methyl-guanosine
  modified_base 94: mod_base = OTHER; note = 2'-O-Methyl-uridine
  modified_base 95: mod_base = OTHER; note = 2'-O-Methyl-guanosine
  modified_base 96: mod_base = OTHER; note = 2'-O-Methyl-cytidine
  modified_base 97: mod_base = OTHER; note = 2'-O-Methyl-uridine phosphorothioate
  modified_base 98: mod_base = OTHER; note = 2'-O-Methyl-uridine phosphorothioate
  modified_base 99: mod_base = OTHER; note = 2'-O-Methyl-uridine phosphorothioate
  modified_base 100: mod_base = OTHER; note = 2'-O-Methyl-uridine
caggttccntgggntgctctgttttagagctagaaatagcangttaaaataaggctngtccgttatcaacttgaaaaagtggcaccgagtcggtgctttt

SEQ ID NO: 1924 - RNA, 100 nt, synthetic construct
  source 1..100: mol_type = other RNA; note = Description of Artificial Sequence: Synthetic polynucleotide
  modified_base 1: mod_base = OTHER; note = 2'-O-Methyl-cytidine phosphorothioate
  modified_base 2: mod_base = OTHER; note = 2'-O-Methyl-adenosine phosphorothioate
  modified_base 3: mod_base = OTHER; note = 2'-O-Methyl-guanosine phosphorothioate
  modified_base 9: mod_base = OTHER; note = Nebularine - ribonebularine
  modified_base 14: mod_base = OTHER; note = Nebularine - ribonebularine
  modified_base 21: mod_base = OTHER; note = 2'-O-Methyl-guanosine
  modified_base 28: mod_base = OTHER; note = 2'-O-Methyl-adenosine
  modified_base 29: mod_base = OTHER; note = 2'-O-Methyl-guanosine
  modified_base 30: mod_base = OTHER; note = 2'-O-Methyl-cytidine
  modified_base 31: mod_base = OTHER; note = 2'-O-Methyl-uridine
  modified_base 32: mod_base = OTHER; note = 2'-O-Methyl-adenosine
  modified_base 33: mod_base = OTHER; note = 2'-O-Methyl-guanosine
  modified_base 34: mod_base = OTHER; note = 2'-O-Methyl-adenosine
  modified_base 35: mod_base = OTHER; note = 2'-O-Methyl-adenosine
  modified_base 36: mod_base = OTHER; note = 2'-O-Methyl-adenosine
  modified_base 37: mod_base = OTHER; note = 2'-O-Methyl-uridine
  modified_base 38: mod_base = OTHER; note = 2'-O-Methyl-adenosine
  modified_base 39: mod_base = OTHER; note = 2'-O-Methyl-guanosine
  modified_base 40: mod_base = OTHER; note = 2'-O-Methyl-cytidine
  modified_base 41: mod_base = OTHER; note = 2'-O-Methyl-adenosine
  modified_base 42: mod_base = OTHER; note = 2'-O-Methyl-adenosine
  modified_base 46: mod_base = OTHER; note = 2'-O-Methyl-adenosine
  modified_base 48: mod_base = OTHER; note = 2'-O-Methyl-adenosine
  modified_base 50: mod_base = OTHER; note = 2'-O-Methyl-uridine
  modified_base 52: mod_base = OTHER; note = 2'-O-Methyl-adenosine
  modified_base 53: mod_base = OTHER; note = 2'-O-Methyl-guanosine
  modified_base 54: mod_base = OTHER; note = 2'-O-Methyl-guanosine
  modified_base 55: mod_base = OTHER; note = 2'-O-Methyl-cytidine
  modified_base 56: mod_base = OTHER; note = 2'-O-Methyl-uridine
  modified_base 57: mod_base = OTHER; note = Nebularine - 2'-O-methylnebularine
  modified_base 60: mod_base = OTHER; note = 2'-O-Methyl-cytidine
  modified_base 61: mod_base = OTHER; note = 2'-O-Methyl-cytidine
  modified_base 66: mod_base = OTHER; note = 2'-O-Methyl-uridine
  modified_base 67: mod_base = OTHER; note = 2'-O-Methyl-cytidine
  modified_base 70: mod_base = OTHER; note = 2'-O-Methyl-cytidine
  modified_base 71: mod_base = OTHER; note = 2'-O-Methyl-uridine
  modified_base 72: mod_base = OTHER; note = 2'-O-Methyl-uridine
  modified_base 73: mod_base = OTHER; note = 2'-O-Methyl-guanosine
  modified_base 74: mod_base = OTHER; note = 2'-O-Methyl-adenosine
  modified_base 75: mod_base = OTHER; note = 2'-O-Methyl-adenosine
  modified_base 76: mod_base = OTHER; note = 2'-O-Methyl-adenosine
  modified_base 77: mod_base = OTHER; note = 2'-O-Methyl-adenosine
  modified_base 78: mod_base = OTHER; note = 2'-O-Methyl-adenosine
  modified_base 79: mod_base = OTHER; note = 2'-O-Methyl-guanosine
  modified_base 80: mod_base = OTHER; note = 2'-O-Methyl-uridine
  modified_base 81: mod_base = OTHER; note = 2'-O-Methyl-guanosine
  modified_base 83: mod_base = OTHER; note = 2'-O-Methyl-cytidine
  modified_base 84: mod_base = OTHER; note = 2'-O-Methyl-adenosine
  modified_base 85: mod_base = OTHER; note = 2'-O-Methyl-cytidine
  modified_base 86: mod_base = OTHER; note = 2'-O-Methyl-cytidine
  modified_base 87: mod_base = OTHER; note = 2'-O-Methyl-guanosine
  modified_base 88: mod_base = OTHER; note = 2'-O-Methyl-adenosine
  modified_base 89: mod_base = OTHER; note = 2'-O-Methyl-guanosine
  modified_base 90: mod_base = OTHER; note = 2'-O-Methyl-uridine
  modified_base 91: mod_base = OTHER; note = 2'-O-Methyl-cytidine
  modified_base 92: mod_base = OTHER; note = 2'-O-Methyl-guanosine
  modified_base 93: mod_base = OTHER; note = 2'-O-Methyl-guanosine
  modified_base 94: mod_base = OTHER; note = 2'-O-Methyl-uridine
  modified_base 95: mod_base = OTHER; note = 2'-O-Methyl-guanosine
  modified_base 96: mod_base = OTHER; note = 2'-O-Methyl-cytidine
  modified_base 97: mod_base = OTHER; note = 2'-O-Methyl-uridine phosphorothioate
  modified_base 98: mod_base = OTHER; note = 2'-O-Methyl-uridine phosphorothioate
  modified_base 99: mod_base = OTHER; note = 2'-O-Methyl-uridine phosphorothioate
  modified_base 100: mod_base = OTHER; note = 2'-O-Methyl-uridine
caggttccntgggntgctctgttttagagctagaaatagcaagttaaaataaggctngtccgttatcaacttgaaaaagtggcaccgagtcggtgctttt

SEQ ID NO: 1925 - RNA, 100 nt, synthetic construct
  source 1..100: mol_type = other RNA; note = Description of Artificial Sequence: Synthetic polynucleotide
  modified_base 1: mod_base = OTHER; note = 2'-O-Methyl-cytidine phosphorothioate
  modified_base 2: mod_base = OTHER; note = 2'-O-Methyl-adenosine phosphorothioate
  modified_base 3: mod_base = OTHER; note = 2'-O-Methyl-guanosine phosphorothioate
  modified_base 9: mod_base = OTHER; note = Nebularine - ribonebularine
  modified_base 14: mod_base = OTHER; note = Nebularine - ribonebularine
  modified_base 21: mod_base = OTHER; note = 2'-O-Methyl-guanosine
  modified_base 28: mod_base = OTHER; note = Nebularine - 2'-O-methylnebularine
  modified_base 29: mod_base = OTHER; note = 2'-O-Methyl-guanosine
  modified_base 30: mod_base = OTHER; note = 2'-O-Methyl-cytidine
  modified_base 31: mod_base = OTHER; note = 2'-O-Methyl-uridine
  modified_base 32: mod_base = OTHER; note = 2'-O-Methyl-adenosine
  modified_base 33: mod_base = OTHER; note = 2'-O-Methyl-guanosine
  modified_base 34: mod_base = OTHER; note = 2'-O-Methyl-adenosine
  modified_base 35: mod_base = OTHER; note = 2'-O-Methyl-adenosine
  modified_base 36: mod_base = OTHER; note = 2'-O-Methyl-adenosine
  modified_base 37: mod_base = OTHER; note = 2'-O-Methyl-uridine
  modified_base 38: mod_base = OTHER; note = 2'-O-Methyl-adenosine
  modified_base 39: mod_base = OTHER; note = 2'-O-Methyl-guanosine
  modified_base 40: mod_base = OTHER; note = 2'-O-Methyl-cytidine
  modified_base 41: mod_base = OTHER; note = 2'-O-Methyl-adenosine
  modified_base 42: mod_base = OTHER; note = 2'-O-Methyl-adenosine
  modified_base 46: mod_base = OTHER; note = 2'-O-Methyl-adenosine
  modified_base 48: mod_base = OTHER; note = 2'-O-Methyl-adenosine
  modified_base 50: mod_base = OTHER; note = 2'-O-Methyl-uridine
  modified_base 52: mod_base = OTHER; note = 2'-O-Methyl-adenosine
  modified_base 53: mod_base = OTHER; note = 2'-O-Methyl-guanosine
  modified_base 54: mod_base = OTHER; note = 2'-O-Methyl-guanosine
  modified_base 55: mod_base = OTHER; note = 2'-O-Methyl-cytidine
  modified_base 56: mod_base = OTHER; note = 2'-O-Methyl-uridine
  modified_base 57: mod_base = OTHER; note = 2'-O-Methyl-adenosine
  modified_base 60: mod_base = OTHER; note = 2'-O-Methyl-cytidine
  modified_base 61: mod_base = OTHER; note = 2'-O-Methyl-cytidine
  modified_base 66: mod_base = OTHER; note = 2'-O-Methyl-uridine
  modified_base 67: mod_base = OTHER; note = 2'-O-Methyl-cytidine
  modified_base 70: mod_base = OTHER; note = 2'-O-Methyl-cytidine
  modified_base 71: mod_base = OTHER; note = 2'-O-Methyl-uridine
  modified_base 72: mod_base = OTHER; note = 2'-O-Methyl-uridine
  modified_base 73: mod_base = OTHER; note = 2'-O-Methyl-guanosine
  modified_base 74: mod_base = OTHER; note = 2'-O-Methyl-adenosine
  modified_base 75: mod_base = OTHER; note = 2'-O-Methyl-adenosine
  modified_base 76: mod_base = OTHER; note = 2'-O-Methyl-adenosine
  modified_base 77: mod_base = OTHER; note = 2'-O-Methyl-adenosine
  modified_base 78: mod_base = OTHER; note = 2'-O-Methyl-adenosine
  modified_base 79: mod_base = OTHER; note = 2'-O-Methyl-guanosine
  modified_base 80: mod_base = OTHER; note = 2'-O-Methyl-uridine
  modified_base 81: mod_base = OTHER; note = 2'-O-Methyl-guanosine
  modified_base 83: mod_base = OTHER; note = 2'-O-Methyl-cytidine
  modified_base 84: mod_base = OTHER; note = 2'-O-Methyl-adenosine
  modified_base 85: mod_base = OTHER; note = 2'-O-Methyl-cytidine
  modified_base 86: mod_base = OTHER; note = 2'-O-Methyl-cytidine
  modified_base 87: mod_base = OTHER; note = 2'-O-Methyl-guanosine
  modified_base 88: mod_base = OTHER; note = 2'-O-Methyl-adenosine
  modified_base 89: mod_base = OTHER; note = 2'-O-Methyl-guanosine
  modified_base 90: mod_base = OTHER; note = 2'-O-Methyl-uridine
  modified_base 91: mod_base = OTHER; note = 2'-O-Methyl-cytidine
  modified_base 92: mod_base = OTHER; note = 2'-O-Methyl-guanosine
  modified_base 93: mod_base = OTHER; note = 2'-O-Methyl-guanosine
  modified_base 94: mod_base = OTHER; note = 2'-O-Methyl-uridine
  modified_base 95: mod_base = OTHER; note = 2'-O-Methyl-guanosine
  modified_base 96: mod_base = OTHER; note = 2'-O-Methyl-cytidine
  modified_base 97: mod_base = OTHER; note = 2'-O-Methyl-uridine phosphorothioate
  modified_base 98: mod_base = OTHER; note = 2'-O-Methyl-uridine phosphorothioate
  modified_base 99: mod_base = OTHER; note = 2'-O-Methyl-uridine phosphorothioate
  modified_base 100: mod_base = OTHER; note = 2'-O-Methyl-uridine
caggttccntgggntgctctgttttagngctagaaatagcaagttaaaataaggctagtccgttatcaacttgaaaaagtggcaccgagtcggtgctttt

SEQ ID NO: 1926 - RNA, 100 nt, synthetic construct
  source 1..100: mol_type = other RNA; note = Description of Artificial Sequence: Synthetic polynucleotide
  modified_base 1: mod_base = OTHER; note = 2'-O-Methyl-cytidine phosphorothioate
  modified_base 2: mod_base = OTHER; note = 2'-O-Methyl-adenosine phosphorothioate
  modified_base 3: mod_base = OTHER; note = 2'-O-Methyl-guanosine phosphorothioate
  modified_base 9: mod_base = OTHER; note = Nebularine - ribonebularine
  modified_base 14: mod_base = OTHER; note = Nebularine - ribonebularine
  modified_base 21: mod_base = OTHER; note = 2'-O-Methyl-guanosine
  modified_base 28: mod_base = OTHER; note = 2'-O-Methyl-adenosine
  modified_base 29: mod_base = OTHER; note = 2'-O-Methyl-guanosine
  modified_base 30: mod_base = OTHER; note = 2'-O-Methyl-cytidine
  modified_base 31: mod_base = OTHER; note = 2'-O-Methyl-uridine
  modified_base 32: mod_base = OTHER; note = 2'-O-Methyl-adenosine
  modified_base 33: mod_base = OTHER; note = 2'-O-Methyl-guanosine
  modified_base 34: mod_base = OTHER; note = 2'-O-Methyl-adenosine
  modified_base 35: mod_base = OTHER; note = 2'-O-Methyl-adenosine
  modified_base 36: mod_base = OTHER; note = 2'-O-Methyl-adenosine
  modified_base 37: mod_base = OTHER; note = 2'-O-Methyl-uridine
  modified_base 38: mod_base = OTHER; note = 2'-O-Methyl-adenosine
  modified_base 39: mod_base = OTHER; note = 2'-O-Methyl-guanosine
  modified_base 40: mod_base = OTHER; note = 2'-O-Methyl-cytidine
  modified_base 41: mod_base = OTHER; note = 2'-O-Methyl-adenosine
  modified_base 42: mod_base = OTHER; note = Nebularine - 2'-O-methylnebularine
  modified_base 46: mod_base = OTHER; note = 2'-O-Methyl-adenosine
  modified_base 48: mod_base = OTHER; note = 2'-O-Methyl-adenosine
  modified_base 50: mod_base = OTHER; note = 2'-O-Methyl-uridine
  modified_base 52: mod_base = OTHER; note = 2'-O-Methyl-adenosine
  modified_base 53: mod_base = OTHER; note = 2'-O-Methyl-guanosine
  modified_base 54: mod_base = OTHER; note = 2'-O-Methyl-guanosine
  modified_base 55: mod_base = OTHER; note = 2'-O-Methyl-cytidine
  modified_base 56: mod_base = OTHER; note = 2'-O-Methyl-uridine
  modified_base 57: mod_base = OTHER; note = 2'-O-Methyl-adenosine
  modified_base 60: mod_base = OTHER; note = 2'-O-Methyl-cytidine
  modified_base 61: mod_base = OTHER; note = 2'-O-Methyl-cytidine
  modified_base 66: mod_base = OTHER; note = 2'-O-Methyl-uridine
  modified_base 67: mod_base = OTHER; note = 2'-O-Methyl-cytidine
  modified_base 70: mod_base = OTHER; note = 2'-O-Methyl-cytidine
  modified_base 71: mod_base = OTHER; note = 2'-O-Methyl-uridine
  modified_base 72: mod_base = OTHER; note = 2'-O-Methyl-uridine
  modified_base 73: mod_base = OTHER; note = 2'-O-Methyl-guanosine
  modified_base 74: mod_base = OTHER; note = 2'-O-Methyl-adenosine
  modified_base 75: mod_base = OTHER; note = 2'-O-Methyl-adenosine
  modified_base 76: mod_base = OTHER; note = 2'-O-Methyl-adenosine
  modified_base 77: mod_base = OTHER; note = 2'-O-Methyl-adenosine
  modified_base 78: mod_base = OTHER; note = 2'-O-Methyl-adenosine
  modified_base 79: mod_base = OTHER; note = 2'-O-Methyl-guanosine
  modified_base 80: mod_base = OTHER; note = 2'-O-Methyl-uridine
  modified_base 81: mod_base = OTHER; note = 2'-O-Methyl-guanosine
  modified_base 83: mod_base = OTHER; note = 2'-O-Methyl-cytidine
  modified_base 84: mod_base = OTHER; note = 2'-O-Methyl-adenosine
  modified_base 85: mod_base = OTHER; note = 2'-O-Methyl-cytidine
  modified_base 86: mod_base = OTHER; note = 2'-O-Methyl-cytidine
  modified_base 87: mod_base = OTHER; note = 2'-O-Methyl-guanosine
  modified_base 88: mod_base = OTHER; note = 2'-O-Methyl-adenosine
  modified_base 89: mod_base = OTHER; note = 2'-O-Methyl-guanosine
  modified_base 90: mod_base = OTHER; note = 2'-O-Methyl-uridine
  modified_base 91: mod_base = OTHER; note = 2'-O-Methyl-cytidine
  modified_base 92: mod_base = OTHER; note = 2'-O-Methyl-guanosine
  modified_base 93: mod_base = OTHER; note = 2'-O-Methyl-guanosine
  modified_base 94: mod_base = OTHER; note = 2'-O-Methyl-uridine
  modified_base 95: mod_base = OTHER; note = 2'-O-Methyl-guanosine
  modified_base 96: mod_base = OTHER; note = 2'-O-Methyl-cytidine
  modified_base 97: mod_base = OTHER; note = 2'-O-Methyl-uridine phosphorothioate
  modified_base 98: mod_base = OTHER; note = 2'-O-Methyl-uridine phosphorothioate
  modified_base 99: mod_base = OTHER; note = 2'-O-Methyl-uridine phosphorothioate
  modified_base 100: mod_base = OTHER; note = 2'-O-Methyl-uridine
caggttccntgggntgctctgttttagagctagaaatagcangttaaaataaggctagtccgttatcaacttgaaaaagtggcaccgagtcggtgctttt

SEQ ID NO: 1927 - RNA, 100 nt, synthetic construct
  source 1..100: mol_type = other RNA; note = Description of Artificial Sequence: Synthetic polynucleotide
  modified_base 1: mod_base = OTHER; note = 2'-O-Methyl-cytidine phosphorothioate
  modified_base 2: mod_base = OTHER; note = 2'-O-Methyl-adenosine phosphorothioate
  modified_base 3: mod_base = OTHER; note = 2'-O-Methyl-guanosine phosphorothioate
  modified_base 9: mod_base = OTHER; note = Nebularine - ribonebularine
  modified_base 14: mod_base = OTHER; note = Nebularine - ribonebularine
  modified_base 21: mod_base = OTHER; note = 2'-O-Methyl-guanosine
  modified_base 28: mod_base = OTHER; note = 2'-O-Methyl-adenosine
  modified_base 29: mod_base = OTHER; note = 2'-O-Methyl-guanosine
  modified_base 30: mod_base = OTHER; note = 2'-O-Methyl-cytidine
  modified_base 31: mod_base = OTHER; note = 2'-O-Methyl-uridine
  modified_base 32: mod_base = OTHER; note = 2'-O-Methyl-adenosine
  modified_base 33: mod_base = OTHER; note = 2'-O-Methyl-guanosine
  modified_base 34: mod_base = OTHER; note = Nebularine - 2'-O-methylnebularine
  modified_base 35: mod_base = OTHER; note = 2'-O-Methyl-adenosine
  modified_base 36: mod_base = OTHER; note = 2'-O-Methyl-adenosine
  modified_base 37: mod_base = OTHER; note = 2'-O-Methyl-uridine
  modified_base 38: mod_base = OTHER; note = 2'-O-Methyl-adenosine
  modified_base 39: mod_base = OTHER; note = 2'-O-Methyl-guanosine
  modified_base 40: mod_base = OTHER; note = 2'-O-Methyl-cytidine
  modified_base 41: mod_base = OTHER; note = 2'-O-Methyl-adenosine
  modified_base 42: mod_base = OTHER; note = Nebularine - 2'-O-methylnebularine
  modified_base 46: mod_base = OTHER; note = 2'-O-Methyl-adenosine
  modified_base 48: mod_base = OTHER; note = 2'-O-Methyl-adenosine
  modified_base 50: mod_base = OTHER; note = 2'-O-Methyl-uridine
  modified_base 52: mod_base = OTHER; note = 2'-O-Methyl-adenosine
  modified_base 53: mod_base = OTHER; note = 2'-O-Methyl-guanosine
  modified_base 54: mod_base = OTHER; note = 2'-O-Methyl-guanosine
  modified_base 55: mod_base = OTHER; note = 2'-O-Methyl-cytidine
  modified_base 56: mod_base = OTHER; note = 2'-O-Methyl-uridine
  modified_base 57: mod_base = OTHER; note = 2'-O-Methyl-adenosine
  modified_base 60: mod_base = OTHER; note = 2'-O-Methyl-cytidine
  modified_base 61: mod_base = OTHER; note = 2'-O-Methyl-cytidine
  modified_base 66: mod_base = OTHER; note = 2'-O-Methyl-uridine
  modified_base 67: mod_base = OTHER; note = 2'-O-Methyl-cytidine
  modified_base 70: mod_base = OTHER; note = 2'-O-Methyl-cytidine
  modified_base 71: mod_base = OTHER; note = 2'-O-Methyl-uridine
  modified_base 72: mod_base = OTHER; note = 2'-O-Methyl-uridine
  modified_base 73: mod_base = OTHER; note = 2'-O-Methyl-guanosine
  modified_base 74: mod_base = OTHER; note = 2'-O-Methyl-adenosine
  modified_base 75: mod_base = OTHER; note = 2'-O-Methyl-adenosine
  modified_base 76: mod_base = OTHER; note = 2'-O-Methyl-adenosine
  modified_base 77: mod_base = OTHER; note = 2'-O-Methyl-adenosine
  modified_base 78: mod_base = OTHER; note = 2'-O-Methyl-adenosine
  modified_base 79: mod_base = OTHER; note = 2'-O-Methyl-guanosine
  modified_base 80: mod_base = OTHER; note = 2'-O-Methyl-uridine
  modified_base 81: mod_base = OTHER; note = 2'-O-Methyl-guanosine
  modified_base 83: mod_base = OTHER; note = 2'-O-Methyl-cytidine
  modified_base 84: mod_base = OTHER; note = 2'-O-Methyl-adenosine
  modified_base 85: mod_base = OTHER; note = 2'-O-Methyl-cytidine
  modified_base 86: mod_base = OTHER; note = 2'-O-Methyl-cytidine
  modified_base 87: mod_base = OTHER; note = 2'-O-Methyl-guanosine
  modified_base 88: mod_base = OTHER; note = 2'-O-Methyl-adenosine
  modified_base 89: mod_base = OTHER; note = 2'-O-Methyl-guanosine
  modified_base 90: mod_base = OTHER; note = 2'-O-Methyl-uridine
  modified_base 91: mod_base = OTHER; note = 2'-O-Methyl-cytidine
  modified_base 92: mod_base = OTHER; note = 2'-O-Methyl-guanosine
  modified_base 93: mod_base = OTHER; note = 2'-O-Methyl-guanosine
  modified_base 94: mod_base = OTHER; note = 2'-O-Methyl-uridine
  modified_base 95: mod_base = OTHER; note = 2'-O-Methyl-guanosine
  modified_base 96: mod_base = OTHER; note = 2'-O-Methyl-cytidine
  modified_base 97: mod_base = OTHER; note = 2'-O-Methyl-uridine phosphorothioate
  modified_base 98: mod_base = OTHER; note = 2'-O-Methyl-uridine phosphorothioate
  modified_base 99: mod_base = OTHER; note = 2'-O-Methyl-uridine phosphorothioate
  modified_base 100: mod_base = OTHER; note = 2'-O-Methyl-uridine
caggttccntgggntgctctgttttagagctagnaatagcangttaaaataaggctagtccgttatcaacttgaaaaagtggcaccgagtcggtgctttt

SEQ ID NO: 1928 - RNA, 100 nt, synthetic construct
  source 1..100: mol_type = other RNA; note = Description of Artificial Sequence: Synthetic polynucleotide
  modified_base 1: mod_base = OTHER; note = 2'-O-Methyl-cytidine phosphorothioate
  modified_base 2: mod_base = OTHER; note = 2'-O-Methyl-adenosine phosphorothioate
  modified_base 3: mod_base = OTHER; note = 2'-O-Methyl-guanosine phosphorothioate
  modified_base 14: mod_base = OTHER; note = Nebularine - ribonebularine
  modified_base 21: mod_base = OTHER; note = 2'-O-Methyl-guanosine
  modified_base 28: mod_base = OTHER; note = Nebularine - 2'-O-methylnebularine
  modified_base 29: mod_base = OTHER; note = 2'-O-Methyl-guanosine
  modified_base 30: mod_base = OTHER; note = 2'-O-Methyl-cytidine
  modified_base 31: mod_base = OTHER; note = 2'-O-Methyl-uridine
  modified_base 32: mod_base = OTHER; note = 2'-O-Methyl-adenosine
  modified_base 33: mod_base = OTHER; note = 2'-O-Methyl-guanosine
  modified_base 34: mod_base = OTHER; note = Nebularine - 2'-O-methylnebularine
  modified_base 35: mod_base = OTHER; note = 2'-O-Methyl-adenosine
  modified_base 36: mod_base = OTHER; note = 2'-O-Methyl-adenosine
  modified_base 37: mod_base = OTHER; note = 2'-O-Methyl-uridine
  modified_base 38: mod_base = OTHER; note = 2'-O-Methyl-adenosine
  modified_base 39: mod_base = OTHER; note = 2'-O-Methyl-guanosine
  modified_base 40: mod_base = OTHER; note = 2'-O-Methyl-cytidine
  modified_base 41: mod_base = OTHER; note = 2'-O-Methyl-adenosine
  modified_base 42: mod_base = OTHER; note = Nebularine - 2'-O-methylnebularine
  modified_base 46: mod_base = OTHER; note = 2'-O-Methyl-adenosine
  modified_base 48: mod_base = OTHER; note = 2'-O-Methyl-adenosine
  modified_base 50: mod_base = OTHER; note = 2'-O-Methyl-uridine
  modified_base 52: mod_base = OTHER; note = 2'-O-Methyl-adenosine
  modified_base 53: mod_base = OTHER; note = 2'-O-Methyl-guanosine
  modified_base 54: mod_base = OTHER; note = 2'-O-Methyl-guanosine
  modified_base 55: mod_base = OTHER; note = 2'-O-Methyl-cytidine
  modified_base 56: mod_base = OTHER; note = 2'-O-Methyl-uridine
  modified_base 57: mod_base = OTHER; note = Nebularine - 2'-O-methylnebularine
  modified_base 60: mod_base = OTHER; note = 2'-O-Methyl-cytidine
  modified_base 61: mod_base = OTHER; note = 2'-O-Methyl-cytidine
  modified_base 66: mod_base = OTHER; note = 2'-O-Methyl-uridine
  modified_base 67: mod_base = OTHER; note = 2'-O-Methyl-cytidine
  modified_base 70: mod_base = OTHER; note = 2'-O-Methyl-cytidine
  modified_base 71: mod_base = OTHER; note = 2'-O-Methyl-uridine
  modified_base 72: mod_base = OTHER; note = 2'-O-Methyl-uridine
  modified_base 73: mod_base = OTHER; note = 2'-O-Methyl-guanosine
  modified_base 74: mod_base = OTHER; note = 2'-O-Methyl-adenosine
  modified_base 75: mod_base = OTHER; note = 2'-O-Methyl-adenosine
  modified_base 76: mod_base = OTHER; note = 2'-O-Methyl-adenosine
  modified_base 77: mod_base = OTHER; note = 2'-O-Methyl-adenosine
  modified_base 78: mod_base = OTHER; note = 2'-O-Methyl-adenosine
  modified_base 79: mod_base = OTHER; note = 2'-O-Methyl-guanosine
  modified_base 80: mod_base = OTHER; note = 2'-O-Methyl-uridine
  modified_base 81: mod_base = OTHER; note = 2'-O-Methyl-guanosine
  modified_base 83: mod_base = OTHER; note = 2'-O-Methyl-cytidine
  modified_base 84: mod_base = OTHER; note = 2'-O-Methyl-adenosine
  modified_base 85: mod_base = OTHER; note = 2'-O-Methyl-cytidine
  modified_base 86: mod_base = OTHER; note = 2'-O-Methyl-cytidine
  modified_base 87: mod_base = OTHER; note = 2'-O-Methyl-guanosine
  modified_base 88: mod_base = OTHER; note = 2'-O-Methyl-adenosine
  modified_base 89: mod_base = OTHER; note = 2'-O-Methyl-guanosine
  modified_base 90: mod_base = OTHER; note = 2'-O-Methyl-uridine
  modified_base 91: mod_base = OTHER; note = 2'-O-Methyl-cytidine
  modified_base 92: mod_base = OTHER; note = 2'-O-Methyl-guanosine
  modified_base 93: mod_base = OTHER; note = 2'-O-Methyl-guanosine
  modified_base 94: mod_base = OTHER; note = 2'-O-Methyl-uridine
  modified_base 95: mod_base = OTHER; note = 2'-O-Methyl-guanosine
  modified_base 96: mod_base = OTHER; note = 2'-O-Methyl-cytidine
  modified_base 97: mod_base = OTHER; note = 2'-O-Methyl-uridine phosphorothioate
  modified_base 98: mod_base = OTHER; note = 2'-O-Methyl-uridine phosphorothioate
  modified_base 99: mod_base = OTHER; note = 2'-O-Methyl-uridine phosphorothioate
  modified_base 100: mod_base = OTHER; note = 2'-O-Methyl-uridine
caggttccatgggntgctctgttttagngctagnaatagcangttaaaataaggctngtccgttatcaacttgaaaaagtggcaccgagtcggtgctttt

SEQ ID NO: 1929 - RNA, 100 nt, synthetic construct
  source 1..100: mol_type = other RNA; note = Description of Artificial Sequence: Synthetic polynucleotide
  modified_base 1: mod_base = OTHER; note = 2'-O-Methyl-cytidine phosphorothioate
  modified_base 2: mod_base = OTHER; note = 2'-O-Methyl-adenosine phosphorothioate
  modified_base 3: mod_base = OTHER; note = 2'-O-Methyl-guanosine phosphorothioate
  modified_base 14: mod_base = OTHER; note = Nebularine - ribonebularine
  modified_base 21: mod_base = OTHER; note = 2'-O-Methyl-guanosine
  modified_base 28: mod_base = OTHER; note = 2'-O-Methyl-adenosine
  modified_base 29: mod_base = OTHER; note = 2'-O-Methyl-guanosine
  modified_base 30: mod_base = OTHER; note = 2'-O-Methyl-cytidine
  modified_base 31: mod_base = OTHER; note = 2'-O-Methyl-uridine
  modified_base 32: mod_base = OTHER; note = 2'-O-Methyl-adenosine
  modified_base 33: mod_base = OTHER; note = 2'-O-Methyl-guanosine
  modified_base 34: mod_base = OTHER; note = Nebularine - 2'-O-methylnebularine
  modified_base 35: mod_base = OTHER; note = 2'-O-Methyl-adenosine
  modified_base 36: mod_base = OTHER; note = 2'-O-Methyl-adenosine
  modified_base 37: mod_base = OTHER; note = 2'-O-Methyl-uridine
  modified_base 38: mod_base = OTHER; note = 2'-O-Methyl-adenosine
  modified_base 39: mod_base = OTHER; note = 2'-O-Methyl-guanosine
  modified_base 40: mod_base = OTHER; note = 2'-O-Methyl-cytidine
  modified_base 41: mod_base = OTHER; note = 2'-O-Methyl-adenosine
  modified_base 42: mod_base = OTHER; note = Nebularine - 2'-O-methylnebularine
  modified_base 46: mod_base = OTHER; note = 2'-O-Methyl-adenosine
  modified_base 48: mod_base = OTHER; note = 2'-O-Methyl-adenosine
  modified_base 50: mod_base = OTHER; note = 2'-O-Methyl-uridine
  modified_base 52: mod_base = OTHER; note = 2'-O-Methyl-adenosine
  modified_base 53: mod_base = OTHER; note = 2'-O-Methyl-guanosine
  modified_base 54: mod_base = OTHER; note = 2'-O-Methyl-guanosine
  modified_base 55: mod_base = OTHER; note = 2'-O-Methyl-cytidine
  modified_base 56: mod_base = OTHER; note = 2'-O-Methyl-uridine
  modified_base 57: mod_base = OTHER; note = Nebularine - 2'-O-methylnebularine
  modified_base 60: mod_base = OTHER; note = 2'-O-Methyl-cytidine
  modified_base 61: mod_base = OTHER; note = 2'-O-Methyl-cytidine
  modified_base 66: mod_base = OTHER; note = 2'-O-Methyl-uridine
  modified_base 67: mod_base = OTHER; note = 2'-O-Methyl-cytidine
  modified_base 70: mod_base = OTHER; note = 2'-O-Methyl-cytidine
  modified_base 71: mod_base = OTHER; note = 2'-O-Methyl-uridine
  modified_base 72: mod_base = OTHER; note = 2'-O-Methyl-uridine
  modified_base 73: mod_base = OTHER; note = 2'-O-Methyl-guanosine
  modified_base 74: mod_base = OTHER; note = 2'-O-Methyl-adenosine
  modified_base 75: mod_base = OTHER; note = 2'-O-Methyl-adenosine
  modified_base 76: mod_base = OTHER; note = 2'-O-Methyl-adenosine
  modified_base 77: mod_base = OTHER; note = 2'-O-Methyl-adenosine
  modified_base 78: mod_base = OTHER; note = 2'-O-Methyl-adenosine
  modified_base 79: mod_base = OTHER; note = 2'-O-Methyl-guanosine
  modified_base 80: mod_base = OTHER; note = 2'-O-Methyl-uridine
  modified_base 81: mod_base = OTHER; note = 2'-O-Methyl-guanosine
  modified_base 83: mod_base = OTHER; note = 2'-O-Methyl-cytidine
  modified_base 84: mod_base = OTHER; note = 2'-O-Methyl-adenosine
  modified_base 85: mod_base = OTHER; note = 2'-O-Methyl-cytidine
  modified_base 86: mod_base = OTHER; note = 2'-O-Methyl-cytidine
  modified_base 87: mod_base = OTHER; note = 2'-O-Methyl-guanosine
  modified_base 88: mod_base = OTHER; note = 2'-O-Methyl-adenosine
  modified_base 89: mod_base = OTHER; note = 2'-O-Methyl-guanosine
  modified_base 90: mod_base = OTHER; note = 2'-O-Methyl-uridine
  modified_base 91: mod_base = OTHER; note = 2'-O-Methyl-cytidine
  modified_base 92: mod_base = OTHER; note = 2'-O-Methyl-guanosine
  modified_base 93: mod_base = OTHER; note = 2'-O-Methyl-guanosine
  modified_base 94: mod_base = OTHER; note = 2'-O-Methyl-uridine
  modified_base 95: mod_base = OTHER; note = 2'-O-Methyl-guanosine
  modified_base 96: mod_base = OTHER; note = 2'-O-Methyl-cytidine
  modified_base 97: mod_base = OTHER; note = 2'-O-Methyl-uridine phosphorothioate
  modified_base 98: mod_base = OTHER; note = 2'-O-Methyl-uridine phosphorothioate
  modified_base 99: mod_base = OTHER; note = 2'-O-Methyl-uridine phosphorothioate
  modified_base 100: mod_base = OTHER; note = 2'-O-Methyl-uridine
caggttccatgggntgctctgttttagagctagnaatagcangttaaaataaggctngtccgttatcaacttgaaaaagtggcaccgagtcggtgctttt

SEQ ID NO: 1930 - RNA, 100 nt, synthetic construct
  source 1..100: mol_type = other RNA; note = Description of Artificial Sequence: Synthetic polynucleotide
  modified_base 1: mod_base = OTHER; note = 2'-O-Methyl-cytidine phosphorothioate
  modified_base 2: mod_base = OTHER; note = 2'-O-Methyl-adenosine phosphorothioate
  modified_base 3: mod_base = OTHER; note = 2'-O-Methyl-guanosine phosphorothioate
  modified_base 14: mod_base = OTHER; note = Nebularine - ribonebularine
  modified_base 21: mod_base = OTHER; note = 2'-O-Methyl-guanosine
  modified_base 28: mod_base = OTHER; note = 2'-O-Methyl-adenosine
  modified_base 29: mod_base = OTHER; note = 2'-O-Methyl-guanosine
  modified_base 30: mod_base = OTHER; note = 2'-O-Methyl-cytidine
  modified_base 31: mod_base = OTHER; note = 2'-O-Methyl-uridine
  modified_base 32: mod_base = OTHER; note = 2'-O-Methyl-adenosine
  modified_base 33: mod_base = OTHER; note = 2'-O-Methyl-guanosine
  modified_base 34: mod_base = OTHER; note = 2'-O-Methyl-adenosine
  modified_base 35: mod_base = OTHER; note = 2'-O-Methyl-adenosine
  modified_base 36: mod_base = OTHER; note = 2'-O-Methyl-adenosine
  modified_base 37: mod_base = OTHER; note = 2'-O-Methyl-uridine
  modified_base 38: mod_base = OTHER; note = 2'-O-Methyl-adenosine
  modified_base 39: mod_base = OTHER; note = 2'-O-Methyl-guanosine
  modified_base 40: mod_base = OTHER; note = 2'-O-Methyl-cytidine
  modified_base 41: mod_base = OTHER; note = 2'-O-Methyl-adenosine
  modified_base 42: mod_base = OTHER; note = Nebularine - 2'-O-methylnebularine
  modified_base 46: mod_base = OTHER; note = 2'-O-Methyl-adenosine
  modified_base 48: mod_base = OTHER; note = 2'-O-Methyl-adenosine
  modified_base 50: mod_base = OTHER; note = 2'-O-Methyl-uridine
  modified_base 52: mod_base = OTHER; note = 2'-O-Methyl-adenosine
  modified_base 53: mod_base = OTHER; note = 2'-O-Methyl-guanosine
  modified_base 54: mod_base = OTHER; note = 2'-O-Methyl-guanosine
  modified_base 55: mod_base = OTHER; note = 2'-O-Methyl-cytidine
  modified_base 56: mod_base = OTHER; note = 2'-O-Methyl-uridine
  modified_base 57: mod_base = OTHER; note = Nebularine - 2'-O-methylnebularine
  modified_base 60: mod_base = OTHER; note = 2'-O-Methyl-cytidine
  modified_base 61: mod_base = OTHER; note = 2'-O-Methyl-cytidine
  modified_base 66: mod_base = OTHER; note = 2'-O-Methyl-uridine
  modified_base 67: mod_base = OTHER; note = 2'-O-Methyl-cytidine
  modified_base 70: mod_base = OTHER; note = 2'-O-Methyl-cytidine
  modified_base 71: mod_base = OTHER; note = 2'-O-Methyl-uridine
  modified_base 72: mod_base = OTHER; note = 2'-O-Methyl-uridine
  modified_base 73: mod_base = OTHER; note = 2'-O-Methyl-guanosine
  modified_base 74: mod_base = OTHER; note = 2'-O-Methyl-adenosine
  modified_base 75: mod_base = OTHER; note = 2'-O-Methyl-adenosine
  modified_base 76: mod_base = OTHER; note = 2'-O-Methyl-adenosine
  modified_base 77: mod_base = OTHER; note = 2'-O-Methyl-adenosine
  modified_base 78: mod_base = OTHER; note = 2'-O-Methyl-adenosine
  modified_base 79: mod_base = OTHER; note = 2'-O-Methyl-guanosine
  modified_base 80: mod_base = OTHER; note = 2'-O-Methyl-uridine
  modified_base 81: mod_base = OTHER; note = 2'-O-Methyl-guanosine
  modified_base 83: mod_base = OTHER; note = 2'-O-Methyl-cytidine
  modified_base 84: mod_base = OTHER; note = 2'-O-Methyl-adenosine
  modified_base 85: mod_base = OTHER; note = 2'-O-Methyl-cytidine
  modified_base 86: mod_base = OTHER; note = 2'-O-Methyl-cytidine
  modified_base 87: mod_base = OTHER; note = 2'-O-Methyl-guanosine
  modified_base 88: mod_base = OTHER; note = 2'-O-Methyl-adenosine
  modified_base 89: mod_base = OTHER; note = 2'-O-Methyl-guanosine
  modified_base 90: mod_base = OTHER; note = 2'-O-Methyl-uridine
  modified_base 91: mod_base = OTHER; note = 2'-O-Methyl-cytidine
  modified_base 92: mod_base = OTHER; note = 2'-O-Methyl-guanosine
  modified_base 93: mod_base = OTHER; note = 2'-O-Methyl-guanosine
  modified_base 94: mod_base = OTHER; note = 2'-O-Methyl-uridine
  modified_base 95: mod_base = OTHER; note = 2'-O-Methyl-guanosine
  modified_base 96: mod_base = OTHER; note = 2'-O-Methyl-cytidine
  modified_base 97: mod_base = OTHER; note = 2'-O-Methyl-uridine phosphorothioate
  modified_base 98: mod_base = OTHER; note = 2'-O-Methyl-uridine phosphorothioate
  modified_base 99: mod_base = OTHER; note = 2'-O-Methyl-uridine phosphorothioate
  modified_base 100: mod_base = OTHER; note = 2'-O-Methyl-uridine
caggttccatgggntgctctgttttagagctagaaatagcangttaaaataaggctngtccgttatcaacttgaaaaagtggcaccgagtcggtgctttt

SEQ ID NO: 1931 - RNA, 100 nt, synthetic construct
  source 1..100: mol_type = other RNA; note = Description of Artificial Sequence: Synthetic polynucleotide
  modified_base 1: mod_base = OTHER; note = 2'-O-Methyl-cytidine phosphorothioate
  modified_base 2: mod_base = OTHER; note = 2'-O-Methyl-adenosine phosphorothioate
  modified_base 3: mod_base = OTHER; note = 2'-O-Methyl-guanosine phosphorothioate
  modified_base 14: mod_base = OTHER; note = Nebularine - ribonebularine
  modified_base 21: mod_base = OTHER; note = 2'-O-Methyl-guanosine
  modified_base 28: mod_base = OTHER; note = Nebularine - 2'-O-methylnebularine
  modified_base 29: mod_base = OTHER; note = 2'-O-Methyl-guanosine
  modified_base 30: mod_base = OTHER; note = 2'-O-Methyl-cytidine
  modified_base 31: mod_base = OTHER; note = 2'-O-Methyl-uridine
  modified_base 32: mod_base = OTHER; note = 2'-O-Methyl-adenosine
  modified_base 33: mod_base = OTHER; note = 2'-O-Methyl-guanosine
  modified_base 34: mod_base = OTHER; note = 2'-O-Methyl-adenosine
  modified_base 35: mod_base = OTHER; note = 2'-O-Methyl-adenosine
  modified_base 36: mod_base = OTHER; note = 2'-O-Methyl-adenosine
  modified_base 37: mod_base = OTHER; note = 2'-O-Methyl-uridine
  modified_base 38: mod_base = OTHER; note = 2'-O-Methyl-adenosine
  modified_base 39: mod_base = OTHER; note = 2'-O-Methyl-guanosine
  modified_base 40: mod_base = OTHER; note = 2'-O-Methyl-cytidine
  modified_base 41: mod_base = OTHER; note = 2'-O-Methyl-adenosine
  modified_base 42: mod_base = OTHER; note = 2'-O-Methyl-adenosine
  modified_base 46: mod_base = OTHER; note = 2'-O-Methyl-adenosine
  modified_base 48: mod_base = OTHER; note = 2'-O-Methyl-adenosine
  modified_base 50: mod_base = OTHER; note = 2'-O-Methyl-uridine
  modified_base 52: mod_base = OTHER; note = 2'-O-Methyl-adenosine
  modified_base 53: mod_base = OTHER; note = 2'-O-Methyl-guanosine
  modified_base 54: mod_base = OTHER; note = 2'-O-Methyl-guanosine
  modified_base 55: mod_base = OTHER; note = 2'-O-Methyl-cytidine
  modified_base 56: mod_base = OTHER; note = 2'-O-Methyl-uridine
  modified_base 57: mod_base = OTHER; note = 2'-O-Methyl-adenosine
  modified_base 60: mod_base = OTHER; note = 2'-O-Methyl-cytidine
  modified_base 61: mod_base = OTHER; note = 2'-O-Methyl-cytidine
  modified_base 66: mod_base = OTHER; note = 2'-O-Methyl-uridine
  modified_base 67: mod_base = OTHER; note = 2'-O-Methyl-cytidine
  modified_base 70: mod_base = OTHER; note = 2'-O-Methyl-cytidine
  modified_base 71: mod_base = OTHER; note = 2'-O-Methyl-uridine
  modified_base 72: mod_base = OTHER; note = 2'-O-Methyl-uridine
  modified_base 73: mod_base = OTHER; note = 2'-O-Methyl-guanosine
  modified_base 74: mod_base = OTHER; note = 2'-O-Methyl-adenosine
  modified_base 75: mod_base = OTHER; note = 2'-O-Methyl-adenosine
  modified_base 76: mod_base = OTHER; note = 2'-O-Methyl-adenosine
  modified_base 77: mod_base = OTHER; note = 2'-O-Methyl-adenosine
  modified_base 78: mod_base = OTHER; note = 2'-O-Methyl-adenosine
  modified_base 79: mod_base = OTHER; note = 2'-O-Methyl-guanosine
  modified_base 80: mod_base = OTHER; note = 2'-O-Methyl-uridine
  modified_base 81: mod_base = OTHER; note = 2'-O-Methyl-guanosine
  modified_base 83: mod_base = OTHER; note = 2'-O-Methyl-cytidine
  modified_base 84: mod_base = OTHER; note = 2'-O-Methyl-adenosine
  modified_base 85: mod_base = OTHER; note = 2'-O-Methyl-cytidine
  modified_base 86: mod_base = OTHER; note = 2'-O-Methyl-cytidine
  modified_base 87: mod_base = OTHER; note = 2'-O-Methyl-guanosine
  modified_base 88: mod_base = OTHER; note = 2'-O-Methyl-adenosine
  modified_base 89: mod_base = OTHER; note = 2'-O-Methyl-guanosine
  modified_base 90: mod_base = OTHER; note = 2'-O-Methyl-uridine
  modified_base 91: mod_base = OTHER; note = 2'-O-Methyl-cytidine
  modified_base 92: mod_base = OTHER; note = 2'-O-Methyl-guanosine
  modified_base 93: mod_base = OTHER; note = 2'-O-Methyl-guanosine
  modified_base 94: mod_base = OTHER; note = 2'-O-Methyl-uridine
  modified_base 95: mod_base = OTHER; note = 2'-O-Methyl-guanosine
  modified_base 96: mod_base = OTHER; note = 2'-O-Methyl-cytidine
  modified_base 97: mod_base = OTHER; note = 2'-O-Methyl-uridine phosphorothioate
  modified_base 98: mod_base = OTHER; note = 2'-O-Methyl-uridine phosphorothioate
  modified_base 99: mod_base = OTHER; note = 2'-O-Methyl-uridine phosphorothioate
  modified_base 100: mod_base = OTHER; note = 2'-O-Methyl-uridine
caggttccatgggntgctctgttttagngctagaaatagcaagttaaaataaggctagtccgttatcaacttgaaaaagtggcaccgagtcggtgctttt

SEQ ID NO: 1932 - RNA, 100 nt, synthetic construct
  source 1..100: mol_type = other RNA; note = Description of Artificial Sequence: Synthetic polynucleotide
  modified_base 1: mod_base = OTHER; note = 2'-O-Methyl-cytidine phosphorothioate
  modified_base 2: mod_base = OTHER; note = 2'-O-Methyl-adenosine phosphorothioate
  modified_base 3: mod_base = OTHER; note = 2'-O-Methyl-guanosine phosphorothioate
  modified_base 14: mod_base = OTHER; note = Nebularine - ribonebularine
  modified_base 21: mod_base = OTHER; note = 2'-O-Methyl-guanosine
  modified_base 28: mod_base = OTHER; note = 2'-O-Methyl-adenosine
  modified_base 29: mod_base = OTHER; note = 2'-O-Methyl-guanosine
  modified_base 30: mod_base = OTHER; note = 2'-O-Methyl-cytidine
  modified_base 31: mod_base = OTHER; note = 2'-O-Methyl-uridine
  modified_base 32: mod_base = OTHER; note = 2'-O-Methyl-adenosine
  modified_base 33: mod_base = OTHER; note = 2'-O-Methyl-guanosine
  modified_base 34: mod_base = OTHER; note = 2'-O-Methyl-adenosine
  modified_base 35: mod_base = OTHER; note = 2'-O-Methyl-adenosine
  modified_base 36: mod_base = OTHER; note = 2'-O-Methyl-adenosine
  modified_base 37: mod_base = OTHER; note = 2'-O-Methyl-uridine
  modified_base 38: mod_base = OTHER; note = 2'-O-Methyl-adenosine
  modified_base 39: mod_base = OTHER; note = 2'-O-Methyl-guanosine
  modified_base 40: mod_base = OTHER; note = 2'-O-Methyl-cytidine
  modified_base 41: mod_base = OTHER; note = 2'-O-Methyl-adenosine
  modified_base 42: mod_base = OTHER; note = Nebularine - 2'-O-methylnebularine
  modified_base 46: mod_base = OTHER; note = 2'-O-Methyl-adenosine
  modified_base 48: mod_base = OTHER; note = 2'-O-Methyl-adenosine
  modified_base 50: mod_base = OTHER; note = 2'-O-Methyl-uridine
  modified_base 52: mod_base = OTHER; note = 2'-O-Methyl-adenosine
  modified_base 53: mod_base = OTHER; note = 2'-O-Methyl-guanosine
  modified_base 54: mod_base = OTHER; note = 2'-O-Methyl-guanosine
  modified_base 55: mod_base = OTHER; note = 2'-O-Methyl-cytidine
  modified_base 56: mod_base = OTHER; note = 2'-O-Methyl-uridine
  modified_base 57: mod_base = OTHER; note = 2'-O-Methyl-adenosine
  modified_base 60: mod_base = OTHER; note = 2'-O-Methyl-cytidine
  modified_base 61: mod_base = OTHER; note = 2'-O-Methyl-cytidine
  modified_base 66: mod_base = OTHER; note = 2'-O-Methyl-uridine
  modified_base 67: mod_base = OTHER; note = 2'-O-Methyl-cytidine
  modified_base 70: mod_base = OTHER; note = 2'-O-Methyl-cytidine
  modified_base 71: mod_base = OTHER; note = 2'-O-Methyl-uridine
  modified_base 72: mod_base = OTHER; note = 2'-O-Methyl-uridine
  modified_base 73: mod_base = OTHER; note = 2'-O-Methyl-guanosine
  modified_base 74: mod_base = OTHER; note = 2'-O-Methyl-adenosine
  modified_base 75: mod_base = OTHER; note = 2'-O-Methyl-adenosine
  modified_base 76: mod_base = OTHER; note = 2'-O-Methyl-adenosine
  modified_base 77: mod_base = OTHER; note = 2'-O-Methyl-adenosine
  modified_base 78: mod_base = OTHER; note = 2'-O-Methyl-adenosine
  modified_base 79: mod_base = OTHER; note = 2'-O-Methyl-guanosine
  modified_base 80: mod_base = OTHER; note = 2'-O-Methyl-uridine
  modified_base 81: mod_base = OTHER; note = 2'-O-Methyl-guanosine
  modified_base 83: mod_base = OTHER; note = 2'-O-Methyl-cytidine
  modified_base 84: mod_base = OTHER; note = 2'-O-Methyl-adenosine
  modified_base 85: mod_base = OTHER; note = 2'-O-Methyl-cytidine
  modified_base 86: mod_base = OTHER; note = 2'-O-Methyl-cytidine
  modified_base 87: mod_base = OTHER; note = 2'-O-Methyl-guanosine
  modified_base 88: mod_base = OTHER; note = 2'-O-Methyl-adenosine
  modified_base 89: mod_base = OTHER; note = 2'-O-Methyl-guanosine
  modified_base 90: mod_base = OTHER; note = 2'-O-Methyl-uridine
  modified_base 91: mod_base = OTHER; note = 2'-O-Methyl-cytidine
  modified_base 92: mod_base = OTHER; note = 2'-O-Methyl-guanosine
  modified_base 93: mod_base = OTHER; note = 2'-O-Methyl-guanosine
  modified_base 94: mod_base = OTHER; note = 2'-O-Methyl-uridine
  modified_base 95: mod_base = OTHER; note = 2'-O-Methyl-guanosine
  modified_base 96: mod_base = OTHER; note = 2'-O-Methyl-cytidine
  modified_base 97: mod_base = OTHER; note = 2'-O-Methyl-uridine phosphorothioate
  modified_base 98: mod_base = OTHER; note = 2'-O-Methyl-uridine phosphorothioate
  modified_base 99: mod_base = OTHER; note = 2'-O-Methyl-uridine phosphorothioate
  modified_base 100: mod_base = OTHER; note = 2'-O-Methyl-uridine
caggttccatgggntgctctgttttagagctagaaatagcangttaaaataaggctagtccgttatcaacttgaaaaagtggcaccgagtcggtgctttt

SEQ ID NO: 1933 - RNA, 100 nt, synthetic construct
  source 1..100: mol_type = other RNA; note = Description of Artificial Sequence: Synthetic polynucleotide
  modified_base 1: mod_base = OTHER; note = 2'-O-Methyl-cytidine phosphorothioate
  modified_base 2: mod_base = OTHER; note = 2'-O-Methyl-adenosine phosphorothioate
  modified_base 3: mod_base = OTHER; note = 2'-O-Methyl-guanosine phosphorothioate
  modified_base 14: mod_base = OTHER; note = Nebularine - ribonebularine
  modified_base 21: mod_base = OTHER; note = 2'-O-Methyl-guanosine
  modified_base 28: mod_base = OTHER; note = 2'-O-Methyl-adenosine
  modified_base 29: mod_base = OTHER; note = 2'-O-Methyl-guanosine
  modified_base 30: mod_base = OTHER; note = 2'-O-Methyl-cytidine
  modified_base 31: mod_base = OTHER; note = 2'-O-Methyl-uridine
  modified_base 32: mod_base = OTHER; note = 2'-O-Methyl-adenosine
  modified_base 33: mod_base = OTHER; note = 2'-O-Methyl-guanosine
  modified_base 34: mod_base = OTHER; note = Nebularine - 2'-O-methylnebularine
  modified_base 35: mod_base = OTHER; note = 2'-O-Methyl-adenosine
  modified_base 36: mod_base = OTHER; note = 2'-O-Methyl-adenosine
  modified_base 37: mod_base = OTHER; note = 2'-O-Methyl-uridine
  modified_base 38: mod_base = OTHER; note = 2'-O-Methyl-adenosine
  modified_base 39: mod_base = OTHER; note = 2'-O-Methyl-guanosine
  modified_base 40: mod_base = OTHER; note = 2'-O-Methyl-cytidine
  modified_base 41: mod_base = OTHER; note = 2'-O-Methyl-adenosine
  modified_base 42: mod_base = OTHER; note = Nebularine - 2'-O-methylnebularine
  modified_base 46: mod_base = OTHER; note = 2'-O-Methyl-adenosine
  modified_base 48: mod_base = OTHER; note = 2'-O-Methyl-adenosine
  modified_base 50: mod_base = OTHER; note = 2'-O-Methyl-uridine
  modified_base 52: mod_base = OTHER; note = 2'-O-Methyl-adenosine
  modified_base 53: mod_base = OTHER; note = 2'-O-Methyl-guanosine
  modified_base 54: mod_base = OTHER; note = 2'-O-Methyl-guanosine
  modified_base 55: mod_base = OTHER; note = 2'-O-Methyl-cytidine
  modified_base 56: mod_base = OTHER; note = 2'-O-Methyl-uridine
  modified_base 57: mod_base = OTHER; note = 2'-O-Methyl-adenosine
  modified_base 60: mod_base = OTHER; note = 2'-O-Methyl-cytidine
  modified_base 61: mod_base = OTHER; note = 2'-O-Methyl-cytidine
  modified_base 66: mod_base = OTHER; note = 2'-O-Methyl-uridine
  modified_base 67: mod_base = OTHER; note = 2'-O-Methyl-cytidine
  modified_base 70: mod_base = OTHER; note = 2'-O-Methyl-cytidine
  modified_base 71: mod_base = OTHER; note = 2'-O-Methyl-uridine
  modified_base 72: mod_base = OTHER; note = 2'-O-Methyl-uridine
  modified_base 73: mod_base = OTHER; note = 2'-O-Methyl-guanosine
  modified_base 74: mod_base = OTHER; note = 2'-O-Methyl-adenosine
  modified_base 75: mod_base = OTHER; note = 2'-O-Methyl-adenosine
  modified_base 76: mod_base = OTHER; note = 2'-O-Methyl-adenosine
  modified_base 77: mod_base = OTHER; note = 2'-O-Methyl-adenosine
  modified_base 78: mod_base = OTHER; note = 2'-O-Methyl-adenosine
  modified_base 79: mod_base = OTHER; note = 2'-O-Methyl-guanosine
  modified_base 80: mod_base = OTHER; note = 2'-O-Methyl-uridine
  modified_base 81: mod_base = OTHER; note = 2'-O-Methyl-guanosine
  modified_base 83: mod_base = OTHER; note = 2'-O-Methyl-cytidine
  modified_base 84: mod_base = OTHER; note = 2'-O-Methyl-adenosine
  modified_base 85: mod_base = OTHER; note = 2'-O-Methyl-cytidine
  modified_base 86: mod_base = OTHER; note = 2'-O-Methyl-cytidine
  modified_base 87: mod_base = OTHER; note = 2'-O-Methyl-guanosine
  modified_base 88: mod_base = OTHER; note = 2'-O-Methyl-adenosine
  modified_base 89: mod_base = OTHER; note = 2'-O-Methyl-guanosine
  modified_base 90: mod_base = OTHER; note = 2'-O-Methyl-uridine
  modified_base 91: mod_base = OTHER; note = 2'-O-Methyl-cytidine
  modified_base 92: mod_base = OTHER; note = 2'-O-Methyl-guanosine
  modified_base 93: mod_base = OTHER; note = 2'-O-Methyl-guanosine
  modified_base 94: mod_base = OTHER; note = 2'-O-Methyl-uridine
  modified_base 95: mod_base = OTHER; note = 2'-O-Methyl-guanosine
  modified_base 96: mod_base = OTHER; note = 2'-O-Methyl-cytidine
  modified_base 97: mod_base = OTHER; note = 2'-O-Methyl-uridine phosphorothioate
  modified_base 98: mod_base = OTHER; note = 2'-O-Methyl-uridine phosphorothioate
  modified_base 99: mod_base = OTHER; note = 2'-O-Methyl-uridine phosphorothioate
  modified_base 100: mod_base = OTHER; note = 2'-O-Methyl-uridine
caggttccatgggntgctctgttttagagctagnaatagcangttaaaataaggctagtccgttatcaacttgaaaaagtggcaccgagtcggtgctttt

SEQ ID NO: 1934 - RNA, 100 nt, synthetic construct
  source 1..100: mol_type = other RNA; note = Description of Artificial Sequence: Synthetic polynucleotide
  modified_base 1: mod_base = OTHER; note = 2'-O-Methyl-cytidine phosphorothioate
  modified_base 2: mod_base = OTHER; note = 2'-O-Methyl-adenosine phosphorothioate
  modified_base 3: mod_base = OTHER; note = 2'-O-Methyl-guanosine phosphorothioate
  modified_base 9: mod_base = OTHER; note = Nebularine - ribonebularine
  modified_base 21: mod_base = OTHER; note = 2'-O-Methyl-guanosine
  modified_base 28: mod_base = OTHER; note = Nebularine - 2'-O-methylnebularine
  modified_base 29: mod_base = OTHER; note = 2'-O-Methyl-guanosine
  modified_base 30: mod_base = OTHER; note = 2'-O-Methyl-cytidine
  modified_base 31: mod_base = OTHER; note = 2'-O-Methyl-uridine
  modified_base 32: mod_base = OTHER; note = 2'-O-Methyl-adenosine
  modified_base 33: mod_base = OTHER; note = 2'-O-Methyl-guanosine
  modified_base 34: mod_base = OTHER; note = Nebularine - 2'-O-methylnebularine
  modified_base 35: mod_base = OTHER; note = 2'-O-Methyl-adenosine
  modified_base 36: mod_base = OTHER; note = 2'-O-Methyl-adenosine
  modified_base 37: mod_base = OTHER; note = 2'-O-Methyl-uridine
  modified_base 38: mod_base = OTHER; note = 2'-O-Methyl-adenosine
  modified_base 39: mod_base = OTHER; note = 2'-O-Methyl-guanosine
  modified_base 40: mod_base = OTHER; note = 2'-O-Methyl-cytidine
  modified_base 41: mod_base = OTHER; note = 2'-O-Methyl-adenosine
  modified_base 42: mod_base = OTHER; note = Nebularine - 2'-O-methylnebularine
  modified_base 46: mod_base = OTHER; note = 2'-O-Methyl-adenosine
  modified_base 48: mod_base = OTHER; note = 2'-O-Methyl-adenosine
  modified_base 50: mod_base = OTHER; note = 2'-O-Methyl-uridine
  modified_base 52: mod_base = OTHER; note = 2'-O-Methyl-adenosine
  modified_base 53: mod_base = OTHER; note = 2'-O-Methyl-guanosine
  modified_base 54: mod_base = OTHER; note = 2'-O-Methyl-guanosine
  modified_base 55: mod_base = OTHER; note = 2'-O-Methyl-cytidine
  modified_base 56: mod_base = OTHER; note = 2'-O-Methyl-uridine
  modified_base 57: mod_base = OTHER; note = Nebularine - 2'-O-methylnebularine
  modified_base 60: mod_base = OTHER; note = 2'-O-Methyl-cytidine
  modified_base 61: mod_base = OTHER; note = 2'-O-Methyl-cytidine
  modified_base 66: mod_base = OTHER; note = 2'-O-Methyl-uridine
  modified_base 67: mod_base = OTHER; note = 2'-O-Methyl-cytidine
  modified_base 70: mod_base = OTHER; note = 2'-O-Methyl-cytidine
  modified_base 71: mod_base = OTHER; note = 2'-O-Methyl-uridine
  modified_base 72: mod_base = OTHER; note = 2'-O-Methyl-uridine
  modified_base 73: mod_base = OTHER; note = 2'-O-Methyl-guanosine
  modified_base 74: mod_base = OTHER; note = 2'-O-Methyl-adenosine
  modified_base 75: mod_base = OTHER; note = 2'-O-Methyl-adenosine
  modified_base 76: mod_base = OTHER; note = 2'-O-Methyl-adenosine
  modified_base 77: mod_base = OTHER; note = 2'-O-Methyl-adenosine
  modified_base 78: mod_base = OTHER; note = 2'-O-Methyl-adenosine
  modified_base 79: mod_base = OTHER; note = 2'-O-Methyl-guanosine
  modified_base 80: mod_base = OTHER; note = 2'-O-Methyl-uridine
  modified_base 81: mod_base = OTHER; note = 2'-O-Methyl-guanosine
  modified_base 83: mod_base = OTHER; note = 2'-O-Methyl-cytidine
  modified_base 84: mod_base = OTHER; note = 2'-O-Methyl-adenosine
  modified_base 85: mod_base = OTHER; note = 2'-O-Methyl-cytidine
  modified_base 86: mod_base = OTHER; note = 2'-O-Methyl-cytidine
  modified_base 87: mod_base = OTHER; note = 2'-O-Methyl-guanosine
  modified_base 88: mod_base = OTHER; note = 2'-O-Methyl-adenosine
  modified_base 89: mod_base = OTHER; note = 2'-O-Methyl-guanosine
  modified_base 90: mod_base = OTHER; note = 2'-O-Methyl-uridine
  modified_base 91: mod_base = OTHER; note = 2'-O-Methyl-cytidine
  modified_base 92: mod_base = OTHER; note = 2'-O-Methyl-guanosine
  modified_base 93: mod_base = OTHER; note = 2'-O-Methyl-guanosine
  modified_base 94: mod_base = OTHER; note = 2'-O-Methyl-uridine
  modified_base 95: mod_base = OTHER; note = 2'-O-Methyl-guanosine
  modified_base 96: mod_base = OTHER; note = 2'-O-Methyl-cytidine
  modified_base 97: mod_base = OTHER; note = 2'-O-Methyl-uridine phosphorothioate
  modified_base 98: mod_base = OTHER; note = 2'-O-Methyl-uridine phosphorothioate
  modified_base 99: mod_base = OTHER; note = 2'-O-Methyl-uridine phosphorothioate
  modified_base 100: mod_base = OTHER; note = 2'-O-Methyl-uridine
caggttccntgggatgctctgttttagngctagnaatagcangttaaaataaggctngtccgttatcaacttgaaaaagtggcaccgagtcggtgctttt

SEQ ID NO: 1935 - RNA, 100 nt, synthetic construct
  source 1..100: mol_type = other RNA; note = Description of Artificial Sequence: Synthetic polynucleotide
  modified_base 1: mod_base = OTHER; note = 2'-O-Methyl-cytidine phosphorothioate
  modified_base 2: mod_base = OTHER; note = 2'-O-Methyl-adenosine phosphorothioate
  modified_base 3: mod_base = OTHER; note = 2'-O-Methyl-guanosine phosphorothioate
  modified_base 9: mod_base = OTHER; note = Nebularine - ribonebularine
  modified_base 21: mod_base = OTHER; note = 2'-O-Methyl-guanosine
  modified_base 28: mod_base = OTHER; note = 2'-O-Methyl-adenosine
  modified_base 29: mod_base = OTHER; note = 2'-O-Methyl-guanosine
  modified_base 30: mod_base = OTHER; note = 2'-O-Methyl-cytidine
  modified_base 31: mod_base = OTHER; note = 2'-O-Methyl-uridine
  modified_base 32: mod_base = OTHER; note = 2'-O-Methyl-adenosine
  modified_base 33: mod_base = OTHER; note = 2'-O-Methyl-guanosine
  modified_base 34: mod_base = OTHER; note = Nebularine - 2'-O-methylnebularine
  modified_base 35: mod_base = OTHER; note = 2'-O-Methyl-adenosine
  modified_base 36: mod_base = OTHER; note = 2'-O-Methyl-adenosine
  modified_base 37: mod_base = OTHER; note = 2'-O-Methyl-uridine
  modified_base 38: mod_base = OTHER; note = 2'-O-Methyl-adenosine
  modified_base 39: mod_base = OTHER; note = 2'-O-Methyl-guanosine
  modified_base 40: mod_base = OTHER; note = 2'-O-Methyl-cytidine
  modified_base 41: mod_base = OTHER; note = 2'-O-Methyl-adenosine
  modified_base 42: mod_base = OTHER; note = Nebularine - 2'-O-methylnebularine
  modified_base 46: mod_base = OTHER; note = 2'-O-Methyl-adenosine
  modified_base 48: mod_base = OTHER; note = 2'-O-Methyl-adenosine
  modified_base 50: mod_base = OTHER; note = 2'-O-Methyl-uridine
  modified_base 52: mod_base = OTHER; note = 2'-O-Methyl-adenosine
  modified_base 53: mod_base = OTHER; note = 2'-O-Methyl-guanosine
  modified_base 54: mod_base = OTHER; note = 2'-O-Methyl-guanosine
  modified_base 55: mod_base = OTHER; note = 2'-O-Methyl-cytidine
  modified_base 56: mod_base = OTHER; note = 2'-O-Methyl-uridine
  modified_base 57: mod_base = OTHER; note = Nebularine - 2'-O-methylnebularine
  modified_base 60: mod_base = OTHER; note = 2'-O-Methyl-cytidine
  modified_base 61: mod_base = OTHER; note = 2'-O-Methyl-cytidine
  modified_base 66: mod_base = OTHER; note = 2'-O-Methyl-uridine
  modified_base 67: mod_base = OTHER; note = 2'-O-Methyl-cytidine
  modified_base 70: mod_base = OTHER; note = 2'-O-Methyl-cytidine
  modified_base 71: mod_base = OTHER; note = 2'-O-Methyl-uridine
  modified_base 72: mod_base = OTHER; note = 2'-O-Methyl-uridine
  modified_base 73: mod_base = OTHER; note = 2'-O-Methyl-guanosine
  modified_base 74: mod_base = OTHER; note = 2'-O-Methyl-adenosine
  modified_base 75: mod_base = OTHER; note = 2'-O-Methyl-adenosine
  modified_base 76: mod_base = OTHER; note = 2'-O-Methyl-adenosine
  modified_base 77: mod_base = OTHER; note = 2'-O-Methyl-adenosine
  modified_base 78: mod_base = OTHER; note = 2'-O-Methyl-adenosine
  modified_base 79: mod_base = OTHER; note = 2'-O-Methyl-guanosine
  modified_base 80: mod_base = OTHER; note = 2'-O-Methyl-uridine
  modified_base 81: mod_base = OTHER; note = 2'-O-Methyl-guanosine
  modified_base 83: mod_base = OTHER; note = 2'-O-Methyl-cytidine
  modified_base 84: mod_base = OTHER; note = 2'-O-Methyl-adenosine
  modified_base 85: mod_base = OTHER; note = 2'-O-Methyl-cytidine
  modified_base 86: mod_base = OTHER; note = 2'-O-Methyl-cytidine
  modified_base 87: mod_base = OTHER; note = 2'-O-Methyl-guanosine
  modified_base 88: mod_base = OTHER; note = 2'-O-Methyl-adenosine
  modified_base 89: mod_base = OTHER; note = 2'-O-Methyl-guanosine
  modified_base 90: mod_base = OTHER; note = 2'-O-Methyl-uridine
  modified_base 91: mod_base = OTHER; note = 2'-O-Methyl-cytidine
  modified_base 92: mod_base = OTHER; note = 2'-O-Methyl-guanosine
  modified_base 93: mod_base = OTHER; note = 2'-O-Methyl-guanosine
  modified_base 94: mod_base = OTHER; note = 2'-O-Methyl-uridine
  modified_base 95: mod_base = OTHER; note = 2'-O-Methyl-guanosine
  modified_base 96: mod_base = OTHER; note = 2'-O-Methyl-cytidine
  modified_base 97: mod_base = OTHER; note = 2'-O-Methyl-uridine phosphorothioate
  modified_base 98: mod_base = OTHER; note = 2'-O-Methyl-uridine phosphorothioate
  modified_base 99: mod_base = OTHER; note = 2'-O-Methyl-uridine phosphorothioate
  modified_base 100: mod_base = OTHER; note = 2'-O-Methyl-uridine
caggttccntgggatgctctgttttagagctagnaatagcangttaaaataaggctngtccgttatcaacttgaaaaagtggcaccgagtcggtgctttt

SEQ ID NO: 1936 - RNA, 100 nt, synthetic construct
  source 1..100: mol_type = other RNA; note = Description of Artificial Sequence: Synthetic polynucleotide
  modified_base 1: mod_base = OTHER; note = 2'-O-Methyl-cytidine phosphorothioate
  modified_base 2: mod_base = OTHER; note = 2'-O-Methyl-adenosine phosphorothioate
  modified_base 3: mod_base = OTHER; note = 2'-O-Methyl-guanosine phosphorothioate
  modified_base 9: mod_base = OTHER; note = Nebularine - ribonebularine
  modified_base 21: mod_base = OTHER; note = 2'-O-Methyl-guanosine
  modified_base 28: mod_base = OTHER; note = 2'-O-Methyl-adenosine
  modified_base 29: mod_base = OTHER; note = 2'-O-Methyl-guanosine
  modified_base 30: mod_base = OTHER; note = 2'-O-Methyl-cytidine
  modified_base 31: mod_base = OTHER; note = 2'-O-Methyl-uridine
  modified_base 32: mod_base = OTHER; note = 2'-O-Methyl-adenosine
  modified_base 33: mod_base = OTHER; note = 2'-O-Methyl-guanosine
  modified_base 34: mod_base = OTHER; note = 2'-O-Methyl-adenosine
  modified_base 35: mod_base = OTHER; note = 2'-O-Methyl-adenosine
  modified_base 36: mod_base = OTHER; note = 2'-O-Methyl-adenosine
  modified_base 37: mod_base = OTHER; note = 2'-O-Methyl-uridine
  modified_base 38: mod_base = OTHER; note = 2'-O-Methyl-adenosine
  modified_base 39: mod_base = OTHER; note = 2'-O-Methyl-guanosine
  modified_base 40: mod_base = OTHER; note = 2'-O-Methyl-cytidine
  modified_base 41: mod_base = OTHER; note = 2'-O-Methyl-adenosine
  modified_base 42: mod_base = OTHER; note = Nebularine - 2'-O-methylnebularine
  modified_base 46: mod_base = OTHER; note = 2'-O-Methyl-adenosine
  modified_base 48: mod_base = OTHER; note = 2'-O-Methyl-adenosine
  modified_base 50: mod_base = OTHER; note = 2'-O-Methyl-uridine
  modified_base 52: mod_base = OTHER; note = 2'-O-Methyl-adenosine
  modified_base 53: mod_base = OTHER; note = 2'-O-Methyl-guanosine
  modified_base 54: mod_base = OTHER; note = 2'-O-Methyl-guanosine
  modified_base 55: mod_base = OTHER; note = 2'-O-Methyl-cytidine
  modified_base 56: mod_base = OTHER; note = 2'-O-Methyl-uridine
  modified_base 57: mod_base = OTHER; note = Nebularine - 2'-O-methylnebularine
  modified_base 60: mod_base = OTHER; note = 2'-O-Methyl-cytidine
  modified_base 61: mod_base = OTHER; note = 2'-O-Methyl-cytidine
  modified_base 66: mod_base = OTHER; note = 2'-O-Methyl-uridine
  modified_base 67: mod_base = OTHER; note = 2'-O-Methyl-cytidine
  modified_base 70: mod_base = OTHER; note = 2'-O-Methyl-cytidine
  modified_base 71: mod_base = OTHER; note = 2'-O-Methyl-uridine
  modified_base 72: mod_base = OTHER; note = 2'-O-Methyl-uridine
  modified_base 73: mod_base = OTHER; note = 2'-O-Methyl-guanosine
  modified_base 74: mod_base = OTHER; note = 2'-O-Methyl-adenosine
  modified_base 75: mod_base = OTHER; note = 2'-O-Methyl-adenosine
  modified_base 76: mod_base = OTHER; note = 2'-O-Methyl-adenosine
  modified_base 77: mod_base = OTHER; note = 2'-O-Methyl-adenosine
  modified_base 78: mod_base = OTHER; note = 2'-O-Methyl-adenosine
  modified_base 79: mod_base = OTHER; note = 2'-O-Methyl-guanosine
  modified_base 80: mod_base = OTHER; note = 2'-O-Methyl-uridine
  modified_base 81: mod_base = OTHER; note = 2'-O-Methyl-guanosine
  modified_base 83: mod_base = OTHER; note = 2'-O-Methyl-cytidine
  modified_base 84: mod_base = OTHER; note = 2'-O-Methyl-adenosine
  modified_base 85: mod_base = OTHER; note = 2'-O-Methyl-cytidine
  modified_base 86: mod_base = OTHER; note = 2'-O-Methyl-cytidine
  modified_base 87: mod_base = OTHER; note = 2'-O-Methyl-guanosine
  modified_base 88: mod_base = OTHER; note = 2'-O-Methyl-adenosine
  modified_base 89: mod_base = OTHER; note = 2'-O-Methyl-guanosine
  modified_base 90: mod_base = OTHER; note = 2'-O-Methyl-uridine
  modified_base 91: mod_base = OTHER; note = 2'-O-Methyl-cytidine
  modified_base 92: mod_base = OTHER; note = 2'-O-Methyl-guanosine
  modified_base 93: mod_base = OTHER; note = 2'-O-Methyl-guanosine
  modified_base 94: mod_base = OTHER; note = 2'-O-Methyl-uridine
  modified_base 95: mod_base = OTHER; note = 2'-O-Methyl-guanosine
  modified_base 96: mod_base = OTHER; note = 2'-O-Methyl-cytidine
  modified_base 97: mod_base = OTHER; note = 2'-O-Methyl-uridine phosphorothioate
  modified_base 98: mod_base = OTHER; note = 2'-O-Methyl-uridine phosphorothioate
  modified_base 99: mod_base = OTHER; note = 2'-O-Methyl-uridine phosphorothioate
  modified_base 100: mod_base = OTHER; note = 2'-O-Methyl-uridine
caggttccntgggatgctctgttttagagctagaaatagcangttaaaataaggctngtccgttatcaacttgaaaaagtggcaccgagtcggtgctttt

SEQ ID NO: 1937 - RNA, 100 nt, synthetic construct
  source 1..100: mol_type = other RNA; note = Description of Artificial Sequence: Synthetic polynucleotide
  modified_base 1: mod_base = OTHER; note = 2'-O-Methyl-cytidine phosphorothioate
  modified_base 2: mod_base = OTHER; note = 2'-O-Methyl-adenosine phosphorothioate
  modified_base 3: mod_base = OTHER; note = 2'-O-Methyl-guanosine phosphorothioate
  modified_base 9: mod_base = OTHER; note = Nebularine - ribonebularine
  modified_base 21: mod_base = OTHER; note = 2'-O-Methyl-guanosine
  modified_base 28: mod_base = OTHER; note = Nebularine - 2'-O-methylnebularine
  modified_base 29: mod_base = OTHER; note = 2'-O-Methyl-guanosine
  modified_base 30: mod_base = OTHER; note = 2'-O-Methyl-cytidine
  modified_base 31: mod_base = OTHER; note = 2'-O-Methyl-uridine
  modified_base 32: mod_base = OTHER; note = 2'-O-Methyl-adenosine
  modified_base 33: mod_base = OTHER; note = 2'-O-Methyl-guanosine
  modified_base 34: mod_base = OTHER; note = 2'-O-Methyl-adenosine
  modified_base 35: mod_base = OTHER; note = 2'-O-Methyl-adenosine
  modified_base 36: mod_base = OTHER; note = 2'-O-Methyl-adenosine
  modified_base 37: mod_base = OTHER; note = 2'-O-Methyl-uridine
  modified_base 38: mod_base = OTHER; note = 2'-O-Methyl-adenosine
  modified_base 39: mod_base = OTHER; note = 2'-O-Methyl-guanosine
  modified_base 40: mod_base = OTHER; note = 2'-O-Methyl-cytidine
  modified_base 41: mod_base = OTHER; note = 2'-O-Methyl-adenosine
  modified_base 42: mod_base = OTHER; note = 2'-O-Methyl-adenosine
  modified_base 46: mod_base = OTHER; note = 2'-O-Methyl-adenosine
  modified_base 48: mod_base = OTHER; note = 2'-O-Methyl-adenosine
  modified_base 50: mod_base = OTHER; note = 2'-O-Methyl-uridine
  modified_base 52: mod_base = OTHER; note = 2'-O-Methyl-adenosine
  modified_base 53: mod_base = OTHER; note = 2'-O-Methyl-guanosine
  modified_base 54: mod_base = OTHER; note = 2'-O-Methyl-guanosine
  modified_base 55: mod_base = OTHER; note = 2'-O-Methyl-cytidine
  modified_base 56: mod_base = OTHER; note = 2'-O-Methyl-uridine
  modified_base 57: mod_base = OTHER; note = 2'-O-Methyl-adenosine
  modified_base 60: mod_base = OTHER; note = 2'-O-Methyl-cytidine
  modified_base 61: mod_base = OTHER; note = 2'-O-Methyl-cytidine
  modified_base 66: mod_base = OTHER; note = 2'-O-Methyl-uridine
  modified_base 67: mod_base = OTHER; note = 2'-O-Methyl-cytidine
  modified_base 70: mod_base = OTHER; note = 2'-O-Methyl-cytidine
  modified_base 71: mod_base = OTHER; note = 2'-O-Methyl-uridine
  modified_base 72: mod_base = OTHER; note = 2'-O-Methyl-uridine
  modified_base 73: mod_base = OTHER; note = 2'-O-Methyl-guanosine
  modified_base 74: mod_base = OTHER; note = 2'-O-Methyl-adenosine
  modified_base 75: mod_base = OTHER; note = 2'-O-Methyl-adenosine
  modified_base 76: mod_base = OTHER; note = 2'-O-Methyl-adenosine
  modified_base 77: mod_base = OTHER; note = 2'-O-Methyl-adenosine
  modified_base 78: mod_base = OTHER; note = 2'-O-Methyl-adenosine
  modified_base 79: mod_base = OTHER; note = 2'-O-Methyl-guanosine
  modified_base 80: mod_base = OTHER; note = 2'-O-Methyl-uridine
  modified_base 81: mod_base = OTHER; note = 2'-O-Methyl-guanosine
  modified_base 83: mod_base = OTHER; note = 2'-O-Methyl-cytidine
  modified_base 84: mod_base = OTHER; note = 2'-O-Methyl-adenosine
  modified_base 85: mod_base = OTHER; note = 2'-O-Methyl-cytidine
  modified_base 86: mod_base = OTHER; note = 2'-O-Methyl-cytidine
  modified_base 87: mod_base = OTHER; note = 2'-O-Methyl-guanosine
  modified_base 88: mod_base = OTHER; note = 2'-O-Methyl-adenosine
  modified_base 89: mod_base = OTHER; note = 2'-O-Methyl-guanosine
  modified_base 90: mod_base = OTHER; note = 2'-O-Methyl-uridine
  modified_base 91: mod_base = OTHER; note = 2'-O-Methyl-cytidine
  modified_base 92: mod_base = OTHER; note = 2'-O-Methyl-guanosine
  modified_base 93: mod_base = OTHER; note = 2'-O-Methyl-guanosine
  modified_base 94: mod_base = OTHER; note = 2'-O-Methyl-uridine
  modified_base 95: mod_base = OTHER; note = 2'-O-Methyl-guanosine
  modified_base 96: mod_base = OTHER; note = 2'-O-Methyl-cytidine
  modified_base 97: mod_base = OTHER; note = 2'-O-Methyl-uridine phosphorothioate
  modified_base 98: mod_base = OTHER; note = 2'-O-Methyl-uridine phosphorothioate
  modified_base 99: mod_base = OTHER; note = 2'-O-Methyl-uridine phosphorothioate
  modified_base 100: mod_base = OTHER; note = 2'-O-Methyl-uridine
caggttccntgggatgctctgttttagngctagaaatagcaagttaaaataaggctagtccgttatcaacttgaaaaagtggcaccgagtcggtgctttt

SEQ ID NO: 1938 - RNA, 100 nt, synthetic construct
  source 1..100: mol_type = other RNA; note = Description of Artificial Sequence: Synthetic polynucleotide
  modified_base 1: mod_base = OTHER; note = 2'-O-Methyl-cytidine phosphorothioate
  modified_base 2: mod_base = OTHER; note = 2'-O-Methyl-adenosine phosphorothioate
  modified_base 3: mod_base = OTHER; note = 2'-O-Methyl-guanosine phosphorothioate
  modified_base 9: mod_base = OTHER; note = Nebularine - ribonebularine
  modified_base 21: mod_base = OTHER; note = 2'-O-Methyl-guanosine
  modified_base 28: mod_base = OTHER; note = 2'-O-Methyl-adenosine
  modified_base 29: mod_base = OTHER; note = 2'-O-Methyl-guanosine
  modified_base 30: mod_base = OTHER; note = 2'-O-Methyl-cytidine
  modified_base 31: mod_base = OTHER; note = 2'-O-Methyl-uridine
  modified_base 32: mod_base = OTHER; note = 2'-O-Methyl-adenosine
  modified_base 33: mod_base = OTHER; note = 2'-O-Methyl-guanosine
  modified_base 34: mod_base = OTHER; note = 2'-O-Methyl-adenosine
  modified_base 35: mod_base = OTHER; note = 2'-O-Methyl-adenosine
  modified_base 36: mod_base = OTHER; note = 2'-O-Methyl-adenosine
  modified_base 37: mod_base = OTHER; note = 2'-O-Methyl-uridine
  modified_base 38: mod_base = OTHER; note = 2'-O-Methyl-adenosine
  modified_base 39: mod_base = OTHER; note = 2'-O-Methyl-guanosine
  modified_base 40: mod_base = OTHER; note = 2'-O-Methyl-cytidine
  modified_base 41: mod_base = OTHER; note = 2'-O-Methyl-adenosine
  modified_base 42: mod_base = OTHER; note = Nebularine - 2'-O-methylnebularine
  modified_base 46: mod_base = OTHER; note = 2'-O-Methyl-adenosine
  modified_base 48: mod_base = OTHER; note = 2'-O-Methyl-adenosine
  modified_base 50: mod_base = OTHER; note = 2'-O-Methyl-uridine
  modified_base 52: mod_base = OTHER; note = 2'-O-Methyl-adenosine
  modified_base 53: mod_base = OTHER; note = 2'-O-Methyl-guanosine
  modified_base 54: mod_base = OTHER; note = 2'-O-Methyl-guanosine
  modified_base 55: mod_base = OTHER; note = 2'-O-Methyl-cytidine
  modified_base 56: mod_base = OTHER; note = 2'-O-Methyl-uridine
  modified_base 57: mod_base = OTHER; note = 2'-O-Methyl-adenosine
  modified_base 60: mod_base = OTHER; note = 2'-O-Methyl-cytidine
  modified_base 61: mod_base = OTHER; note = 2'-O-Methyl-cytidine
  modified_base 66: mod_base = OTHER; note = 2'-O-Methyl-uridine
  modified_base 67: mod_base = OTHER; note = 2'-O-Methyl-cytidine
  modified_base 70: mod_base = OTHER; note = 2'-O-Methyl-cytidine
  modified_base 71: mod_base = OTHER; note = 2'-O-Methyl-uridine
  modified_base 72: mod_base = OTHER; note = 2'-O-Methyl-uridine
  modified_base 73: mod_base = OTHER; note = 2'-O-Methyl-guanosine
  modified_base 74: mod_base = OTHER; note = 2'-O-Methyl-adenosine
  modified_base 75: mod_base = OTHER; note = 2'-O-Methyl-adenosine
  modified_base 76: mod_base = OTHER; note = 2'-O-Methyl-adenosine
  modified_base 77: mod_base = OTHER; note = 2'-O-Methyl-adenosine
  modified_base 78: mod_base = OTHER; note = 2'-O-Methyl-adenosine
  modified_base 79: mod_base = OTHER; note = 2'-O-Methyl-guanosine
  modified_base 80: mod_base = OTHER; note = 2'-O-Methyl-uridine
  modified_base 81: mod_base = OTHER; note = 2'-O-Methyl-guanosine
  modified_base 83: mod_base = OTHER; note = 2'-O-Methyl-cytidine
  modified_base 84: mod_base = OTHER; note = 2'-O-Methyl-adenosine
  modified_base 85: mod_base = OTHER; note = 2'-O-Methyl-cytidine
  modified_base 86: mod_base = OTHER; note = 2'-O-Methyl-cytidine
  modified_base 87: mod_base = OTHER; note = 2'-O-Methyl-guanosine
  modified_base 88: mod_base = OTHER; note = 2'-O-Methyl-adenosine
  modified_base 89: mod_base = OTHER; note = 2'-O-Methyl-guanosine
  modified_base 90: mod_base = OTHER; note = 2'-O-Methyl-uridine
  modified_base 91: mod_base = OTHER; note = 2'-O-Methyl-cytidine
  modified_base 92: mod_base = OTHER; note = 2'-O-Methyl-guanosine
  modified_base 93: mod_base = OTHER; note = 2'-O-Methyl-guanosine
  modified_base 94: mod_base = OTHER; note = 2'-O-Methyl-uridine
  modified_base 95: mod_base = OTHER; note = 2'-O-Methyl-guanosine
  modified_base 96: mod_base = OTHER; note = 2'-O-Methyl-cytidine
  modified_base 97: mod_base = OTHER; note = 2'-O-Methyl-uridine phosphorothioate
  modified_base 98: mod_base = OTHER; note = 2'-O-Methyl-uridine phosphorothioate
  modified_base 99: mod_base = OTHER; note = 2'-O-Methyl-uridine phosphorothioate
  modified_base 100: mod_base = OTHER; note = 2'-O-Methyl-uridine
caggttccntgggatgctctgttttagagctagaaatagcangttaaaataaggctagtccgttatcaacttgaaaaagtggcaccgagtcggtgctttt

SEQ ID NO: 1939 - RNA, 100 nt, synthetic construct
  source 1..100: mol_type = other RNA; note = Description of Artificial Sequence: Synthetic polynucleotide
  modified_base 1: mod_base = OTHER; note = 2'-O-Methyl-cytidine phosphorothioate
  modified_base 2: mod_base = OTHER; note = 2'-O-Methyl-adenosine phosphorothioate
  modified_base 3: mod_base = OTHER; note = 2'-O-Methyl-guanosine phosphorothioate
  modified_base 9: mod_base = OTHER; note = Nebularine - ribonebularine
  modified_base 21: mod_base = OTHER; note = 2'-O-Methyl-guanosine
  modified_base 28: mod_base = OTHER; note = 2'-O-Methyl-adenosine
  modified_base 29: mod_base = OTHER; note = 2'-O-Methyl-guanosine
  modified_base 30: mod_base = OTHER; note = 2'-O-Methyl-cytidine
  modified_base 31: mod_base = OTHER; note = 2'-O-Methyl-uridine
  modified_base 32: mod_base = OTHER; note = 2'-O-Methyl-adenosine
  modified_base 33: mod_base = OTHER; note = 2'-O-Methyl-guanosine
  modified_base 34: mod_base = OTHER; note = Nebularine - 2'-O-methylnebularine
  modified_base 35: mod_base = OTHER; note = 2'-O-Methyl-adenosine
  modified_base 36: mod_base = OTHER; note = 2'-O-Methyl-adenosine
  modified_base 37: mod_base = OTHER; note = 2'-O-Methyl-uridine
  modified_base 38: mod_base = OTHER; note = 2'-O-Methyl-adenosine
  modified_base 39: mod_base = OTHER; note = 2'-O-Methyl-guanosine
  modified_base 40: mod_base = OTHER; note = 2'-O-Methyl-cytidine
  modified_base 41: mod_base = OTHER; note = 2'-O-Methyl-adenosine
  modified_base 42: mod_base = OTHER; note = Nebularine - 2'-O-methylnebularine
  modified_base 46: mod_base = OTHER; note = 2'-O-Methyl-adenosine
  modified_base 48: mod_base = OTHER; note = 2'-O-Methyl-adenosine
  modified_base 50: mod_base = OTHER; note = 2'-O-Methyl-uridine
  modified_base 52: mod_base = OTHER; note = 2'-O-Methyl-adenosine
  modified_base 53: mod_base = OTHER; note = 2'-O-Methyl-guanosine
  modified_base 54: mod_base = OTHER; note = 2'-O-Methyl-guanosine
  modified_base 55: mod_base = OTHER; note = 2'-O-Methyl-cytidine
  modified_base 56: mod_base = OTHER; note = 2'-O-Methyl-uridine
  modified_base 57: mod_base = OTHER; note = 2'-O-Methyl-adenosine
  modified_base 60: mod_base = OTHER; note = 2'-O-Methyl-cytidine
  modified_base 61: mod_base = OTHER; note = 2'-O-Methyl-cytidine
  modified_base 66: mod_base = OTHER; note = 2'-O-Methyl-uridine
  modified_base 67: mod_base = OTHER; note = 2'-O-Methyl-cytidine
  modified_base 70: mod_base = OTHER; note = 2'-O-Methyl-cytidine
  modified_base 71: mod_base = OTHER; note = 2'-O-Methyl-uridine
  modified_base 72: mod_base = OTHER; note = 2'-O-Methyl-uridine
  modified_base 73: mod_base = OTHER; note = 2'-O-Methyl-guanosine
  modified_base 74: mod_base = OTHER; note = 2'-O-Methyl-adenosine
  modified_base 75: mod_base = OTHER; note = 2'-O-Methyl-adenosine
  modified_base 76: mod_base = OTHER; note = 2'-O-Methyl-adenosine
  modified_base 77: mod_base = OTHER; note = 2'-O-Methyl-adenosine
  modified_base 78: mod_base = OTHER; note = 2'-O-Methyl-adenosine
  modified_base 79: mod_base = OTHER; note = 2'-O-Methyl-guanosine
  modified_base 80: mod_base = OTHER; note = 2'-O-Methyl-uridine
  modified_base 81: mod_base = OTHER; note = 2'-O-Methyl-guanosine
  modified_base 83: mod_base = OTHER; note = 2'-O-Methyl-cytidine
  modified_base 84: mod_base = OTHER; note = 2'-O-Methyl-adenosine
  modified_base 85: mod_base = OTHER; note = 2'-O-Methyl-cytidine
  modified_base 86: mod_base = OTHER; note = 2'-O-Methyl-cytidine
  modified_base 87: mod_base = OTHER; note = 2'-O-Methyl-guanosine
  modified_base 88: mod_base = OTHER; note = 2'-O-Methyl-adenosine
  modified_base 89: mod_base = OTHER; note = 2'-O-Methyl-guanosine
  modified_base 90: mod_base = OTHER; note = 2'-O-Methyl-uridine
  modified_base 91: mod_base = OTHER; note = 2'-O-Methyl-cytidine
  modified_base 92: mod_base = OTHER; note = 2'-O-Methyl-guanosine
  modified_base 93: mod_base = OTHER; note = 2'-O-Methyl-guanosine
  modified_base 94: mod_base = OTHER; note = 2'-O-Methyl-uridine
  modified_base 95: mod_base = OTHER; note = 2'-O-Methyl-guanosine
  modified_base 96: mod_base = OTHER; note = 2'-O-Methyl-cytidine
  modified_base 97: mod_base = OTHER; note = 2'-O-Methyl-uridine phosphorothioate
  modified_base 98: mod_base = OTHER; note = 2'-O-Methyl-uridine phosphorothioate
  modified_base 99: mod_base = OTHER; note = 2'-O-Methyl-uridine phosphorothioate
  modified_base 100: mod_base = OTHER; note = 2'-O-Methyl-uridine
caggttccntgggatgctctgttttagagctagnaatagcangttaaaataaggctagtccgttatcaacttgaaaaagtggcaccgagtcggtgctttt

SEQ ID NO: 1940 - RNA, 100 nt, synthetic construct
  source 1..100: mol_type = other RNA; note = Description of Artificial Sequence: Synthetic polynucleotide
  modified_base 1: mod_base = OTHER; note = 2'-O-Methyl-cytidine phosphorothioate
  modified_base 2: mod_base = OTHER; note = 2'-O-Methyl-adenosine phosphorothioate
  modified_base 3: mod_base = OTHER; note = 2'-O-Methyl-guanosine phosphorothioate
  modified_base 9: mod_base = OTHER; note = Nebularine - ribonebularine
  modified_base 21: mod_base = OTHER; note = 2'-O-Methyl-guanosine
  modified_base 28: mod_base = OTHER; note = 2'-O-Methyl-adenosine
  modified_base 29: mod_base = OTHER; note = 2'-O-Methyl-guanosine
  modified_base 30: mod_base = OTHER; note = 2'-O-Methyl-cytidine
  modified_base 31: mod_base = OTHER; note = 2'-O-Methyl-uridine
  modified_base 32: mod_base = OTHER; note = 2'-O-Methyl-adenosine
  modified_base 33: mod_base = OTHER; note = 2'-O-Methyl-guanosine
  modified_base 34: mod_base = OTHER; note = Nebularine - 2'-O-methylnebularine
  modified_base 35: mod_base = OTHER; note = 2'-O-Methyl-adenosine
  modified_base 36: mod_base = OTHER; note = 2'-O-Methyl-adenosine
  modified_base 37: mod_base = OTHER; note = 2'-O-Methyl-uridine
  modified_base 38: mod_base = OTHER; note = 2'-O-Methyl-adenosine
  modified_base 39: mod_base = OTHER; note = 2'-O-Methyl-guanosine
  modified_base 40: mod_base = OTHER; note = 2'-O-Methyl-cytidine
  modified_base 41: mod_base = OTHER; note = 2'-O-Methyl-adenosine
  modified_base 42: mod_base = OTHER; note = 2'-O-Methyl-adenosine
  modified_base 46: mod_base = OTHER; note = 2'-O-Methyl-adenosine
  modified_base 48: mod_base = OTHER; note = 2'-O-Methyl-adenosine
  modified_base 50: mod_base = OTHER; note = 2'-O-Methyl-uridine
  modified_base 52: mod_base = OTHER; note = 2'-O-Methyl-adenosine
  modified_base 53: mod_base = OTHER; note = 2'-O-Methyl-guanosine
  modified_base 54: mod_base = OTHER; note = 2'-O-Methyl-guanosine
  modified_base 55: mod_base = OTHER; note = 2'-O-Methyl-cytidine
  modified_base 56: mod_base = OTHER; note = 2'-O-Methyl-uridine
  modified_base 57: mod_base = OTHER; note = 2'-O-Methyl-adenosine
  modified_base 60: mod_base = OTHER; note = 2'-O-Methyl-cytidine
  modified_base 61: mod_base = OTHER; note = 2'-O-Methyl-cytidine
  modified_base 66: mod_base = OTHER; note = 2'-O-Methyl-uridine
  modified_base 67: mod_base = OTHER; note = 2'-O-Methyl-cytidine
  modified_base 70: mod_base = OTHER; note = 2'-O-Methyl-cytidine
  modified_base 71: mod_base = OTHER; note = 2'-O-Methyl-uridine
  modified_base 72: mod_base = OTHER; note = 2'-O-Methyl-uridine
  modified_base 73: mod_base = OTHER; note = 2'-O-Methyl-guanosine
  modified_base 74: mod_base = OTHER; note = 2'-O-Methyl-adenosine
  modified_base 75: mod_base = OTHER; note = 2'-O-Methyl-adenosine
  modified_base 76: mod_base = OTHER; note = 2'-O-Methyl-adenosine
  modified_base 77: mod_base = OTHER; note = 2'-O-Methyl-adenosine
  modified_base 78: mod_base = OTHER; note = 2'-O-Methyl-adenosine
  modified_base 79: mod_base = OTHER; note = 2'-O-Methyl-guanosine
  modified_base 80: mod_base = OTHER; note = 2'-O-Methyl-uridine
  modified_base 81: mod_base = OTHER; note = 2'-O-Methyl-guanosine
  modified_base 83: mod_base = OTHER; note = 2'-O-Methyl-cytidine
  modified_base 84: mod_base = OTHER; note = 2'-O-Methyl-adenosine
  modified_base 85: mod_base = OTHER; note = 2'-O-Methyl-cytidine
  modified_base 86: mod_base = OTHER; note = 2'-O-Methyl-cytidine
  modified_base 87: mod_base = OTHER; note = 2'-O-Methyl-guanosine
  modified_base 88: mod_base = OTHER; note = 2'-O-Methyl-adenosine
  modified_base 89: mod_base = OTHER; note = 2'-O-Methyl-guanosine
  modified_base 90: mod_base = OTHER; note = 2'-O-Methyl-uridine
  modified_base 91: mod_base = OTHER; note = 2'-O-Methyl-cytidine
  modified_base 92: mod_base = OTHER; note = 2'-O-Methyl-guanosine
  modified_base 93: mod_base = OTHER; note = 2'-O-Methyl-guanosine
  modified_base 94: mod_base = OTHER; note = 2'-O-Methyl-uridine
  modified_base 95: mod_base = OTHER; note = 2'-O-Methyl-guanosine
  modified_base 96: mod_base = OTHER; note = 2'-O-Methyl-cytidine
  modified_base 97: mod_base = OTHER; note = 2'-O-Methyl-uridine phosphorothioate
  modified_base 98: mod_base = OTHER; note = 2'-O-Methyl-uridine phosphorothioate
  modified_base 99: mod_base = OTHER; note = 2'-O-Methyl-uridine phosphorothioate
  modified_base 100: mod_base = OTHER; note = 2'-O-Methyl-uridine
caggttccntgggatgctctgttttagagctagnaatagcaagttaaaataaggctagtccgttatcaacttgaaaaagtggcaccgagtcggtgctttt

SEQ ID NO: 1941 - DNA, 100 bp, synthetic construct
  source 1..100: mol_type = other DNA; note = Description of Artificial Sequence: Synthetic oligonucleotide; note = Description of Combined DNA/RNA Molecule: Synthetic oligonucleotide
  modified_base 1: mod_base = OTHER; note = 2'-O-Methyl-cytidine phosphorothioate
  modified_base 2: mod_base = OTHER; note = 2'-O-Methyl-adenosine phosphorothioate
  modified_base 3: mod_base = OTHER; note = 2'-O-Methyl-guanosine phosphorothioate
  modified_base 9: mod_base = OTHER; note = Nebularine - 2'-deoxynebularine
  modified_base 14: mod_base = OTHER; note = Nebularine - 2'-deoxynebularine
  modified_base 21: mod_base = OTHER; note = 2'-O-Methyl-guanosine
  modified_base 28: mod_base = OTHER; note = 2'-O-Methyl-adenosine
  modified_base 29: mod_base = OTHER; note = 2'-O-Methyl-guanosine
  modified_base 30: mod_base = OTHER; note = 2'-O-Methyl-cytidine
  modified_base 31: mod_base = OTHER; note = 2'-O-Methyl-uridine
  modified_base 32: mod_base = OTHER; note = 2'-O-Methyl-adenosine
  modified_base 33: mod_base = OTHER; note = 2'-O-Methyl-guanosine
  modified_base 34: mod_base = OTHER; note = 2'-O-Methyl-adenosine
  modified_base 35: mod_base = OTHER; note = 2'-O-Methyl-adenosine
  modified_base 36: mod_base = OTHER; note = 2'-O-Methyl-adenosine
  modified_base 37: mod_base = OTHER; note = 2'-O-Methyl-uridine
  modified_base 38: mod_base = OTHER; note = 2'-O-Methyl-adenosine
  modified_base 39: mod_base = OTHER; note = 2'-O-Methyl-guanosine
  modified_base 40: mod_base = OTHER; note = 2'-O-Methyl-cytidine
  modified_base 41: mod_base = OTHER; note = 2'-O-Methyl-adenosine
  modified_base 42: mod_base = OTHER; note = 2'-O-Methyl-adenosine
  modified_base 46: mod_base = OTHER; note = 2'-O-Methyl-adenosine
  modified_base 48: mod_base = OTHER; note = 2'-O-Methyl-adenosine
  modified_base 50: mod_base = OTHER; note = 2'-O-Methyl-uridine
  modified_base 52: mod_base = OTHER; note = 2'-O-Methyl-adenosine
  modified_base 53: mod_base = OTHER; note = 2'-O-Methyl-guanosine
  modified_base 54: mod_base = OTHER; note = 2'-O-Methyl-guanosine
  modified_base 55: mod_base = OTHER; note = 2'-O-Methyl-cytidine
  modified_base 56: mod_base = OTHER; note = 2'-O-Methyl-uridine
  modified_base 57: mod_base = OTHER; note = 2'-O-Methyl-adenosine
  modified_base 60: mod_base = OTHER; note = 2'-O-Methyl-cytidine
  modified_base 61: mod_base = OTHER; note = 2'-O-Methyl-cytidine
  modified_base 66: mod_base = OTHER; note = 2'-O-Methyl-uridine
  modified_base 67: mod_base = OTHER; note = 2'-O-Methyl-cytidine
  modified_base 70: mod_base = OTHER; note = 2'-O-Methyl-cytidine
  modified_base 71: mod_base = OTHER; note = 2'-O-Methyl-uridine
  modified_base 72: mod_base = OTHER; note = 2'-O-Methyl-uridine
  modified_base 73: mod_base = OTHER; note = 2'-O-Methyl-guanosine
  modified_base 74: mod_base = OTHER; note = 2'-O-Methyl-adenosine
  modified_base 75: mod_base = OTHER; note = 2'-O-Methyl-adenosine
  modified_base 76: mod_base = OTHER; note = 2'-O-Methyl-adenosine
  modified_base 77: mod_base = OTHER; note = 2'-O-Methyl-adenosine
  modified_base 78: mod_base = OTHER; note = 2'-O-Methyl-adenosine
  modified_base 79: mod_base = OTHER; note = 2'-O-Methyl-guanosine
  modified_base 80: mod_base = OTHER; note = 2'-O-Methyl-uridine
  modified_base 81: mod_base = OTHER; note = 2'-O-Methyl-guanosine
  modified_base 83: mod_base = OTHER; note = 2'-O-Methyl-cytidine
  modified_base 84: mod_base = OTHER; note = 2'-O-Methyl-adenosine
  modified_base 85: mod_base = OTHER; note = 2'-O-Methyl-cytidine
  modified_base 86: mod_base = OTHER; note = 2'-O-Methyl-cytidine
  modified_base 87: mod_base = OTHER; note = 2'-O-Methyl-guanosine
  modified_base 88: mod_base = OTHER; note = 2'-O-Methyl-adenosine
  modified_base 89: mod_base = OTHER; note = 2'-O-Methyl-guanosine
  modified_base 90: mod_base = OTHER; note = 2'-O-Methyl-uridine
  modified_base 91: mod_base = OTHER; note = 2'-O-Methyl-cytidine
  modified_base 92: mod_base = OTHER; note = 2'-O-Methyl-guanosine
  modified_base 93: mod_base = OTHER; note = 2'-O-Methyl-guanosine
  modified_base 94: mod_base = OTHER; note = 2'-O-Methyl-uridine
  modified_base 95: mod_base = OTHER; note = 2'-O-Methyl-guanosine
  modified_base 96: mod_base = OTHER; note = 2'-O-Methyl-cytidine
  modified_base 97: mod_base = OTHER; note = 2'-O-Methyl-uridine phosphorothioate
  modified_base 98: mod_base = OTHER; note = 2'-O-Methyl-uridine phosphorothioate
  modified_base 99: mod_base = OTHER; note = 2'-O-Methyl-uridine phosphorothioate
  modified_base 100: mod_base = OTHER; note = 2'-O-Methyl-uridine
  misc_feature 1..8: note = RNA
  misc_feature 9: note = DNA
  misc_feature 10..13: note = RNA
  misc_feature 14: note = DNA
  misc_feature 15..100: note = RNA
caggttccntgggntgctctgttttagagctagaaatagcaagttaaaataaggctagtccgttatcaacttgaaaaagtggcaccgagtcggtgctttt

SEQ ID NO: 1942 - DNA, 100 bp, synthetic construct
  source 1..100: mol_type = other DNA; note = Description of Artificial Sequence: Synthetic oligonucleotide; note = Description of Combined DNA/RNA Molecule: Synthetic oligonucleotide
  modified_base 1: mod_base = OTHER; note = 2'-O-Methyl-cytidine phosphorothioate
  modified_base 2: mod_base = OTHER; note = 2'-O-Methyl-adenosine phosphorothioate
  modified_base 3: mod_base = OTHER; note = 2'-O-Methyl-guanosine phosphorothioate
  modified_base 9: mod_base = OTHER; note = Nebularine - 2'-deoxynebularine
  modified_base 21: mod_base = OTHER; note = 2'-O-Methyl-guanosine
  modified_base 28: mod_base = OTHER; note = 2'-O-Methyl-adenosine
  modified_base 29: mod_base = OTHER; note = 2'-O-Methyl-guanosine
  modified_base 30: mod_base = OTHER; note = 2'-O-Methyl-cytidine
  modified_base 31: mod_base = OTHER; note = 2'-O-Methyl-uridine
  modified_base 32: mod_base = OTHER; note = 2'-O-Methyl-adenosine
  modified_base 33: mod_base = OTHER; note = 2'-O-Methyl-guanosine
  modified_base 34: mod_base = OTHER; note = 2'-O-Methyl-adenosine
  modified_base 35: mod_base = OTHER; note = 2'-O-Methyl-adenosine
  modified_base 36: mod_base = OTHER; note = 2'-O-Methyl-adenosine
  modified_base 37: mod_base = OTHER; note = 2'-O-Methyl-uridine
  modified_base 38: mod_base = OTHER; note = 2'-O-Methyl-adenosine
  modified_base 39: mod_base = OTHER; note = 2'-O-Methyl-guanosine
  modified_base 40: mod_base = OTHER; note = 2'-O-Methyl-cytidine
  modified_base 41: mod_base = OTHER; note = 2'-O-Methyl-adenosine
  modified_base 42: mod_base = OTHER; note = 2'-O-Methyl-adenosine
  modified_base 46: mod_base = OTHER; note = 2'-O-Methyl-adenosine
  modified_base 48: mod_base = OTHER; note = 2'-O-Methyl-adenosine
  modified_base 50: mod_base = OTHER; note = 2'-O-Methyl-uridine
  modified_base 52: mod_base = OTHER; note = 2'-O-Methyl-adenosine
  modified_base 53: mod_base = OTHER; note = 2'-O-Methyl-guanosine
  modified_base 54: mod_base = OTHER; note = 2'-O-Methyl-guanosine
  modified_base 55: mod_base = OTHER; note = 2'-O-Methyl-cytidine
  modified_base 56: mod_base = OTHER; note = 2'-O-Methyl-uridine
  modified_base 57: mod_base = OTHER; note = 2'-O-Methyl-adenosine
  modified_base 60: mod_base = OTHER; note = 2'-O-Methyl-cytidine
  modified_base 61: mod_base = OTHER; note = 2'-O-Methyl-cytidine
  modified_base 66: mod_base = OTHER; note = 2'-O-Methyl-uridine
  modified_base 67: mod_base = OTHER; note = 2'-O-Methyl-cytidine
  modified_base 70: mod_base = OTHER; note = 2'-O-Methyl-cytidine
  modified_base 71: mod_base = OTHER; note = 2'-O-Methyl-uridine
  modified_base 72: mod_base = OTHER; note = 2'-O-Methyl-uridine
  modified_base 73: mod_base = OTHER; note = 2'-O-Methyl-guanosine
  modified_base 74: mod_base = OTHER; note = 2'-O-Methyl-adenosine
  modified_base 75: mod_base = OTHER; note = 2'-O-Methyl-adenosine
  modified_base 76: mod_base = OTHER; note = 2'-O-Methyl-adenosine
  modified_base 77: mod_base = OTHER; note = 2'-O-Methyl-adenosine
  modified_base 78: mod_base = OTHER; note = 2'-O-Methyl-adenosine
  modified_base 79: mod_base = OTHER; note = 2'-O-Methyl-guanosine
  modified_base 80: mod_base = OTHER; note = 2'-O-Methyl-uridine
  modified_base 81: mod_base = OTHER; note = 2'-O-Methyl-guanosine
  modified_base 83: mod_base = OTHER; note = 2'-O-Methyl-cytidine
  modified_base 84: mod_base = OTHER; note = 2'-O-Methyl-adenosine
  modified_base 85: mod_base = OTHER; note = 2'-O-Methyl-cytidine
  modified_base 86: mod_base = OTHER; note = 2'-O-Methyl-cytidine
  modified_base 87: mod_base = OTHER; note = 2'-O-Methyl-guanosine
  modified_base 88: mod_base = OTHER; note = 2'-O-Methyl-adenosine
  modified_base 89: mod_base = OTHER; note = 2'-O-Methyl-guanosine
  modified_base 90: mod_base = OTHER; note = 2'-O-Methyl-uridine
  modified_base 91: mod_base = OTHER; note = 2'-O-Methyl-cytidine
  modified_base 92: mod_base = OTHER; note = 2'-O-Methyl-guanosine
  modified_base 93: mod_base = OTHER; note = 2'-O-Methyl-guanosine
  modified_base 94: mod_base = OTHER; note = 2'-O-Methyl-uridine
  modified_base 95: mod_base = OTHER; note = 2'-O-Methyl-guanosine
  modified_base 96: mod_base = OTHER; note = 2'-O-Methyl-cytidine
  modified_base 97: mod_base = OTHER; note = 2'-O-Methyl-uridine phosphorothioate
  modified_base 98: mod_base = OTHER; note = 2'-O-Methyl-uridine phosphorothioate
  modified_base 99: mod_base = OTHER; note = 2'-O-Methyl-uridine phosphorothioate
  modified_base 100: mod_base = OTHER; note = 2'-O-Methyl-uridine
  misc_feature 1..8: note = RNA
  misc_feature 9: note = DNA
  misc_feature 10..100: note = RNA
caggttccntgggatgctctgttttagagctagaaatagcaagttaaaataaggctagtccgttatcaacttgaaaaagtggcaccgagtcggtgctttt

SEQ ID NO: 1943 - DNA, 100 bp, synthetic construct
  source 1..100: mol_type = other DNA; note = Description of Artificial Sequence: Synthetic oligonucleotide; note = Description of Combined DNA/RNA Molecule: Synthetic oligonucleotide
  modified_base 1: mod_base = OTHER; note = 2'-O-Methyl-cytidine phosphorothioate
  modified_base 2: mod_base = OTHER; note = 2'-O-Methyl-adenosine phosphorothioate
  modified_base 3: mod_base = OTHER; note = 2'-O-Methyl-guanosine phosphorothioate
  modified_base 14: mod_base = OTHER; note = Nebularine - 2'-deoxynebularine
  modified_base 21: mod_base = OTHER; note = 2'-O-Methyl-guanosine
  modified_base 28: mod_base = OTHER; note = 2'-O-Methyl-adenosine
  modified_base 29: mod_base = OTHER; note = 2'-O-Methyl-guanosine
  modified_base 30: mod_base = OTHER; note = 2'-O-Methyl-cytidine
  modified_base 31: mod_base = OTHER; note = 2'-O-Methyl-uridine
  modified_base 32: mod_base = OTHER; note = 2'-O-Methyl-adenosine
  modified_base 33: mod_base = OTHER; note = 2'-O-Methyl-guanosine
  modified_base 34: mod_base = OTHER; note = 2'-O-Methyl-adenosine
  modified_base 35: mod_base = OTHER; note = 2'-O-Methyl-adenosine
  modified_base 36: mod_base = OTHER; note = 2'-O-Methyl-adenosine
  modified_base 37: mod_base = OTHER; note = 2'-O-Methyl-uridine
  modified_base 38: mod_base = OTHER; note = 2'-O-Methyl-adenosine
  modified_base 39: mod_base = OTHER; note = 2'-O-Methyl-guanosine
  modified_base 40: mod_base = OTHER; note = 2'-O-Methyl-cytidine
  modified_base 41: mod_base = OTHER; note = 2'-O-Methyl-adenosine
  modified_base 42: mod_base = OTHER; note = 2'-O-Methyl-adenosine
  modified_base 46: mod_base = OTHER; note = 2'-O-Methyl-adenosine
  modified_base 48: mod_base = OTHER; note = 2'-O-Methyl-adenosine
  modified_base 50: mod_base = OTHER; note = 2'-O-Methyl-uridine
  modified_base 52: mod_base = OTHER; note = 2'-O-Methyl-adenosine
  modified_base 53: mod_base = OTHER; note = 2'-O-Methyl-guanosine
  modified_base 54: mod_base = OTHER; note = 2'-O-Methyl-guanosine
  modified_base 55: mod_base = OTHER; note = 2'-O-Methyl-cytidine
  modified_base 56: mod_base = OTHER; note = 2'-O-Methyl-uridine
  modified_base 57: mod_base = OTHER; note = 2'-O-Methyl-adenosine
  modified_base 60: mod_base = OTHER; note = 2'-O-Methyl-cytidine
  modified_base 61: mod_base = OTHER; note = 2'-O-Methyl-cytidine
  modified_base 66: mod_base = OTHER; note = 2'-O-Methyl-uridine
  modified_base 67: mod_base = OTHER; note = 2'-O-Methyl-cytidine
  modified_base 70: mod_base = OTHER; note = 2'-O-Methyl-cytidine
  modified_base 71: mod_base = OTHER; note = 2'-O-Methyl-uridine
  modified_base 72: mod_base = OTHER; note = 2'-O-Methyl-uridine
  modified_base 73: mod_base = OTHER; note = 2'-O-Methyl-guanosine
  modified_base 74: mod_base = OTHER; note = 2'-O-Methyl-adenosine
  modified_base 75: mod_base = OTHER; note = 2'-O-Methyl-adenosine
  modified_base 76: mod_base = OTHER; note = 2'-O-Methyl-adenosine
  modified_base 77: mod_base = OTHER; note = 2'-O-Methyl-adenosine
  modified_base 78: mod_base = OTHER; note = 2'-O-Methyl-adenosine
  modified_base 79: mod_base = OTHER; note = 2'-O-Methyl-guanosine
  modified_base 80: mod_base = OTHER; note = 2'-O-Methyl-uridine
  modified_base 81: mod_base = OTHER; note = 2'-O-Methyl-guanosine
  modified_base 83: mod_base = OTHER; note = 2'-O-Methyl-cytidine
  modified_base 84: mod_base = OTHER; note = 2'-O-Methyl-adenosine
  modified_base 85: mod_base = OTHER; note = 2'-O-Methyl-cytidine
  modified_base 86: mod_base = OTHER; note = 2'-O-Methyl-cytidine
  modified_base 87: mod_base = OTHER; note = 2'-O-Methyl-guanosine
  modified_base 88: mod_base = OTHER; note = 2'-O-Methyl-adenosine
  modified_base 89: mod_base = OTHER; note = 2'-O-Methyl-guanosine
  modified_base 90: mod_base = OTHER; note = 2'-O-Methyl-uridine
  modified_base 91: mod_base = OTHER; note = 2'-O-Methyl-cytidine
  modified_base 92: mod_base = OTHER; note = 2'-O-Methyl-guanosine
  modified_base 93: mod_base = OTHER; note = 2'-O-Methyl-guanosine
  modified_base 94: mod_base = OTHER; note = 2'-O-Methyl-uridine
  modified_base 95: mod_base = OTHER; note = 2'-O-Methyl-guanosine
  modified_base 96: mod_base = OTHER; note = 2'-O-Methyl-cytidine
  modified_base 97: mod_base = OTHER; note = 2'-O-Methyl-uridine phosphorothioate
  modified_base 98: mod_base = OTHER; note = 2'-O-Methyl-uridine phosphorothioate
  modified_base 99: mod_base = OTHER; note = 2'-O-Methyl-uridine phosphorothioate
  modified_base 100: mod_base = OTHER; note = 2'-O-Methyl-uridine
  misc_feature 1..13: note = RNA
  misc_feature 14: note = DNA
  misc_feature 15..100: note = RNA
caggttccatgggntgctctgttttagagctagaaatagcaagttaaaataaggctagtccgttatcaacttgaaaaagtggcaccgagtcggtgctttt

SEQ ID NO: 1944 - DNA, 100 bp, synthetic construct
  source 1..100: mol_type = other DNA; note = Description of Artificial Sequence: Synthetic oligonucleotide; note = Description of Combined DNA/RNA Molecule: Synthetic oligonucleotide
  modified_base 1: mod_base = OTHER; note = 2'-O-Methyl-cytidine phosphorothioate
  modified_base 2: mod_base = OTHER; note = 2'-O-Methyl-adenosine phosphorothioate
  modified_base 3: mod_base = OTHER; note = 2'-O-Methyl-guanosine phosphorothioate
  modified_base 21: mod_base = OTHER; note = 2'-O-Methyl-guanosine
  modified_base 28: mod_base = OTHER; note = 2'-O-Methyl-adenosine
  modified_base 29: mod_base = OTHER; note = 2'-O-Methyl-guanosine
  modified_base 30: mod_base = OTHER; note = 2'-O-Methyl-cytidine
  modified_base 31: mod_base = OTHER; note = 2'-O-Methyl-uridine
  modified_base 32: mod_base = OTHER; note = 2'-O-Methyl-adenosine
  modified_base 33: mod_base = OTHER; note = 2'-O-Methyl-guanosine
  modified_base 34: mod_base = OTHER; note = Nebularine - 2'-deoxynebularine
  modified_base 35: mod_base = OTHER; note = 2'-O-Methyl-adenosine
  modified_base 36: mod_base = OTHER; note = 2'-O-Methyl-adenosine
  modified_base 37: mod_base = OTHER; note = 2'-O-Methyl-uridine
  modified_base 38: mod_base = OTHER; note = 2'-O-Methyl-adenosine
  modified_base 39: mod_base = OTHER; note = 2'-O-Methyl-guanosine
  modified_base 40: mod_base = OTHER; note = 2'-O-Methyl-cytidine
  modified_base 41: mod_base = OTHER; note = 2'-O-Methyl-adenosine
  modified_base 42: mod_base = OTHER; note = 2'-O-Methyl-adenosine
  modified_base 46: mod_base = OTHER; note = 2'-O-Methyl-adenosine
  modified_base 48: mod_base = OTHER; note = 2'-O-Methyl-adenosine
  modified_base 50: mod_base = OTHER; note = 2'-O-Methyl-uridine
  modified_base 52: mod_base = OTHER; note = 2'-O-Methyl-adenosine
  modified_base 53: mod_base = OTHER; note = 2'-O-Methyl-guanosine
  modified_base 54: mod_base = OTHER; note = 2'-O-Methyl-guanosine
  modified_base 55: mod_base = OTHER; note = 2'-O-Methyl-cytidine
  modified_base 56: mod_base = OTHER; note = 2'-O-Methyl-uridine
  modified_base 57: mod_base = OTHER; note = 2'-O-Methyl-adenosine
  modified_base 60: mod_base = OTHER; note = 2'-O-Methyl-cytidine
  modified_base 61: mod_base = OTHER; note = 2'-O-Methyl-cytidine
  modified_base 66: mod_base = OTHER; note = 2'-O-Methyl-uridine
  modified_base 67: mod_base = OTHER; note = 2'-O-Methyl-cytidine
  modified_base 70: mod_base = OTHER; note = 2'-O-Methyl-cytidine
  modified_base 71: mod_base = OTHER; note = 2'-O-Methyl-uridine
  modified_base 72: mod_base = OTHER; note = 2'-O-Methyl-uridine
  modified_base 73: mod_base = OTHER; note = 2'-O-Methyl-guanosine
  modified_base 74: mod_base = OTHER; note = 2'-O-Methyl-adenosine
  modified_base 75: mod_base = OTHER; note = 2'-O-Methyl-adenosine
  modified_base 76: mod_base = OTHER; note = 2'-O-Methyl-adenosine
  modified_base 77: mod_base = OTHER; note = 2'-O-Methyl-adenosine
  modified_base 78: mod_base = OTHER; note = 2'-O-Methyl-adenosine
  modified_base 79: mod_base = OTHER; note = 2'-O-Methyl-guanosine
  modified_base 80: mod_base = OTHER; note = 2'-O-Methyl-uridine
  modified_base 81: mod_base = OTHER; note = 2'-O-Methyl-guanosine
  modified_base 83: mod_base = OTHER; note = 2'-O-Methyl-cytidine
  modified_base 84: mod_base = OTHER; note = 2'-O-Methyl-adenosine
  modified_base 85: mod_base = OTHER; note = 2'-O-Methyl-cytidine
  modified_base 86: mod_base = OTHER; note = 2'-O-Methyl-cytidine
  modified_base 87: mod_base = OTHER; note = 2'-O-Methyl-guanosine
  modified_base 88: mod_base = OTHER; note = 2'-O-Methyl-adenosine
  modified_base 89: mod_base = OTHER; note = 2'-O-Methyl-guanosine
  modified_base 90: mod_base = OTHER; note = 2'-O-Methyl-uridine
  modified_base 91: mod_base = OTHER; note = 2'-O-Methyl-cytidine
  modified_base 92: mod_base = OTHER; note = 2'-O-Methyl-guanosine
  modified_base 93: mod_base = OTHER; note = 2'-O-Methyl-guanosine
  modified_base 94: mod_base = OTHER; note = 2'-O-Methyl-uridine
  modified_base 95: mod_base = OTHER; note = 2'-O-Methyl-guanosine
  modified_base 96: mod_base = OTHER; note = 2'-O-Methyl-cytidine
  modified_base 97: mod_base = OTHER; note = 2'-O-Methyl-uridine phosphorothioate
  modified_base 98: mod_base = OTHER; note = 2'-O-Methyl-uridine phosphorothioate
  modified_base 99: mod_base = OTHER; note = 2'-O-Methyl-uridine phosphorothioate
  modified_base 100: mod_base = OTHER; note = 2'-O-Methyl-uridine
  misc_feature 1..33: note = RNA
  misc_feature 34: note = DNA
  misc_feature 35..100: note = RNA
caggttccatgggatgctctgttttagagctagnaatagcaagttaaaataaggctagtccgttatcaacttgaaaaagtggcaccgagtcggtgctttt

SEQ ID NO: 1945 - DNA, 100 bp, synthetic construct
  source 1..100: mol_type = other DNA; note = Description of Artificial Sequence: Synthetic oligonucleotide; note = Description of Combined DNA/RNA Molecule: Synthetic oligonucleotide
  modified_base 1: mod_base = OTHER; note = 2'-O-Methyl-cytidine phosphorothioate
  modified_base 2: mod_base = OTHER; note = 2'-O-Methyl-adenosine phosphorothioate
  modified_base 3: mod_base = OTHER; note = 2'-O-Methyl-guanosine phosphorothioate
  modified_base 21: mod_base = OTHER; note = 2'-O-Methyl-guanosine
  modified_base 28: mod_base = OTHER; note = 2'-O-Methyl-adenosine
  modified_base 29: mod_base = OTHER; note = 2'-O-Methyl-guanosine
  modified_base 30: mod_base = OTHER; note = 2'-O-Methyl-cytidine
  modified_base 31: mod_base = OTHER; note = 2'-O-Methyl-uridine
  modified_base 32: mod_base = OTHER; note = 2'-O-Methyl-adenosine
  modified_base 33: mod_base = OTHER; note = 2'-O-Methyl-guanosine
  modified_base 34: mod_base = OTHER; note = Nebularine - 2'-deoxynebularine
  modified_base 35: mod_base = OTHER; note = 2'-O-Methyl-adenosine
  modified_base 36: mod_base = OTHER; note = 2'-O-Methyl-adenosine
  modified_base 37: mod_base = OTHER; note = 2'-O-Methyl-uridine
  modified_base 38: mod_base = OTHER; note = 2'-O-Methyl-adenosine
  modified_base 39: mod_base = OTHER; note = 2'-O-Methyl-guanosine
  modified_base 40: mod_base = OTHER; note = 2'-O-Methyl-cytidine
  modified_base 41: mod_base = OTHER; note = 2'-O-Methyl-adenosine
  modified_base 42: mod_base = OTHER; note = 2'-O-Methyl-adenosine
  modified_base 46: mod_base = OTHER; note = 2'-O-Methyl-adenosine
  modified_base 48: mod_base = OTHER; note = 2'-O-Methyl-adenosine
  modified_base 50: mod_base = OTHER; note = 2'-O-Methyl-uridine
  modified_base 52: mod_base = OTHER; note = 2'-O-Methyl-adenosine
  modified_base 53: mod_base = OTHER; note = 2'-O-Methyl-guanosine
  modified_base 54: mod_base = OTHER; note = 2'-O-Methyl-guanosine
  modified_base 55: mod_base = OTHER; note = 2'-O-Methyl-cytidine
  modified_base 56: mod_base = OTHER; note = 2'-O-Methyl-uridine
  modified_base 57: mod_base = OTHER; note = Nebularine - 2'-deoxynebularine
  modified_base 60: mod_base = OTHER; note = 2'-O-Methyl-cytidine
  modified_base 61: mod_base = OTHER; note = 2'-O-Methyl-cytidine
  modified_base 66: mod_base = OTHER; note = 2'-O-Methyl-uridine
  modified_base 67: mod_base = OTHER; note = 2'-O-Methyl-cytidine
  modified_base 70: mod_base = OTHER; note = 2'-O-Methyl-cytidine
  modified_base 71: mod_base = OTHER; note = 2'-O-Methyl-uridine
  modified_base 72: mod_base = OTHER; note = 2'-O-Methyl-uridine
  modified_base 73: mod_base = OTHER; note = 2'-O-Methyl-guanosine
  modified_base 74: mod_base = OTHER; note = 2'-O-Methyl-adenosine
  modified_base 75: mod_base = OTHER; note = 2'-O-Methyl-adenosine
  modified_base 76: mod_base = OTHER; note = 2'-O-Methyl-adenosine
  modified_base 77: mod_base = OTHER; note = 2'-O-Methyl-adenosine
  modified_base 78: mod_base = OTHER; note = 2'-O-Methyl-adenosine
  modified_base 79: mod_base = OTHER; note = 2'-O-Methyl-guanosine
  modified_base 80: mod_base = OTHER; note = 2'-O-Methyl-uridine
  modified_base 81: mod_base = OTHER; note = 2'-O-Methyl-guanosine
  modified_base 83: mod_base = OTHER; note = 2'-O-Methyl-cytidine
  modified_base 84: mod_base = OTHER; note = 2'-O-Methyl-adenosine
  modified_base 85: mod_base = OTHER; note = 2'-O-Methyl-cytidine
  modified_base 86: mod_base = OTHER; note = 2'-O-Methyl-cytidine
  modified_base 87: mod_base = OTHER; note = 2'-O-Methyl-guanosine
  modified_base 88: mod_base = OTHER; note = 2'-O-Methyl-adenosine
  modified_base 89: mod_base = OTHER; note = 2'-O-Methyl-guanosine
  modified_base 90: mod_base = OTHER; note = 2'-O-Methyl-uridine
  modified_base 91: mod_base = OTHER; note = 2'-O-Methyl-cytidine
  modified_base 92: mod_base = OTHER; note = 2'-O-Methyl-guanosine
  modified_base 93: mod_base = OTHER; note = 2'-O-Methyl-guanosine
  modified_base 94: mod_base = OTHER; note = 2'-O-Methyl-uridine
  modified_base 95: mod_base = OTHER; note = 2'-O-Methyl-guanosine
  modified_base 96: mod_base = OTHER; note = 2'-O-Methyl-cytidine
  modified_base 97: mod_base = OTHER; note = 2'-O-Methyl-uridine phosphorothioate
  modified_base 98: mod_base = OTHER; note = 2'-O-Methyl-uridine phosphorothioate
  modified_base 99: mod_base = OTHER; note = 2'-O-Methyl-uridine phosphorothioate
  modified_base 100: mod_base = OTHER; note = 2'-O-Methyl-uridine
  misc_feature 1..33: note = RNA
  misc_feature 34: note = DNA
  misc_feature 35..56: note = RNA
  misc_feature 57: note = DNA
  misc_feature 58..100: note = RNA
caggttccatgggatgctctgttttagagctagnaatagcaagttaaaataaggctngtccgttatcaacttgaaaaagtggcaccgagtcggtgctttt

SEQ ID NO: 1946 - DNA, 100 bp, synthetic construct
  source 1..100: mol_type = other DNA; note = Description of Artificial Sequence: Synthetic oligonucleotide; note = Description of Combined DNA/RNA Molecule: Synthetic oligonucleotide
  modified_base 1: mod_base = OTHER; note = 2'-O-Methyl-cytidine phosphorothioate
  modified_base 2: mod_base = OTHER; note = 2'-O-Methyl-adenosine phosphorothioate
  modified_base 3: mod_base = OTHER; note = 2'-O-Methyl-guanosine phosphorothioate
  modified_base 21: mod_base = OTHER; note = 2'-O-Methyl-guanosine
  modified_base 28: mod_base = OTHER; note = 2'-O-Methyl-adenosine
  modified_base 29: mod_base = OTHER; note = 2'-O-Methyl-guanosine
  modified_base 30: mod_base = OTHER; note = 2'-O-Methyl-cytidine
  modified_base 31: mod_base = OTHER; note = 2'-O-Methyl-uridine
  modified_base 32: mod_base = OTHER; note = 2'-O-Methyl-adenosine
  modified_base 33: mod_base = OTHER; note = 2'-O-Methyl-guanosine
  modified_base 34: mod_base = OTHER; note = 2'-O-Methyl-adenosine
  modified_base 35: mod_base = OTHER; note = 2'-O-Methyl-adenosine
  modified_base 36: mod_base = OTHER; note = 2'-O-Methyl-adenosine
  modified_base 37: mod_base = OTHER; note = 2'-O-Methyl-uridine
  modified_base 38: mod_base = OTHER; note = 2'-O-Methyl-adenosine
  modified_base 39: mod_base = OTHER; note = 2'-O-Methyl-guanosine
  modified_base 40: mod_base = OTHER; note = 2'-O-Methyl-cytidine
  modified_base 41: mod_base = OTHER; note = 2'-O-Methyl-adenosine
  modified_base 42: mod_base = OTHER; note = 2'-O-Methyl-adenosine
  modified_base 46: mod_base = OTHER; note = 2'-O-Methyl-adenosine
  modified_base 48: mod_base = OTHER; note = 2'-O-Methyl-adenosine
  modified_base 50: mod_base = OTHER; note = 2'-O-Methyl-uridine
  modified_base 52: mod_base = OTHER; note = 2'-O-Methyl-adenosine
  modified_base 53: mod_base = OTHER; note = 2'-O-Methyl-guanosine
  modified_base 54: mod_base = OTHER; note = 2'-O-Methyl-guanosine
  modified_base 55: mod_base = OTHER; note = 2'-O-Methyl-cytidine
  modified_base 56: mod_base = OTHER; note = 2'-O-Methyl-uridine
  modified_base 57: mod_base = OTHER; note = Nebularine - 2'-deoxynebularine
  modified_base 60: mod_base = OTHER; note = 2'-O-Methyl-cytidine
  modified_base 61: mod_base = OTHER; note = 2'-O-Methyl-cytidine
  modified_base 66: mod_base = OTHER; note = 2'-O-Methyl-uridine
  modified_base 67: mod_base = OTHER; note = 2'-O-Methyl-cytidine
  modified_base 70: mod_base = OTHER; note = 2'-O-Methyl-cytidine
  modified_base 71: mod_base = OTHER; note = 2'-O-Methyl-uridine
  modified_base 72: mod_base = OTHER; note = 2'-O-Methyl-uridine
  modified_base 73: mod_base = OTHER; note = 2'-O-Methyl-guanosine
  modified_base 74: mod_base = OTHER; note = 2'-O-Methyl-adenosine
  modified_base 75: mod_base = OTHER; note = 2'-O-Methyl-adenosine
  modified_base 76: mod_base = OTHER; note = 2'-O-Methyl-adenosine
  modified_base 77: mod_base = OTHER; note = 2'-O-Methyl-adenosine
  modified_base 78: mod_base = OTHER; note = 2'-O-Methyl-adenosine
  modified_base 79: mod_base = OTHER; note = 2'-O-Methyl-guanosine
  modified_base 80: mod_base = OTHER; note = 2'-O-Methyl-uridine
  modified_base 81: mod_base = OTHER; note = 2'-O-Methyl-guanosine
  modified_base 83: mod_base = OTHER; note = 2'-O-Methyl-cytidine
  modified_base 84: mod_base = OTHER; note = 2'-O-Methyl-adenosine
  modified_base 85: mod_base = OTHER; note = 2'-O-Methyl-cytidine
  modified_base 86: mod_base = OTHER; note = 2'-O-Methyl-cytidine
  modified_base 87: mod_base = OTHER; note = 2'-O-Methyl-guanosine
  modified_base 88: mod_base = OTHER; note = 2'-O-Methyl-adenosine
  modified_base 89: mod_base = OTHER; note = 2'-O-Methyl-guanosine
  modified_base 90: mod_base = OTHER; note = 2'-O-Methyl-uridine
  modified_base 91: mod_base = OTHER; note = 2'-O-Methyl-cytidine
  modified_base 92: mod_base = OTHER; note = 2'-O-Methyl-guanosine
  modified_base 93: mod_base = OTHER; note = 2'-O-Methyl-guanosine
  modified_base 94: mod_base = OTHER; note = 2'-O-Methyl-uridine
  modified_base 95: mod_base = OTHER; note = 2'-O-Methyl-guanosine
  modified_base 96: mod_base = OTHER; note = 2'-O-Methyl-cytidine
  modified_base 97: mod_base = OTHER; note = 2'-O-Methyl-uridine phosphorothioate
  modified_base 98: mod_base = OTHER; note = 2'-O-Methyl-uridine phosphorothioate
  modified_base 99: mod_base = OTHER; note = 2'-O-Methyl-uridine phosphorothioate
  modified_base 100: mod_base = OTHER; note = 2'-O-Methyl-uridine
  misc_feature 1..56: note = RNA
  misc_feature 57: note = DNA
  misc_feature 58..100: note = RNA
caggttccatgggatgctctgttttagagctagaaatagcaagttaaaataaggctngtccgttatcaacttgaaaaagtggcaccgagtcggtgctttt

SEQ ID NO: 1947 - DNA, 100 bp, synthetic construct
  source 1..100: mol_type = other DNA; note = Description of Artificial Sequence: Synthetic oligonucleotide; note = Description of Combined DNA/RNA Molecule: Synthetic oligonucleotide
  modified_base 1: mod_base = OTHER; note = 2'-O-Methyl-cytidine phosphorothioate
  modified_base 2: mod_base = OTHER; note = 2'-O-Methyl-adenosine phosphorothioate
  modified_base 3: mod_base = OTHER; note = 2'-O-Methyl-guanosine phosphorothioate
  modified_base 21: mod_base = OTHER; note = 2'-O-Methyl-guanosine
  modified_base 28: mod_base = OTHER; note = 2'-O-Methyl-adenosine
  modified_base 29: mod_base = OTHER; note = 2'-O-Methyl-guanosine
  modified_base 30: mod_base = OTHER; note = 2'-O-Methyl-cytidine
  modified_base 31: mod_base = OTHER; note = 2'-O-Methyl-uridine
  modified_base 32: mod_base = OTHER; note = 2'-O-Methyl-adenosine
  modified_base 33: mod_base = OTHER; note = 2'-O-Methyl-guanosine
  modified_base 34: mod_base = OTHER; note = 2'-O-Methyl-adenosine
  modified_base 35: mod_base = OTHER; note = 2'-O-Methyl-adenosine
  modified_base 36: mod_base = OTHER; note = 2'-O-Methyl-adenosine
  modified_base 37: mod_base = OTHER; note = 2'-O-Methyl-uridine
  modified_base 38: mod_base = OTHER; note = 2'-O-Methyl-adenosine
  modified_base 39: mod_base = OTHER; note = 2'-O-Methyl-guanosine
  modified_base 40: mod_base = OTHER; note = 2'-O-Methyl-cytidine
  modified_base 41: mod_base = OTHER; note = 2'-O-Methyl-adenosine
  modified_base 42: mod_base = OTHER; note = 2'-O-Methyl-adenosine
  modified_base 46: mod_base = OTHER; note = 2'-O-Methyl-adenosine
  modified_base 48: mod_base = OTHER; note = 2'-O-Methyl-adenosine
  modified_base 50: mod_base = OTHER; note = 2'-O-Methyl-uridine
  modified_base 52: mod_base = OTHER; note = 2'-O-Methyl-adenosine
  modified_base 53: mod_base = OTHER; note = 2'-O-Methyl-guanosine
  modified_base 54: mod_base = OTHER; note = 2'-O-Methyl-guanosine
  modified_base 55: mod_base = OTHER; note = 2'-O-Methyl-cytidine
  modified_base 56: mod_base = OTHER; note = 2'-O-Methyl-uridine
  modified_base 57: mod_base = OTHER; note = 2'-O-Methyl-adenosine
  modified_base 60: mod_base = OTHER; note = 2'-O-Methyl-cytidine
  modified_base 61: mod_base = OTHER; note = 2'-O-Methyl-cytidine
  modified_base 65: mod_base = OTHER; note = Nebularine - 2'-deoxynebularine
  modified_base 66: mod_base = OTHER; note = 2'-O-Methyl-uridine
  modified_base 67: mod_base = OTHER; note = 2'-O-Methyl-cytidine
  modified_base 70: mod_base = OTHER; note = 2'-O-Methyl-cytidine
  modified_base 71: mod_base = OTHER; note = 2'-O-Methyl-uridine
  modified_base 72: mod_base = OTHER; note = 2'-O-Methyl-uridine
  modified_base 73: mod_base = OTHER; note = 2'-O-Methyl-guanosine
  modified_base 74: mod_base = OTHER; note = 2'-O-Methyl-adenosine
  modified_base 75: mod_base = OTHER; note = 2'-O-Methyl-adenosine
  modified_base 76: mod_base = OTHER; note = 2'-O-Methyl-adenosine
  modified_base 77: mod_base = OTHER; note = 2'-O-Methyl-adenosine
  modified_base 78: mod_base = OTHER; note = 2'-O-Methyl-adenosine
  modified_base 79: mod_base = OTHER; note = 2'-O-Methyl-guanosine
  modified_base 80: mod_base = OTHER; note = 2'-O-Methyl-uridine
  modified_base 81: mod_base = OTHER; note = 2'-O-Methyl-guanosine
  modified_base 83: mod_base = OTHER; note = 2'-O-Methyl-cytidine
  modified_base 84: mod_base = OTHER; note = 2'-O-Methyl-adenosine
  modified_base 85: mod_base = OTHER; note = 2'-O-Methyl-cytidine
  modified_base 86: mod_base = OTHER; note = 2'-O-Methyl-cytidine
  modified_base 87: mod_base = OTHER; note = 2'-O-Methyl-guanosine
  modified_base 88: mod_base = OTHER; note = 2'-O-Methyl-adenosine
  modified_base 89: mod_base = OTHER; note = 2'-O-Methyl-guanosine
  modified_base 90: mod_base = OTHER; note = 2'-O-Methyl-uridine
  modified_base 91: mod_base = OTHER; note = 2'-O-Methyl-cytidine
  modified_base 92: mod_base = OTHER; note = 2'-O-Methyl-guanosine
  modified_base 93: mod_base = OTHER; note = 2'-O-Methyl-guanosine
  modified_base 94: mod_base = OTHER; note = 2'-O-Methyl-uridine
  modified_base 95: mod_base = OTHER; note = 2'-O-Methyl-guanosine
  modified_base 96: mod_base = OTHER; note = 2'-O-Methyl-cytidine
  modified_base 97: mod_base = OTHER; note = 2'-O-Methyl-uridine phosphorothioate
  modified_base 98: mod_base = OTHER; note = 2'-O-Methyl-uridine phosphorothioate
  modified_base 99: mod_base = OTHER; note = 2'-O-Methyl-uridine phosphorothioate
  modified_base 100: mod_base = OTHER; note = 2'-O-Methyl-uridine
  misc_feature 1..64: note = RNA
  misc_feature 65: note = DNA
  misc_feature 66..100: note = RNA
caggttccatgggatgctctgttttagagctagaaatagcaagttaaaataaggctagtccgttntcaacttgaaaaagtggcaccgagtcggtgctttt

SEQ ID NO: 1948 - DNA, 100 bp, synthetic construct
  source 1..100: mol_type = other DNA; note = Description of Artificial Sequence: Synthetic oligonucleotide; note = Description of Combined DNA/RNA Molecule: Synthetic oligonucleotide
  modified_base 1: mod_base = OTHER; note = 2'-O-Methyl-cytidine phosphorothioate
  modified_base 2: mod_base = OTHER; note = 2'-O-Methyl-adenosine phosphorothioate
  modified_base 3: mod_base = OTHER; note = 2'-O-Methyl-guanosine phosphorothioate
  modified_base 21: mod_base = OTHER; note = 2'-O-Methyl-guanosine
  modified_base 28: mod_base = OTHER; note = 2'-O-Methyl-adenosine
  modified_base 29: mod_base = OTHER; note = 2'-O-Methyl-guanosine
  modified_base 30: mod_base = OTHER; note = 2'-O-Methyl-cytidine
  modified_base 31: mod_base = OTHER; note = 2'-O-Methyl-uridine
  modified_base 32: mod_base = OTHER; note = 2'-O-Methyl-adenosine
  modified_base 33: mod_base = OTHER; note = 2'-O-Methyl-guanosine
  modified_base 34: mod_base = OTHER; note = Nebularine - 2'-deoxynebularine
  modified_base 35: mod_base = OTHER; note = 2'-O-Methyl-adenosine
  modified_base 36: mod_base = OTHER; note = 2'-O-Methyl-adenosine
  modified_base 37: mod_base = OTHER; note = 2'-O-Methyl-uridine
  modified_base 38: mod_base = OTHER; note = 2'-O-Methyl-adenosine
  modified_base 39: mod_base = OTHER; note = 2'-O-Methyl-guanosine
  modified_base 40: mod_base = OTHER; note = 2'-O-Methyl-cytidine
  modified_base 41: mod_base = OTHER; note = 2'-O-Methyl-adenosine
  modified_base 42: mod_base = OTHER; note = 2'-O-Methyl-adenosine
  modified_base 46: mod_base = OTHER; note = 2'-O-Methyl-adenosine
  modified_base 48: mod_base = OTHER; note = 2'-O-Methyl-adenosine
  modified_base 50: mod_base = OTHER; note = 2'-O-Methyl-uridine
  modified_base 52: mod_base = OTHER; note = 2'-O-Methyl-adenosine
  modified_base 53: mod_base = OTHER; note = 2'-O-Methyl-guanosine
  modified_base 54: mod_base = OTHER; note = 2'-O-Methyl-guanosine
  modified_base 55: mod_base = OTHER; note = 2'-O-Methyl-cytidine
  modified_base 56: mod_base = OTHER; note = 2'-O-Methyl-uridine
  modified_base 57: mod_base = OTHER; note = Nebularine - 2'-deoxynebularine
  modified_base 60: mod_base = OTHER; note = 2'-O-Methyl-cytidine
  modified_base 61: mod_base = OTHER; note = 2'-O-Methyl-cytidine
  modified_base 65: mod_base = OTHER; note = Nebularine - 2'-deoxynebularine
  modified_base 66: mod_base = OTHER; note = 2'-O-Methyl-uridine
  modified_base 67: mod_base = OTHER; note = 2'-O-Methyl-cytidine
  modified_base 70: mod_base = OTHER; note = 2'-O-Methyl-cytidine
  modified_base 71: mod_base = OTHER; note = 2'-O-Methyl-uridine
  modified_base 72: mod_base = OTHER; note = 2'-O-Methyl-uridine
  modified_base 73: mod_base = OTHER; note = 2'-O-Methyl-guanosine
  modified_base 74: mod_base = OTHER; note = 2'-O-Methyl-adenosine
  modified_base 75: mod_base = OTHER; note = 2'-O-Methyl-adenosine
  modified_base 76: mod_base = OTHER; note = 2'-O-Methyl-adenosine
  modified_base 77: mod_base = OTHER; note = 2'-O-Methyl-adenosine
  modified_base 78: mod_base = OTHER; note = 2'-O-Methyl-adenosine
  modified_base 79: mod_base = OTHER; note = 2'-O-Methyl-guanosine
  modified_base 80: mod_base = OTHER; note = 2'-O-Methyl-uridine
  modified_base 81: mod_base = OTHER; note = 2'-O-Methyl-guanosine
  modified_base 83: mod_base = OTHER; note = 2'-O-Methyl-cytidine
  modified_base 84: mod_base = OTHER; note = 2'-O-Methyl-adenosine
  modified_base 85: mod_base = OTHER; note = 2'-O-Methyl-cytidine
  modified_base 86: mod_base = OTHER; note = 2'-O-Methyl-cytidine
  modified_base 87: mod_base = OTHER; note = 2'-O-Methyl-guanosine
  modified_base 88: mod_base = OTHER; note = 2'-O-Methyl-adenosine
  modified_base 89: mod_base = OTHER; note = 2'-O-Methyl-guanosine
  modified_base 90: mod_base = OTHER; note = 2'-O-Methyl-uridine
  modified_base 91: mod_base = OTHER; note = 2'-O-Methyl-cytidine
  modified_base 92: mod_base = OTHER; note = 2'-O-Methyl-guanosine
  modified_base 93: mod_base = OTHER; note = 2'-O-Methyl-guanosine
  modified_base 94: mod_base = OTHER; note = 2'-O-Methyl-uridine
  modified_base 95: mod_base = OTHER; note = 2'-O-Methyl-guanosine
  modified_base 96: mod_base = OTHER; note = 2'-O-Methyl-cytidine
  modified_base 97: mod_base = OTHER; note = 2'-O-Methyl-uridine phosphorothioate
  modified_base 98: mod_base = OTHER; note = 2'-O-Methyl-uridine phosphorothioate
  modified_base 99: mod_base = OTHER; note = 2'-O-Methyl-uridine phosphorothioate
  modified_base 100: mod_base = OTHER; note = 2'-O-Methyl-uridine
  misc_feature 1..33: note = RNA
  misc_feature 34: note = DNA
  misc_feature 35..56: note = RNA
  misc_feature 57: note = DNA
  misc_feature 58..64: note = RNA
  misc_feature 65: note = DNA
  misc_feature 66..100: note = RNA
caggttccatgggatgctctgttttagagctagnaatagcaagttaaaataaggctngtccgttntcaacttgaaaaagtggcaccgagtcggtgctttt

SEQ ID NO: 1949 - DNA, 100 bp, synthetic construct
  source 1..100: mol_type = other DNA; note = Description of Artificial Sequence: Synthetic oligonucleotide; note = Description of Combined DNA/RNA Molecule: Synthetic oligonucleotide
  modified_base 1: mod_base = OTHER; note = 2'-O-Methyl-cytidine phosphorothioate
  modified_base 2: mod_base = OTHER; note = 2'-O-Methyl-adenosine phosphorothioate
  modified_base 3: mod_base = OTHER; note = 2'-O-Methyl-guanosine phosphorothioate
  modified_base 21: mod_base = OTHER; note = 2'-O-Methyl-guanosine
  modified_base 28: mod_base = OTHER; note = Nebularine - 2'-deoxynebularine
  modified_base 29: mod_base = OTHER; note = 2'-O-Methyl-guanosine
  modified_base 30: mod_base = OTHER; note = 2'-O-Methyl-cytidine
  modified_base 31: mod_base = OTHER; note = 2'-O-Methyl-uridine
  modified_base 32: mod_base = OTHER; note = 2'-O-Methyl-adenosine
  modified_base 33: mod_base = OTHER; note = 2'-O-Methyl-guanosine
  modified_base 34: mod_base = OTHER; note = Nebularine - 2'-deoxynebularine
  modified_base 35: mod_base = OTHER; note = 2'-O-Methyl-adenosine
  modified_base 36: mod_base = OTHER; note = 2'-O-Methyl-adenosine
  modified_base 37: mod_base = OTHER; note = 2'-O-Methyl-uridine
  modified_base 38: mod_base = OTHER; note = 2'-O-Methyl-adenosine
  modified_base 39: mod_base = OTHER; note = 2'-O-Methyl-guanosine
  modified_base 40: mod_base = OTHER; note = 2'-O-Methyl-cytidine
  modified_base 41: mod_base = OTHER; note = 2'-O-Methyl-adenosine
  modified_base 42: mod_base = OTHER; note = Nebularine - 2'-deoxynebularine
  modified_base 46: mod_base = OTHER; note = 2'-O-Methyl-adenosine
  modified_base 48: mod_base = OTHER; note = 2'-O-Methyl-adenosine
  modified_base 50: mod_base = OTHER; note = 2'-O-Methyl-uridine
  modified_base 52: mod_base = OTHER; note = 2'-O-Methyl-adenosine
  modified_base 53: mod_base = OTHER; note = 2'-O-Methyl-guanosine
  modified_base 54: mod_base = OTHER; note = 2'-O-Methyl-guanosine
  modified_base 55: mod_base = OTHER; note = 2'-O-Methyl-cytidine
  modified_base 56: mod_base = OTHER; note = 2'-O-Methyl-uridine
  modified_base 57: mod_base = OTHER; note = Nebularine - 2'-deoxynebularine
  modified_base 60: mod_base = OTHER; note = 2'-O-Methyl-cytidine
  modified_base 61: mod_base = OTHER; note = 2'-O-Methyl-cytidine
  modified_base 65: mod_base = OTHER; note = Nebularine - 2'-deoxynebularine
  modified_base 66: mod_base = OTHER; note = 2'-O-Methyl-uridine
  modified_base 67: mod_base = OTHER; note = 2'-O-Methyl-cytidine
  modified_base 70: mod_base = OTHER; note = 2'-O-Methyl-cytidine
  modified_base 71: mod_base = OTHER; note = 2'-O-Methyl-uridine
  modified_base 72: mod_base = OTHER; note = 2'-O-Methyl-uridine
  modified_base 73: mod_base = OTHER; note = 2'-O-Methyl-guanosine
  modified_base 74: mod_base = OTHER; note = 2'-O-Methyl-adenosine
  modified_base 75: mod_base = OTHER; note = 2'-O-Methyl-adenosine
  modified_base 76: mod_base = OTHER; note = 2'-O-Methyl-adenosine
  modified_base 77: mod_base = OTHER; note = 2'-O-Methyl-adenosine
  modified_base 78: mod_base = OTHER; note = 2'-O-Methyl-adenosine
  modified_base 79: mod_base = OTHER; note = 2'-O-Methyl-guanosine
  modified_base 80: mod_base = OTHER; note = 2'-O-Methyl-uridine
  modified_base 81: mod_base = OTHER; note = 2'-O-Methyl-guanosine
  modified_base 83: mod_base = OTHER; note = 2'-O-Methyl-cytidine
  modified_base 84: mod_base = OTHER; note = 2'-O-Methyl-adenosine
  modified_base 85: mod_base = OTHER; note = 2'-O-Methyl-cytidine
  modified_base 86: mod_base = OTHER; note = 2'-O-Methyl-cytidine
  modified_base 87: mod_base = OTHER; note = 2'-O-Methyl-guanosine
  modified_base 88: mod_base = OTHER; note = 2'-O-Methyl-adenosine
  modified_base 89: mod_base = OTHER; note = 2'-O-Methyl-guanosine
  modified_base 90: mod_base = OTHER; note = 2'-O-Methyl-uridine
  modified_base 91: mod_base = OTHER; note = 2'-O-Methyl-cytidine
  modified_base 92: mod_base = OTHER; note = 2'-O-Methyl-guanosine
  modified_base 93: mod_base = OTHER; note = 2'-O-Methyl-guanosine
  modified_base 94: mod_base = OTHER; note = 2'-O-Methyl-uridine
  modified_base 95: mod_base = OTHER; note = 2'-O-Methyl-guanosine
  modified_base 96: mod_base = OTHER; note = 2'-O-Methyl-cytidine
  modified_base 97: mod_base = OTHER; note = 2'-O-Methyl-uridine phosphorothioate
  modified_base 98: mod_base = OTHER; note = 2'-O-Methyl-uridine phosphorothioate
  modified_base 99: mod_base = OTHER; note = 2'-O-Methyl-uridine phosphorothioate
  modified_base 100: mod_base = OTHER; note = 2'-O-Methyl-uridine
  misc_feature 1..27: note = RNA
  misc_feature 28: note = DNA
  misc_feature 29..33: note = RNA
  misc_feature 34: note = DNA
  misc_feature 35..41: note = RNA
  misc_feature 42: note = DNA
  misc_feature 43..56: note = RNA
  misc_feature 57: note = DNA
  misc_feature 58..64: note = RNA
  misc_feature 65: note = DNA
  misc_feature 66..100: note = RNA
caggttccatgggatgctctgttttagngctagnaatagcangttaaaataaggctngtccgttntcaacttgaaaaagtggcaccgagtcggtgctttt

SEQ ID NO: 1950 - RNA, 100 nt, synthetic construct; identical to SEQ ID NO: 1896
  source 1..100: mol_type = other RNA; note = Description of Artificial Sequence: Synthetic polynucleotide
  modified_base 1: mod_base = OTHER; note = 2'-O-Methyl-cytidine phosphorothioate
  modified_base 2: mod_base = OTHER; note = 2'-O-Methyl-adenosine phosphorothioate
  modified_base 3: mod_base = OTHER; note = 2'-O-Methyl-guanosine
  modified_base 9: mod_base = OTHER; note = Nebularine - ribonebularine
  modified_base 14: mod_base = OTHER; note = Nebularine - ribonebularine
  modified_base 21: mod_base = OTHER; note = 2'-O-Methyl-guanosine
  modified_base 28: mod_base = OTHER; note = 2'-O-Methyl-adenosine
  modified_base 29: mod_base = OTHER; note = 2'-O-Methyl-guanosine
  modified_base 30: mod_base = OTHER; note = 2'-O-Methyl-cytidine
  modified_base 31: mod_base = OTHER; note = 2'-O-Methyl-uridine
  modified_base 32: mod_base = OTHER; note = 2'-O-Methyl-adenosine
  modified_base 33: mod_base = OTHER; note = 2'-O-Methyl-guanosine
  modified_base 34: mod_base = OTHER; note = 2'-O-Methyl-adenosine
  modified_base 35: mod_base = OTHER; note = 2'-O-Methyl-adenosine
  modified_base 36: mod_base = OTHER; note = 2'-O-Methyl-adenosine
  modified_base 37: mod_base = OTHER; note = 2'-O-Methyl-uridine
  modified_base 38: mod_base = OTHER; note = 2'-O-Methyl-adenosine
  modified_base 39: mod_base = OTHER; note = 2'-O-Methyl-guanosine
  modified_base 40: mod_base = OTHER; note = 2'-O-Methyl-cytidine
  modified_base 41: mod_base = OTHER; note = 2'-O-Methyl-adenosine
  modified_base 42: mod_base = OTHER; note = 2'-O-Methyl-adenosine
  modified_base 46: mod_base = OTHER; note = 2'-O-Methyl-adenosine
  modified_base 48: mod_base = OTHER; note = 2'-O-Methyl-adenosine
  modified_base 50: mod_base = OTHER; note = 2'-O-Methyl-uridine
  modified_base 52: mod_base = OTHER; note = 2'-O-Methyl-adenosine
  modified_base 53: mod_base = OTHER; note = 2'-O-Methyl-guanosine
  modified_base 54: mod_base = OTHER; note = 2'-O-Methyl-guanosine
  modified_base 55: mod_base = OTHER; note = 2'-O-Methyl-cytidine
  modified_base 56: mod_base = OTHER; note = 2'-O-Methyl-uridine
  modified_base 57: mod_base = OTHER; note = 2'-O-Methyl-adenosine
  modified_base 60: mod_base = OTHER; note = 2'-O-Methyl-cytidine
  modified_base 61: mod_base = OTHER; note = 2'-O-Methyl-cytidine
  modified_base 66: mod_base = OTHER; note = 2'-O-Methyl-uridine
  modified_base 67: mod_base = OTHER; note = 2'-O-Methyl-cytidine
  modified_base 70: mod_base = OTHER; note = 2'-O-Methyl-cytidine
  modified_base 71: mod_base = OTHER; note = 2'-O-Methyl-uridine
  modified_base 72: mod_base = OTHER; note = 2'-O-Methyl-uridine
  modified_base 73: mod_base = OTHER; note = 2'-O-Methyl-guanosine
  modified_base 74: mod_base = OTHER; note = 2'-O-Methyl-adenosine
  modified_base 75: mod_base = OTHER; note = 2'-O-Methyl-adenosine
  modified_base 76: mod_base = OTHER; note = 2'-O-Methyl-adenosine
  modified_base 77: mod_base = OTHER; note = 2'-O-Methyl-adenosine
  modified_base 78: mod_base = OTHER; note = 2'-O-Methyl-adenosine
  modified_base 79: mod_base = OTHER; note = 2'-O-Methyl-guanosine
  modified_base 80: mod_base = OTHER; note = 2'-O-Methyl-uridine
  modified_base 81: mod_base = OTHER; note = 2'-O-Methyl-guanosine
  modified_base 83: mod_base = OTHER; note = 2'-O-Methyl-cytidine
  modified_base 84: mod_base = OTHER; note = 2'-O-Methyl-adenosine
  modified_base 85: mod_base = OTHER; note = 2'-O-Methyl-cytidine
  modified_base 86: mod_base = OTHER; note = 2'-O-Methyl-cytidine
  modified_base 87: mod_base = OTHER; note = 2'-O-Methyl-guanosine
  modified_base 88: mod_base = OTHER; note = 2'-O-Methyl-adenosine
  modified_base 89: mod_base = OTHER; note = 2'-O-Methyl-guanosine
  modified_base 90: mod_base = OTHER; note = 2'-O-Methyl-uridine
  modified_base 91: mod_base = OTHER; note = 2'-O-Methyl-cytidine
  modified_base 92: mod_base = OTHER; note = 2'-O-Methyl-guanosine
  modified_base 93: mod_base = OTHER; note = 2'-O-Methyl-guanosine
  modified_base 94: mod_base = OTHER; note = 2'-O-Methyl-uridine
  modified_base 95: mod_base = OTHER; note = 2'-O-Methyl-guanosine
  modified_base 96: mod_base = OTHER; note = 2'-O-Methyl-cytidine
  modified_base 97: mod_base = OTHER; note = 2'-O-Methyl-uridine phosphorothioate
  modified_base 98: mod_base = OTHER; note = 2'-O-Methyl-uridine phosphorothioate
  modified_base 99: mod_base = OTHER; note = 2'-O-Methyl-uridine phosphorothioate
  modified_base 100: mod_base = OTHER; note = 2'-O-Methyl-uridine

SEQ ID NO: 1951 - RNA, 100 nt, synthetic construct; identical to SEQ ID NO: 1897
  source 1..100: mol_type = other RNA; note = Description of Artificial Sequence: Synthetic polynucleotide
  modified_base 1: mod_base = OTHER; note = 2'-O-Methyl-cytidine phosphorothioate
  modified_base 2: mod_base = OTHER; note = 2'-O-Methyl-adenosine phosphorothioate
  modified_base 3: mod_base = OTHER; note = 2'-O-Methyl-guanosine
  modified_base 9: mod_base = OTHER; note = Nebularine - ribonebularine
  modified_base 21: mod_base = OTHER; note = 2'-O-Methyl-guanosine
  modified_base 28: mod_base = OTHER; note = 2'-O-Methyl-adenosine
  modified_base 29: mod_base = OTHER; note = 2'-O-Methyl-guanosine
  modified_base 30: mod_base = OTHER; note = 2'-O-Methyl-cytidine
  modified_base 31: mod_base = OTHER; note = 2'-O-Methyl-uridine
  modified_base 32: mod_base = OTHER; note = 2'-O-Methyl-adenosine
  modified_base 33: mod_base = OTHER; note = 2'-O-Methyl-guanosine
  modified_base 34: mod_base = OTHER; note = 2'-O-Methyl-adenosine
  modified_base 35: mod_base = OTHER; note = 2'-O-Methyl-adenosine
  modified_base 36: mod_base = OTHER; note = 2'-O-Methyl-adenosine
  modified_base 37: mod_base = OTHER; note = 2'-O-Methyl-uridine
  modified_base 38: mod_base = OTHER; note = 2'-O-Methyl-adenosine
  modified_base 39: mod_base = OTHER; note = 2'-O-Methyl-guanosine
  modified_base 40: mod_base = OTHER; note = 2'-O-Methyl-cytidine
  modified_base 41: mod_base = OTHER; note = 2'-O-Methyl-adenosine
  modified_base 42: mod_base = OTHER; note = 2'-O-Methyl-adenosine
  modified_base 46: mod_base = OTHER; note = 2'-O-Methyl-adenosine
  modified_base 48: mod_base = OTHER; note = 2'-O-Methyl-adenosine
  modified_base 50: mod_base = OTHER; note = 2'-O-Methyl-uridine
  modified_base 52: mod_base = OTHER; note = 2'-O-Methyl-adenosine
  modified_base 53: mod_base = OTHER; note = 2'-O-Methyl-guanosine
  modified_base 54: mod_base = OTHER; note = 2'-O-Methyl-guanosine
  modified_base 55: mod_base = OTHER; note = 2'-O-Methyl-cytidine
  modified_base 56: mod_base = OTHER; note = 2'-O-Methyl-uridine
  modified_base 57: mod_base = OTHER; note = 2'-O-Methyl-adenosine
  modified_base 60: mod_base = OTHER; note = 2'-O-Methyl-cytidine
  modified_base 61: mod_base = OTHER; note = 2'-O-Methyl-cytidine
  modified_base 66: mod_base = OTHER; note = 2'-O-Methyl-uridine
  modified_base 67: mod_base = OTHER; note = 2'-O-Methyl-cytidine
  modified_base 70: mod_base = OTHER; note = 2'-O-Methyl-cytidine
  modified_base 71: mod_base = OTHER; note = 2'-O-Methyl-uridine
  modified_base 72: mod_base = OTHER; note = 2'-O-Methyl-uridine
  modified_base 73: mod_base = OTHER; note = 2'-O-Methyl-guanosine
  modified_base 74: mod_base = OTHER; note = 2'-O-Methyl-adenosine
  modified_base 75: mod_base = OTHER; note = 2'-O-Methyl-adenosine
  modified_base 76: mod_base = OTHER; note = 2'-O-Methyl-adenosine
  modified_base 77: mod_base = OTHER; note = 2'-O-Methyl-adenosine
  modified_base 78: mod_base = OTHER; note = 2'-O-Methyl-adenosine
  modified_base 79: mod_base = OTHER; note = 2'-O-Methyl-guanosine
  modified_base 80: mod_base = OTHER; note = 2'-O-Methyl-uridine
  modified_base 81: mod_base = OTHER; note = 2'-O-Methyl-guanosine
  modified_base 83: mod_base = OTHER; note = 2'-O-Methyl-cytidine
  modified_base 84: mod_base = OTHER; note = 2'-O-Methyl-adenosine
  modified_base 85: mod_base = OTHER; note = 2'-O-Methyl-cytidine
  modified_base 86: mod_base = OTHER; note = 2'-O-Methyl-cytidine
  modified_base 87: mod_base = OTHER; note = 2'-O-Methyl-guanosine
  modified_base 88: mod_base = OTHER; note = 2'-O-Methyl-adenosine
  modified_base 89: mod_base = OTHER; note = 2'-O-Methyl-guanosine
  modified_base 90: mod_base = OTHER; note = 2'-O-Methyl-uridine
  modified_base 91: mod_base = OTHER; note = 2'-O-Methyl-cytidine
  modified_base 92: mod_base = OTHER; note = 2'-O-Methyl-guanosine
  modified_base 93: mod_base = OTHER; note = 2'-O-Methyl-guanosine
  modified_base 94: mod_base = OTHER; note = 2'-O-Methyl-uridine
  modified_base 95: mod_base = OTHER; note = 2'-O-Methyl-guanosine
  modified_base 96: mod_base = OTHER; note = 2'-O-Methyl-cytidine
  modified_base 97: mod_base = OTHER; note = 2'-O-Methyl-uridine phosphorothioate
  modified_base 98: mod_base = OTHER; note = 2'-O-Methyl-uridine phosphorothioate
  modified_base 99: mod_base = OTHER; note = 2'-O-Methyl-uridine phosphorothioate
  modified_base 100: mod_base = OTHER; note = 2'-O-Methyl-uridine

SEQ ID NO: 1952 - RNA, 100 nt, synthetic construct; identical to SEQ ID NO: 1898
  source 1..100: mol_type = other RNA; note = Description of Artificial Sequence: Synthetic polynucleotide
  modified_base 1: mod_base = OTHER; note = 2'-O-Methyl-cytidine phosphorothioate
  modified_base 2: mod_base = OTHER; note = 2'-O-Methyl-adenosine phosphorothioate
  modified_base 3: mod_base = OTHER; note = 2'-O-Methyl-guanosine
  modified_base 14: mod_base = OTHER; note = Nebularine - ribonebularine
  modified_base 21: mod_base = OTHER; note = 2'-O-Methyl-guanosine
  modified_base 28: mod_base = OTHER; note = 2'-O-Methyl-adenosine
  modified_base 29: mod_base = OTHER; note = 2'-O-Methyl-guanosine
  modified_base 30: mod_base = OTHER; note = 2'-O-Methyl-cytidine
  modified_base 31: mod_base = OTHER; note = 2'-O-Methyl-uridine
  modified_base 32: mod_base = OTHER; note = 2'-O-Methyl-adenosine
  modified_base 33: mod_base = OTHER; note = 2'-O-Methyl-guanosine
  modified_base 34: mod_base = OTHER; note = 2'-O-Methyl-adenosine
  modified_base 35: mod_base = OTHER; note = 2'-O-Methyl-adenosine
  modified_base 36: mod_base = OTHER; note = 2'-O-Methyl-adenosine
  modified_base 37: mod_base = OTHER; note = 2'-O-Methyl-uridine
  modified_base 38: mod_base = OTHER; note = 2'-O-Methyl-adenosine
  modified_base 39: mod_base = OTHER; note = 2'-O-Methyl-guanosine
  modified_base 40: mod_base = OTHER; note = 2'-O-Methyl-cytidine
  modified_base 41: mod_base = OTHER; note = 2'-O-Methyl-adenosine
  modified_base 42: mod_base = OTHER; note = 2'-O-Methyl-adenosine
  modified_base 46: mod_base = OTHER; note = 2'-O-Methyl-adenosine
  modified_base 48: mod_base = OTHER; note = 2'-O-Methyl-adenosine
  modified_base 50: mod_base = OTHER; note = 2'-O-Methyl-uridine
  modified_base 52: mod_base = OTHER; note = 2'-O-Methyl-adenosine
  modified_base 53: mod_base = OTHER; note = 2'-O-Methyl-guanosine
  modified_base 54: mod_base = OTHER; note = 2'-O-Methyl-guanosine
  modified_base 55: mod_base = OTHER; note = 2'-O-Methyl-cytidine
  modified_base 56: mod_base = OTHER; note = 2'-O-Methyl-uridine
  modified_base 57: mod_base = OTHER; note = 2'-O-Methyl-adenosine
  modified_base 60: mod_base = OTHER; note = 2'-O-Methyl-cytidine
  modified_base 61: mod_base = OTHER; note = 2'-O-Methyl-cytidine
  modified_base 66: mod_base = OTHER; note = 2'-O-Methyl-uridine
  modified_base 67: mod_base = OTHER; note = 2'-O-Methyl-cytidine
  modified_base 70: mod_base = OTHER; note = 2'-O-Methyl-cytidine
  modified_base 71: mod_base = OTHER; note = 2'-O-Methyl-uridine
  modified_base 72: mod_base = OTHER; note = 2'-O-Methyl-uridine
  modified_base 73: mod_base = OTHER; note = 2'-O-Methyl-guanosine
  modified_base 74: mod_base = OTHER; note = 2'-O-Methyl-adenosine
  modified_base 75: mod_base = OTHER; note = 2'-O-Methyl-adenosine
  modified_base 76: mod_base = OTHER; note = 2'-O-Methyl-adenosine
  modified_base 77: mod_base = OTHER; note = 2'-O-Methyl-adenosine
  modified_base 78: mod_base = OTHER; note = 2'-O-Methyl-adenosine
  modified_base 79: mod_base = OTHER; note = 2'-O-Methyl-guanosine
  modified_base 80: mod_base = OTHER; note = 2'-O-Methyl-uridine
  modified_base 81: mod_base = OTHER; note = 2'-O-Methyl-guanosine
  modified_base 83: mod_base = OTHER; note = 2'-O-Methyl-cytidine
  modified_base 84: mod_base = OTHER; note = 2'-O-Methyl-adenosine
  modified_base 85: mod_base = OTHER; note = 2'-O-Methyl-cytidine
  modified_base 86: mod_base = OTHER; note = 2'-O-Methyl-cytidine
  modified_base 87: mod_base = OTHER; note = 2'-O-Methyl-guanosine
  modified_base 88: mod_base = OTHER; note = 2'-O-Methyl-adenosine
  modified_base 89: mod_base = OTHER; note = 2'-O-Methyl-guanosine
  modified_base 90: mod_base = OTHER; note = 2'-O-Methyl-uridine
  modified_base 91: mod_base = OTHER; note = 2'-O-Methyl-cytidine
  modified_base 92: mod_base = OTHER; note = 2'-O-Methyl-guanosine
  modified_base 93: mod_base = OTHER; note = 2'-O-Methyl-guanosine
  modified_base 94: mod_base = OTHER; note = 2'-O-Methyl-uridine
  modified_base 95: mod_base = OTHER; note = 2'-O-Methyl-guanosine
  modified_base 96: mod_base = OTHER; note = 2'-O-Methyl-cytidine
  modified_base 97: mod_base = OTHER; note = 2'-O-Methyl-uridine phosphorothioate
  modified_base 98: mod_base = OTHER; note = 2'-O-Methyl-uridine phosphorothioate
  modified_base 99: mod_base = OTHER; note = 2'-O-Methyl-uridine phosphorothioate
  modified_base 100: mod_base = OTHER; note = 2'-O-Methyl-uridine

SEQ ID NO: 1953 - RNA, 100 nt, synthetic construct; identical to SEQ ID NO: 1899
  source 1..100: mol_type = other RNA; note = Description of Artificial Sequence: Synthetic polynucleotide
  modified_base 1: mod_base = OTHER; note = 2'-O-Methyl-cytidine phosphorothioate
  modified_base 2: mod_base = OTHER; note = 2'-O-Methyl-adenosine phosphorothioate
  modified_base 3: mod_base = OTHER; note = 2'-O-Methyl-guanosine
  modified_base 21: mod_base = OTHER; note = 2'-O-Methyl-guanosine
  modified_base 28: mod_base = OTHER; note = 2'-O-Methyl-adenosine
  modified_base 29: mod_base = OTHER; note = 2'-O-Methyl-guanosine
  modified_base 30: mod_base = OTHER; note = 2'-O-Methyl-cytidine
  modified_base 31: mod_base = OTHER; note = 2'-O-Methyl-uridine
  modified_base 32: mod_base = OTHER; note = 2'-O-Methyl-adenosine
  modified_base 33: mod_base = OTHER; note = 2'-O-Methyl-guanosine
  modified_base 34: mod_base = OTHER; note = Nebularine - ribonebularine
  modified_base 35: mod_base = OTHER; note = 2'-O-Methyl-adenosine
  modified_base 36: mod_base = OTHER; note = 2'-O-Methyl-adenosine
  modified_base 37: mod_base = OTHER; note = 2'-O-Methyl-uridine
  modified_base 38: mod_base = OTHER; note = 2'-O-Methyl-adenosine
  modified_base 39: mod_base = OTHER; note = 2'-O-Methyl-guanosine
  modified_base 40: mod_base = OTHER; note = 2'-O-Methyl-cytidine
  modified_base 41: mod_base = OTHER; note = 2'-O-Methyl-adenosine
  modified_base 42: mod_base = OTHER; note = 2'-O-Methyl-adenosine
  modified_base 46: mod_base = OTHER; note = 2'-O-Methyl-adenosine
  modified_base 48: mod_base = OTHER; note = 2'-O-Methyl-adenosine
  modified_base 50: mod_base = OTHER; note = 2'-O-Methyl-uridine
  modified_base 52: mod_base = OTHER; note = 2'-O-Methyl-adenosine
  modified_base 53: mod_base = OTHER; note = 2'-O-Methyl-guanosine
  modified_base 54: mod_base = OTHER; note = 2'-O-Methyl-guanosine
  modified_base 55: mod_base = OTHER; note = 2'-O-Methyl-cytidine
  modified_base 56: mod_base = OTHER; note = 2'-O-Methyl-uridine
  modified_base 57: mod_base = OTHER; note = 2'-O-Methyl-adenosine
  modified_base 60: mod_base = OTHER; note = 2'-O-Methyl-cytidine
  modified_base 61: mod_base = OTHER; note = 2'-O-Methyl-cytidine
  modified_base 66: mod_base = OTHER; note = 2'-O-Methyl-uridine
  modified_base 67: mod_base = OTHER; note = 2'-O-Methyl-cytidine
  modified_base 70: mod_base = OTHER; note = 2'-O-Methyl-cytidine
  modified_base 71: mod_base = OTHER; note = 2'-O-Methyl-uridine
  modified_base 72: mod_base = OTHER; note = 2'-O-Methyl-uridine
  modified_base 73: mod_base = OTHER; note = 2'-O-Methyl-guanosine
  modified_base 74: mod_base = OTHER; note = 2'-O-Methyl-adenosine
  modified_base 75: mod_base = OTHER; note = 2'-O-Methyl-adenosine
  modified_base 76: mod_base = OTHER; note = 2'-O-Methyl-adenosine
  modified_base 77: mod_base = OTHER; note = 2'-O-Methyl-adenosine
  modified_base 78: mod_base = OTHER; note = 2'-O-Methyl-adenosine
  modified_base 79: mod_base = OTHER; note = 2'-O-Methyl-guanosine
  modified_base 80: mod_base = OTHER; note = 2'-O-Methyl-uridine
  modified_base 81: mod_base = OTHER; note = 2'-O-Methyl-guanosine
  modified_base 83: mod_base = OTHER; note = 2'-O-Methyl-cytidine
  modified_base 84: mod_base = OTHER; note = 2'-O-Methyl-adenosine
  modified_base 85: mod_base = OTHER; note = 2'-O-Methyl-cytidine
  modified_base 86: mod_base = OTHER; note = 2'-O-Methyl-cytidine
  modified_base 87: mod_base = OTHER; note = 2'-O-Methyl-guanosine
  modified_base 88: mod_base = OTHER; note = 2'-O-Methyl-adenosine
  modified_base 89: mod_base = OTHER; note = 2'-O-Methyl-guanosine
  modified_base 90: mod_base = OTHER; note = 2'-O-Methyl-uridine
  modified_base 91: mod_base = OTHER; note = 2'-O-Methyl-cytidine
  modified_base 92: mod_base = OTHER; note = 2'-O-Methyl-guanosine
  modified_base 93: mod_base = OTHER; note = 2'-O-Methyl-guanosine
  modified_base 94: mod_base = OTHER; note = 2'-O-Methyl-uridine
  modified_base 95: mod_base = OTHER; note = 2'-O-Methyl-guanosine
  modified_base 96: mod_base = OTHER; note = 2'-O-Methyl-cytidine
  modified_base 97: mod_base = OTHER; note = 2'-O-Methyl-uridine phosphorothioate
  modified_base 98: mod_base = OTHER; note = 2'-O-Methyl-uridine phosphorothioate
  modified_base 99: mod_base = OTHER; note = 2'-O-Methyl-uridine phosphorothioate
  modified_base 100: mod_base = OTHER; note = 2'-O-Methyl-uridine

SEQ ID NO: 1954 - RNA, 100 nt, synthetic construct; identical to SEQ ID NO: 1900
  source 1..100: mol_type = other RNA; note = Description of Artificial Sequence: Synthetic polynucleotide
  modified_base 1: mod_base = OTHER; note = 2'-O-Methyl-cytidine phosphorothioate
  modified_base 2: mod_base = OTHER; note = 2'-O-Methyl-adenosine phosphorothioate
  modified_base 3: mod_base = OTHER; note = 2'-O-Methyl-guanosine
  modified_base 21: mod_base = OTHER; note = 2'-O-Methyl-guanosine
  modified_base 28: mod_base = OTHER; note = 2'-O-Methyl-adenosine
  modified_base 29: mod_base = OTHER; note = 2'-O-Methyl-guanosine
  modified_base 30: mod_base = OTHER; note = 2'-O-Methyl-cytidine
  modified_base 31: mod_base = OTHER; note = 2'-O-Methyl-uridine
  modified_base 32: mod_base = OTHER; note = 2'-O-Methyl-adenosine
  modified_base 33: mod_base = OTHER; note = 2'-O-Methyl-guanosine
  modified_base 34: mod_base = OTHER; note = Nebularine - ribonebularine
  modified_base 35: mod_base = OTHER; note = 2'-O-Methyl-adenosine
  modified_base 36: mod_base = OTHER; note = 2'-O-Methyl-adenosine
  modified_base 37: mod_base = OTHER; note = 2'-O-Methyl-uridine
  modified_base 38: mod_base = OTHER; note = 2'-O-Methyl-adenosine
  modified_base 39: mod_base = OTHER; note = 2'-O-Methyl-guanosine
  modified_base 40: mod_base = OTHER; note = 2'-O-Methyl-cytidine
  modified_base 41: mod_base = OTHER; note = 2'-O-Methyl-adenosine
  modified_base 42: mod_base = OTHER; note = 2'-O-Methyl-adenosine
  modified_base 46: mod_base = OTHER; note = 2'-O-Methyl-adenosine
  modified_base 48: mod_base = OTHER; note = 2'-O-Methyl-adenosine
  modified_base 50: mod_base = OTHER; note = 2'-O-Methyl-uridine
  modified_base 52: mod_base = OTHER; note = 2'-O-Methyl-adenosine
  modified_base 53: mod_base = OTHER; note = 2'-O-Methyl-guanosine
  modified_base 54: mod_base = OTHER; note = 2'-O-Methyl-guanosine
  modified_base 55: mod_base = OTHER; note = 2'-O-Methyl-cytidine
  modified_base 56: mod_base = OTHER; note = 2'-O-Methyl-uridine
  modified_base 57: mod_base = OTHER; note = Nebularine - ribonebularine
  modified_base 60: mod_base = OTHER; note = 2'-O-Methyl-cytidine
  modified_base 61: mod_base = OTHER; note = 2'-O-Methyl-cytidine
  modified_base 66: mod_base = OTHER; note = 2'-O-Methyl-uridine
  modified_base 67: mod_base = OTHER; note = 2'-O-Methyl-cytidine
  modified_base 70: mod_base = OTHER; note = 2'-O-Methyl-cytidine
  modified_base 71: mod_base = OTHER; note = 2'-O-Methyl-uridine
  modified_base 72: mod_base = OTHER; note = 2'-O-Methyl-uridine
  modified_base 73: mod_base = OTHER; note = 2'-O-Methyl-guanosine
  modified_base 74: mod_base = OTHER; note = 2'-O-Methyl-adenosine
  modified_base 75: mod_base = OTHER; note = 2'-O-Methyl-adenosine
  modified_base 76: mod_base = OTHER; note = 2'-O-Methyl-adenosine
  modified_base 77: mod_base = OTHER; note = 2'-O-Methyl-adenosine
  modified_base 78: mod_base = OTHER; note = 2'-O-Methyl-adenosine
  modified_base 79: mod_base = OTHER; note = 2'-O-Methyl-guanosine
  modified_base 80: mod_base = OTHER; note = 2'-O-Methyl-uridine
  modified_base 81: mod_base = OTHER; note = 2'-O-Methyl-guanosine
  modified_base 83: mod_base = OTHER; note = 2'-O-Methyl-cytidine
  modified_base 84: mod_base = OTHER; note = 2'-O-Methyl-adenosine
  modified_base 85: mod_base = OTHER; note = 2'-O-Methyl-cytidine
  modified_base 86: mod_base = OTHER; note = 2'-O-Methyl-cytidine
  modified_base 87: mod_base = OTHER; note = 2'-O-Methyl-guanosine
  modified_base 88: mod_base = OTHER; note = 2'-O-Methyl-adenosine
  modified_base 89: mod_base = OTHER; note = 2'-O-Methyl-guanosine
  modified_base 90: mod_base = OTHER; note = 2'-O-Methyl-uridine
  modified_base 91: mod_base = OTHER; note = 2'-O-Methyl-cytidine
  modified_base 92: mod_base = OTHER; note = 2'-O-Methyl-guanosine
  modified_base 93: mod_base = OTHER; note = 2'-O-Methyl-guanosine
  modified_base 94: mod_base = OTHER; note = 2'-O-Methyl-uridine
  modified_base 95: mod_base = OTHER; note = 2'-O-Methyl-guanosine
  modified_base 96: mod_base = OTHER; note = 2'-O-Methyl-cytidine
  modified_base 97: mod_base = OTHER; note = 2'-O-Methyl-uridine phosphorothioate
  modified_base 98: mod_base = OTHER; note = 2'-O-Methyl-uridine phosphorothioate
  modified_base 99: mod_base = OTHER; note = 2'-O-Methyl-uridine phosphorothioate
  modified_base 100: mod_base = OTHER; note = 2'-O-Methyl-uridine

SEQ ID NO: 1955 - RNA, 100 nt, synthetic construct; identical to SEQ ID NO: 1901
  source 1..100: mol_type = other RNA; note = Description of Artificial Sequence: Synthetic polynucleotide
  modified_base 1: mod_base = OTHER; note = 2'-O-Methyl-cytidine phosphorothioate
  modified_base 2: mod_base = OTHER; note = 2'-O-Methyl-adenosine phosphorothioate
  modified_base 3: mod_base = OTHER; note = 2'-O-Methyl-guanosine
  modified_base 21: mod_base = OTHER; note = 2'-O-Methyl-guanosine
  modified_base 28: mod_base = OTHER; note = 2'-O-Methyl-adenosine
  modified_base 29: mod_base = OTHER; note = 2'-O-Methyl-guanosine
  modified_base 30: mod_base = OTHER; note = 2'-O-Methyl-cytidine
  modified_base 31: mod_base = OTHER; note = 2'-O-Methyl-uridine
  modified_base 32: mod_base = OTHER; note = 2'-O-Methyl-adenosine
  modified_base 33: mod_base = OTHER; note = 2'-O-Methyl-guanosine
  modified_base 34: mod_base = OTHER; note = 2'-O-Methyl-adenosine
  modified_base 35: mod_base = OTHER; note = 2'-O-Methyl-adenosine
  modified_base 36: mod_base = OTHER; note = 2'-O-Methyl-adenosine
  modified_base 37: mod_base = OTHER; note = 2'-O-Methyl-uridine
  modified_base 38: mod_base = OTHER; note = 2'-O-Methyl-adenosine
  modified_base 39: mod_base = OTHER; note = 2'-O-Methyl-guanosine
  modified_base 40: mod_base = OTHER; note = 2'-O-Methyl-cytidine
  modified_base 41: mod_base = OTHER; note = 2'-O-Methyl-adenosine
  modified_base 42: mod_base = OTHER; note = 2'-O-Methyl-adenosine
  modified_base 46: mod_base = OTHER; note = 2'-O-Methyl-adenosine
  modified_base 48: mod_base = OTHER; note = 2'-O-Methyl-adenosine
  modified_base 50: mod_base = OTHER; note = 2'-O-Methyl-uridine
  modified_base 52: mod_base = OTHER; note = 2'-O-Methyl-adenosine
  modified_base 53: mod_base = OTHER; note = 2'-O-Methyl-guanosine
  modified_base 54: mod_base = OTHER; note = 2'-O-Methyl-guanosine
  modified_base 55: mod_base = OTHER; note = 2'-O-Methyl-cytidine
  modified_base 56: mod_base = OTHER; note = 2'-O-Methyl-uridine
  modified_base 57: mod_base = OTHER; note = Nebularine - ribonebularine
  modified_base 60: mod_base = OTHER; note = 2'-O-Methyl-cytidine
  modified_base 61: mod_base = OTHER; note = 2'-O-Methyl-cytidine
  modified_base 66: mod_base = OTHER; note = 2'-O-Methyl-uridine
  modified_base 67: mod_base = OTHER; note = 2'-O-Methyl-cytidine
  modified_base 70: mod_base = OTHER; note = 2'-O-Methyl-cytidine
  modified_base 71: mod_base = OTHER; note = 2'-O-Methyl-uridine
  modified_base 72: mod_base = OTHER; note = 2'-O-Methyl-uridine
  modified_base 73: mod_base = OTHER; note = 2'-O-Methyl-guanosine
  modified_base 74: mod_base = OTHER; note = 2'-O-Methyl-adenosine
  modified_base 75: mod_base = OTHER; note = 2'-O-Methyl-adenosine
  modified_base 76: mod_base = OTHER; note = 2'-O-Methyl-adenosine
  modified_base 77: mod_base = OTHER; note = 2'-O-Methyl-adenosine
  modified_base 78: mod_base = OTHER; note = 2'-O-Methyl-adenosine
  modified_base 79: mod_base = OTHER; note = 2'-O-Methyl-guanosine
  modified_base 80: mod_base = OTHER; note = 2'-O-Methyl-uridine
  modified_base 81: mod_base = OTHER; note = 2'-O-Methyl-guanosine
  modified_base 83: mod_base = OTHER; note = 2'-O-Methyl-cytidine
  modified_base 84: mod_base = OTHER; note = 2'-O-Methyl-adenosine
  modified_base 85: mod_base = OTHER; note = 2'-O-Methyl-cytidine
  modified_base 86: mod_base = OTHER; note = 2'-O-Methyl-cytidine
  modified_base 87: mod_base = OTHER; note = 2'-O-Methyl-guanosine
  modified_base 88: mod_base = OTHER; note = 2'-O-Methyl-adenosine
  modified_base 89: mod_base = OTHER; note = 2'-O-Methyl-guanosine
  modified_base 90: mod_base = OTHER; note = 2'-O-Methyl-uridine
  modified_base 91: mod_base = OTHER; note = 2'-O-Methyl-cytidine
  modified_base 92: mod_base = OTHER; note = 2'-O-Methyl-guanosine
  modified_base 93: mod_base = OTHER; note = 2'-O-Methyl-guanosine
  modified_base 94: mod_base = OTHER; note = 2'-O-Methyl-uridine
  modified_base 95: mod_base = OTHER; note = 2'-O-Methyl-guanosine
  modified_base 96: mod_base = OTHER; note = 2'-O-Methyl-cytidine
  modified_base 97: mod_base = OTHER; note = 2'-O-Methyl-uridine phosphorothioate
  modified_base 98: mod_base = OTHER; note = 2'-O-Methyl-uridine phosphorothioate
  modified_base 99: mod_base = OTHER; note = 2'-O-Methyl-uridine phosphorothioate
  modified_base 100: mod_base = OTHER; note = 2'-O-Methyl-uridine

SEQ ID NO: 1956 - RNA, 100 nt, synthetic construct; identical to SEQ ID NO: 1902
  source 1..100: mol_type = other RNA; note = Description of Artificial Sequence: Synthetic polynucleotide
  modified_base 1: mod_base = OTHER; note = 2'-O-Methyl-cytidine phosphorothioate
  modified_base 2: mod_base = OTHER; note = 2'-O-Methyl-adenosine phosphorothioate
  modified_base 3: mod_base = OTHER; note = 2'-O-Methyl-guanosine
  modified_base 21: mod_base = OTHER; note = 2'-O-Methyl-guanosine
  modified_base 28: mod_base = OTHER; note = 2'-O-Methyl-adenosine
  modified_base 29: mod_base = OTHER; note = 2'-O-Methyl-guanosine
  modified_base 30: mod_base = OTHER; note = 2'-O-Methyl-cytidine
  modified_base 31: mod_base = OTHER; note = 2'-O-Methyl-uridine
  modified_base 32: mod_base = OTHER; note = 2'-O-Methyl-adenosine
  modified_base 33: mod_base = OTHER; note = 2'-O-Methyl-guanosine
  modified_base 34: mod_base = OTHER; note = 2'-O-Methyl-adenosine
  modified_base 35: mod_base = OTHER; note = 2'-O-Methyl-adenosine
  modified_base 36: mod_base = OTHER; note = 2'-O-Methyl-adenosine
  modified_base 37: mod_base = OTHER; note = 2'-O-Methyl-uridine
  modified_base 38: mod_base = OTHER; note = 2'-O-Methyl-adenosine
  modified_base 39: mod_base = OTHER; note = 2'-O-Methyl-guanosine
  modified_base 40: mod_base = OTHER; note = 2'-O-Methyl-cytidine
  modified_base 41: mod_base = OTHER; note = 2'-O-Methyl-adenosine
  modified_base 42: mod_base = OTHER; note = 2'-O-Methyl-adenosine
  modified_base 46: mod_base = OTHER; note = 2'-O-Methyl-adenosine
  modified_base 48: mod_base = OTHER; note = 2'-O-Methyl-adenosine
  modified_base 50: mod_base = OTHER; note = 2'-O-Methyl-uridine
  modified_base 52: mod_base = OTHER; note = 2'-O-Methyl-adenosine
  modified_base 53: mod_base = OTHER; note = 2'-O-Methyl-guanosine
  modified_base 54: mod_base = OTHER; note = 2'-O-Methyl-guanosine
  modified_base 55: mod_base = OTHER; note = 2'-O-Methyl-cytidine
  modified_base 56: mod_base = OTHER; note = 2'-O-Methyl-uridine
  modified_base 57: mod_base = OTHER; note = 2'-O-Methyl-adenosine
  modified_base 60: mod_base = OTHER; note = 2'-O-Methyl-cytidine
  modified_base 61: mod_base = OTHER; note = 2'-O-Methyl-cytidine
  modified_base 65: mod_base = OTHER; note = Nebularine - ribonebularine
  modified_base 66: mod_base = OTHER; note = 2'-O-Methyl-uridine
  modified_base 67: mod_base = OTHER; note = 2'-O-Methyl-cytidine
  modified_base 70: mod_base = OTHER; note = 2'-O-Methyl-cytidine
  modified_base 71: mod_base = OTHER; note = 2'-O-Methyl-uridine
  modified_base 72: mod_base = OTHER; note = 2'-O-Methyl-uridine
  modified_base 73: mod_base = OTHER; note = 2'-O-Methyl-guanosine
  modified_base 74: mod_base = OTHER; note = 2'-O-Methyl-adenosine
  modified_base 75: mod_base = OTHER; note = 2'-O-Methyl-adenosine
  modified_base 76: mod_base = OTHER; note = 2'-O-Methyl-adenosine
  modified_base 77: mod_base = OTHER; note = 2'-O-Methyl-adenosine
  modified_base 78: mod_base = OTHER; note = 2'-O-Methyl-adenosine
  modified_base 79: mod_base = OTHER; note = 2'-O-Methyl-guanosine
  modified_base 80: mod_base = OTHER; note = 2'-O-Methyl-uridine
  modified_base 81: mod_base = OTHER; note = 2'-O-Methyl-guanosine
  modified_base 83: mod_base = OTHER; note = 2'-O-Methyl-cytidine
  modified_base 84: mod_base = OTHER; note = 2'-O-Methyl-adenosine
  modified_base 85: mod_base = OTHER; note = 2'-O-Methyl-cytidine
  modified_base 86: mod_base = OTHER; note = 2'-O-Methyl-cytidine
  modified_base 87: mod_base = OTHER; note = 2'-O-Methyl-guanosine
  modified_base 88: mod_base = OTHER; note = 2'-O-Methyl-adenosine
  modified_base 89: mod_base = OTHER; note = 2'-O-Methyl-guanosine
  modified_base 90: mod_base = OTHER; note = 2'-O-Methyl-uridine
  modified_base 91: mod_base = OTHER; note = 2'-O-Methyl-cytidine
  modified_base 92: mod_base = OTHER; note = 2'-O-Methyl-guanosine
  modified_base 93: mod_base = OTHER; note = 2'-O-Methyl-guanosine
  modified_base 94: mod_base = OTHER; note = 2'-O-Methyl-uridine
  modified_base 95: mod_base = OTHER; note = 2'-O-Methyl-guanosine
  modified_base 96: mod_base = OTHER; note = 2'-O-Methyl-cytidine
  modified_base 97: mod_base = OTHER; note = 2'-O-Methyl-uridine phosphorothioate
  modified_base 98: mod_base = OTHER; note = 2'-O-Methyl-uridine phosphorothioate
  modified_base 99: mod_base = OTHER; note = 2'-O-Methyl-uridine phosphorothioate
  modified_base 100: mod_base = OTHER; note = 2'-O-Methyl-uridine

SEQ ID NO: 1957 - RNA, 100 nt, synthetic construct; identical to SEQ ID NO: 1903
  source 1..100: mol_type = other RNA; note = Description of Artificial Sequence: Synthetic polynucleotide
  modified_base 1: mod_base = OTHER; note = 2'-O-Methyl-cytidine phosphorothioate
  modified_base 2: mod_base = OTHER; note = 2'-O-Methyl-adenosine phosphorothioate
  modified_base 3: mod_base = OTHER; note = 2'-O-Methyl-guanosine
  modified_base 21: mod_base = OTHER; note = 2'-O-Methyl-guanosine
  modified_base 28: mod_base = OTHER; note = 2'-O-Methyl-adenosine
  modified_base 29: mod_base = OTHER; note = 2'-O-Methyl-guanosine
  modified_base 30: mod_base = OTHER; note = 2'-O-Methyl-cytidine
  modified_base 31: mod_base = OTHER; note = 2'-O-Methyl-uridine
  modified_base 32: mod_base = OTHER; note = 2'-O-Methyl-adenosine
  modified_base 33: mod_base = OTHER; note = 2'-O-Methyl-guanosine
  modified_base 34: mod_base = OTHER; note = Nebularine - ribonebularine
  modified_base 35: mod_base = OTHER; note = 2'-O-Methyl-adenosine
  modified_base 36: mod_base = OTHER; note = 2'-O-Methyl-adenosine
  modified_base 37: mod_base = OTHER; note = 2'-O-Methyl-uridine
  modified_base 38: mod_base = OTHER; note = 2'-O-Methyl-adenosine
  modified_base 39: mod_base = OTHER; note = 2'-O-Methyl-guanosine
  modified_base 40: mod_base = OTHER; note = 2'-O-Methyl-cytidine
  modified_base 41: mod_base = OTHER; note = 2'-O-Methyl-adenosine
  modified_base 42: mod_base = OTHER; note = 2'-O-Methyl-adenosine
  modified_base 46: mod_base = OTHER; note = 2'-O-Methyl-adenosine
  modified_base 48: mod_base = OTHER; note = 2'-O-Methyl-adenosine
  modified_base 50: mod_base = OTHER; note = 2'-O-Methyl-uridine
  modified_base 52: mod_base = OTHER; note = 2'-O-Methyl-adenosine
  modified_base 53: mod_base = OTHER; note = 2'-O-Methyl-guanosine
  modified_base 54: mod_base = OTHER; note = 2'-O-Methyl-guanosine
  modified_base 55: mod_base = OTHER; note = 2'-O-Methyl-cytidine
  modified_base 56: mod_base = OTHER; note = 2'-O-Methyl-uridine
  modified_base 57: mod_base = OTHER; note = Nebularine - ribonebularine
  modified_base 60: mod_base = OTHER; note = 2'-O-Methyl-cytidine
  modified_base 61: mod_base = OTHER; note = 2'-O-Methyl-cytidine
  modified_base 65: mod_base = OTHER; note = Nebularine - ribonebularine
  modified_base 66: mod_base = OTHER; note = 2'-O-Methyl-uridine
  modified_base 67: mod_base = OTHER; note = 2'-O-Methyl-cytidine
  modified_base 70: mod_base = OTHER; note = 2'-O-Methyl-cytidine
  modified_base 71: mod_base = OTHER; note = 2'-O-Methyl-uridine
  modified_base 72: mod_base = OTHER; note = 2'-O-Methyl-uridine
  modified_base 73: mod_base = OTHER; note = 2'-O-Methyl-guanosine
  modified_base 74: mod_base = OTHER; note = 2'-O-Methyl-adenosine
  modified_base 75: mod_base = OTHER; note = 2'-O-Methyl-adenosine
  modified_base 76: mod_base = OTHER; note = 2'-O-Methyl-adenosine
  modified_base 77: mod_base = OTHER; note = 2'-O-Methyl-adenosine
  modified_base 78: mod_base = OTHER; note = 2'-O-Methyl-adenosine
  modified_base 79: mod_base = OTHER; note = 2'-O-Methyl-guanosine
  modified_base 80: mod_base = OTHER; note = 2'-O-Methyl-uridine
  modified_base 81: mod_base = OTHER; note = 2'-O-Methyl-guanosine
  modified_base 83: mod_base = OTHER; note = 2'-O-Methyl-cytidine
  modified_base 84: mod_base = OTHER; note = 2'-O-Methyl-adenosine
  modified_base 85: mod_base = OTHER; note = 2'-O-Methyl-cytidine
  modified_base 86: mod_base = OTHER; note = 2'-O-Methyl-cytidine
  modified_base 87: mod_base = OTHER; note = 2'-O-Methyl-guanosine
  modified_base 88: mod_base = OTHER; note = 2'-O-Methyl-adenosine
  modified_base 89: mod_base = OTHER; note = 2'-O-Methyl-guanosine
  modified_base 90: mod_base = OTHER; note = 2'-O-Methyl-uridine
  modified_base 91: mod_base = OTHER; note = 2'-O-Methyl-cytidine
  modified_base 92: mod_base = OTHER; note = 2'-O-Methyl-guanosine
  modified_base 93: mod_base = OTHER; note = 2'-O-Methyl-guanosine
  modified_base 94: mod_base = OTHER; note = 2'-O-Methyl-uridine
  modified_base 95: mod_base = OTHER; note = 2'-O-Methyl-guanosine
  modified_base 96: mod_base = OTHER; note = 2'-O-Methyl-cytidine
  modified_base 97: mod_base = OTHER; note = 2'-O-Methyl-uridine phosphorothioate
  modified_base 98: mod_base = OTHER; note = 2'-O-Methyl-uridine phosphorothioate
  modified_base 99: mod_base = OTHER; note = 2'-O-Methyl-uridine phosphorothioate
  modified_base 100: mod_base = OTHER; note = 2'-O-Methyl-uridine

SEQ ID NO: 1958 - RNA, 100 nt, synthetic construct; identical to SEQ ID NO: 1904
  source 1..100: mol_type = other RNA; note = Description of Artificial Sequence: Synthetic polynucleotide
  modified_base 1: mod_base = OTHER; note = 2'-O-Methyl-cytidine phosphorothioate
  modified_base 2: mod_base = OTHER; note = 2'-O-Methyl-adenosine phosphorothioate
  modified_base 3: mod_base = OTHER; note = 2'-O-Methyl-guanosine
  modified_base 21: mod_base = OTHER; note = 2'-O-Methyl-guanosine
  modified_base 28: mod_base = OTHER; note = Nebularine - ribonebularine
  modified_base 29: mod_base = OTHER; note = 2'-O-Methyl-guanosine
  modified_base 30: mod_base = OTHER; note = 2'-O-Methyl-cytidine
  modified_base 31: mod_base = OTHER; note = 2'-O-Methyl-uridine
  modified_base 32: mod_base = OTHER; note = 2'-O-Methyl-adenosine
  modified_base 33: mod_base = OTHER; note = 2'-O-Methyl-guanosine
  modified_base 34: mod_base = OTHER; note = Nebularine - ribonebularine
  modified_base 35: mod_base = OTHER; note = 2'-O-Methyl-adenosine
  modified_base 36: mod_base = OTHER; note = 2'-O-Methyl-adenosine
  modified_base 37: mod_base = OTHER; note = 2'-O-Methyl-uridine
  modified_base 38: mod_base = OTHER; note = 2'-O-Methyl-adenosine
  modified_base 39: mod_base = OTHER; note = 2'-O-Methyl-guanosine
  modified_base 40: mod_base = OTHER; note = 2'-O-Methyl-cytidine
  modified_base 41: mod_base = OTHER; note = 2'-O-Methyl-adenosine
  modified_base 42: mod_base = OTHER; note = Nebularine - ribonebularine
  modified_base 46: mod_base = OTHER; note = 2'-O-Methyl-adenosine
  modified_base 48: mod_base = OTHER; note = 2'-O-Methyl-adenosine
  modified_base 50: mod_base = OTHER; note = 2'-O-Methyl-uridine
  modified_base 52: mod_base = OTHER; note = 2'-O-Methyl-adenosine
  modified_base 53: mod_base = OTHER; note = 2'-O-Methyl-guanosine
  modified_base 54: mod_base = OTHER; note = 2'-O-Methyl-guanosine
  modified_base 55: mod_base = OTHER; note = 2'-O-Methyl-cytidine
  modified_base 56: mod_base = OTHER; note = 2'-O-Methyl-uridine
  modified_base 57: mod_base = OTHER; note = Nebularine - ribonebularine
  modified_base 60: mod_base = OTHER; note = 2'-O-Methyl-cytidine
  modified_base 61: mod_base = OTHER; note = 2'-O-Methyl-cytidine
  modified_base 65: mod_base = OTHER; note = Nebularine - ribonebularine
  modified_base 66: mod_base = OTHER; note = 2'-O-Methyl-uridine
  modified_base 67: mod_base = OTHER; note = 2'-O-Methyl-cytidine
  modified_base 70: mod_base = OTHER; note = 2'-O-Methyl-cytidine
  modified_base 71: mod_base = OTHER; note = 2'-O-Methyl-uridine
  modified_base 72: mod_base = OTHER; note = 2'-O-Methyl-uridine
  modified_base 73: mod_base = OTHER; note = 2'-O-Methyl-guanosine
  modified_base 74: mod_base = OTHER; note = 2'-O-Methyl-adenosine
  modified_base 75: mod_base = OTHER; note = 2'-O-Methyl-adenosine
  modified_base 76: mod_base = OTHER; note = 2'-O-Methyl-adenosine
  modified_base 77: mod_base = OTHER; note = 2'-O-Methyl-adenosine
  modified_base 78: mod_base = OTHER; note = 2'-O-Methyl-adenosine
  modified_base 79: mod_base = OTHER; note = 2'-O-Methyl-guanosine
  modified_base 80: mod_base = OTHER; note = 2'-O-Methyl-uridine
  modified_base 81: mod_base = OTHER; note = 2'-O-Methyl-guanosine
  modified_base 83: mod_base = OTHER; note = 2'-O-Methyl-cytidine
  modified_base 84: mod_base = OTHER; note = 2'-O-Methyl-adenosine
  modified_base 85: mod_base = OTHER; note = 2'-O-Methyl-cytidine
  modified_base 86: mod_base = OTHER; note = 2'-O-Methyl-cytidine
  modified_base 87: mod_base = OTHER; note = 2'-O-Methyl-guanosine
  modified_base 88: mod_base = OTHER; note = 2'-O-Methyl-adenosine
  modified_base 89: mod_base = OTHER; note = 2'-O-Methyl-guanosine
  modified_base 90: mod_base = OTHER; note = 2'-O-Methyl-uridine
  modified_base 91: mod_base = OTHER; note = 2'-O-Methyl-cytidine
  modified_base 92: mod_base = OTHER; note = 2'-O-Methyl-guanosine
  modified_base 93: mod_base = OTHER; note = 2'-O-Methyl-guanosine
  modified_base 94: mod_base = OTHER; note = 2'-O-Methyl-uridine
  modified_base 95: mod_base = OTHER; note = 2'-O-Methyl-guanosine
  modified_base 96: mod_base = OTHER; note = 2'-O-Methyl-cytidine
  modified_base 97: mod_base = OTHER; note = 2'-O-Methyl-uridine phosphorothioate
  modified_base 98: mod_base = OTHER; note = 2'-O-Methyl-uridine phosphorothioate
  modified_base 99: mod_base = OTHER; note = 2'-O-Methyl-uridine phosphorothioate
  modified_base 100: mod_base = OTHER; note = 2'-O-Methyl-uridine

SEQ ID NO: 1959 - RNA, 100 nt, synthetic construct; identical to SEQ ID NO: 1905
  source 1..100: mol_type = other RNA; note = Description of Artificial Sequence: Synthetic polynucleotide
  modified_base 1: mod_base = OTHER; note = 2'-O-Methyl-cytidine phosphorothioate
  modified_base 2: mod_base = OTHER; note = 2'-O-Methyl-adenosine phosphorothioate
  modified_base 3: mod_base = OTHER; note = 2'-O-Methyl-guanosine
  modified_base 9: mod_base = OTHER; note = Nebularine - ribonebularine
  modified_base 14: mod_base = OTHER; note = Nebularine - ribonebularine
  modified_base 21: mod_base = OTHER; note = 2'-O-Methyl-guanosine
  modified_base 28: mod_base = OTHER; note = 2'-O-Methyl-adenosine
  modified_base 29: mod_base = OTHER; note = 2'-O-Methyl-guanosine
  modified_base 30: mod_base = OTHER; note = 2'-O-Methyl-cytidine
  modified_base 31: mod_base = OTHER; note = 2'-O-Methyl-uridine
  modified_base 32: mod_base = OTHER; note = 2'-O-Methyl-adenosine
  modified_base 33: mod_base = OTHER; note = 2'-O-Methyl-guanosine
  modified_base 34: mod_base = OTHER; note = Nebularine - ribonebularine
  modified_base 35: mod_base = OTHER; note = 2'-O-Methyl-adenosine
  modified_base 36: mod_base = OTHER; note = 2'-O-Methyl-adenosine
  modified_base 37: mod_base = OTHER; note = 2'-O-Methyl-uridine
  modified_base 38: mod_base = OTHER; note = 2'-O-Methyl-adenosine
  modified_base 39: mod_base = OTHER; note = 2'-O-Methyl-guanosine
  modified_base 40: mod_base = OTHER; note = 2'-O-Methyl-cytidine
  modified_base 41: mod_base = OTHER; note = 2'-O-Methyl-adenosine
  modified_base 42: mod_base = OTHER; note = 2'-O-Methyl-adenosine
  modified_base 46: mod_base = OTHER; note = 2'-O-Methyl-adenosine
  modified_base 48: mod_base = OTHER; note = 2'-O-Methyl-adenosine
  modified_base 50: mod_base = OTHER; note = 2'-O-Methyl-uridine
  modified_base 52: mod_base = OTHER; note = 2'-O-Methyl-adenosine
  modified_base 53: mod_base = OTHER; note = 2'-O-Methyl-guanosine
  modified_base 54: mod_base = OTHER; note = 2'-O-Methyl-guanosine
  modified_base 55: mod_base = OTHER; note = 2'-O-Methyl-cytidine
  modified_base 56: mod_base = OTHER; note = 2'-O-Methyl-uridine
  modified_base 57: mod_base = OTHER; note = 2'-O-Methyl-adenosine
  modified_base 60: mod_base = OTHER; note = 2'-O-Methyl-cytidine
  modified_base 61: mod_base = OTHER; note = 2'-O-Methyl-cytidine
  modified_base 66: mod_base = OTHER; note = 2'-O-Methyl-uridine
  modified_base 67: mod_base = OTHER; note = 2'-O-Methyl-cytidine
  modified_base 70: mod_base = OTHER; note = 2'-O-Methyl-cytidine
  modified_base 71: mod_base = OTHER; note = 2'-O-Methyl-uridine
  modified_base 72: mod_base = OTHER; note = 2'-O-Methyl-uridine
  modified_base 73: mod_base = OTHER; note = 2'-O-Methyl-guanosine
  modified_base 74: mod_base = OTHER; note = 2'-O-Methyl-adenosine
  modified_base 75: mod_base = OTHER; note = 2'-O-Methyl-adenosine
  modified_base 76: mod_base = OTHER; note = 2'-O-Methyl-adenosine
  modified_base 77: mod_base = OTHER; note = 2'-O-Methyl-adenosine
  modified_base 78: mod_base = OTHER; note = 2'-O-Methyl-adenosine
  modified_base 79: mod_base = OTHER; note = 2'-O-Methyl-guanosine
  modified_base 80: mod_base = OTHER; note = 2'-O-Methyl-uridine
  modified_base 81: mod_base = OTHER; note = 2'-O-Methyl-guanosine
  modified_base 83: mod_base = OTHER; note = 2'-O-Methyl-cytidine
  modified_base 84: mod_base = OTHER; note = 2'-O-Methyl-adenosine
  modified_base 85: mod_base = OTHER; note = 2'-O-Methyl-cytidine
  modified_base 86: mod_base = OTHER; note = 2'-O-Methyl-cytidine
  modified_base 87: mod_base = OTHER; note = 2'-O-Methyl-guanosine
  modified_base 88: mod_base = OTHER; note = 2'-O-Methyl-adenosine
  modified_base 89: mod_base = OTHER; note = 2'-O-Methyl-guanosine
  modified_base 90: mod_base = OTHER; note = 2'-O-Methyl-uridine
  modified_base 91: mod_base = OTHER; note = 2'-O-Methyl-cytidine
  modified_base 92: mod_base = OTHER; note = 2'-O-Methyl-guanosine
  modified_base 93: mod_base = OTHER; note = 2'-O-Methyl-guanosine
  modified_base 94: mod_base = OTHER; note = 2'-O-Methyl-uridine
  modified_base 95: mod_base = OTHER; note = 2'-O-Methyl-guanosine
  modified_base 96: mod_base = OTHER; note = 2'-O-Methyl-cytidine
  modified_base 97: mod_base = OTHER; note = 2'-O-Methyl-uridine phosphorothioate
  modified_base 98: mod_base = OTHER; note = 2'-O-Methyl-uridine phosphorothioate
  modified_base 99: mod_base = OTHER; note = 2'-O-Methyl-uridine phosphorothioate
  modified_base 100: mod_base = OTHER; note = 2'-O-Methyl-uridine

SEQ ID NO: 1960 - RNA, 100 nt, synthetic construct; identical to SEQ ID NO: 1906
  source 1..100: mol_type = other RNA; note = Description of Artificial Sequence: Synthetic polynucleotide
  modified_base 1: mod_base = OTHER; note = 2'-O-Methyl-cytidine phosphorothioate
  modified_base 2: mod_base = OTHER; note = 2'-O-Methyl-adenosine phosphorothioate
  modified_base 3: mod_base = OTHER; note = 2'-O-Methyl-guanosine
  modified_base 9: mod_base = OTHER; note = Nebularine - ribonebularine
  modified_base 14: mod_base = OTHER; note = Nebularine - ribonebularine
  modified_base 21: mod_base = OTHER; note = 2'-O-Methyl-guanosine
  modified_base 28: mod_base = OTHER; note = 2'-O-Methyl-adenosine
  modified_base 29: mod_base = OTHER; note = 2'-O-Methyl-guanosine
  modified_base 30: mod_base = OTHER; note = 2'-O-Methyl-cytidine
  modified_base 31: mod_base = OTHER; note = 2'-O-Methyl-uridine
  modified_base 32: mod_base = OTHER; note = 2'-O-Methyl-adenosine
  modified_base 33: mod_base = OTHER; note = 2'-O-Methyl-guanosine
  modified_base 34: mod_base = OTHER; note = Nebularine - ribonebularine
  modified_base 35: mod_base = OTHER; note = 2'-O-Methyl-adenosine
  modified_base 36: mod_base = OTHER; note = 2'-O-Methyl-adenosine
  modified_base 37: mod_base = OTHER; note = 2'-O-Methyl-uridine
  modified_base 38: mod_base = OTHER; note = 2'-O-Methyl-adenosine
  modified_base 39: mod_base = OTHER; note = 2'-O-Methyl-guanosine
  modified_base 40: mod_base = OTHER; note = 2'-O-Methyl-cytidine
  modified_base 41: mod_base = OTHER; note = 2'-O-Methyl-adenosine
  modified_base 42: mod_base = OTHER; note = 2'-O-Methyl-adenosine
  modified_base 46: mod_base = OTHER; note = 2'-O-Methyl-adenosine
  modified_base 48: mod_base = OTHER; note = 2'-O-Methyl-adenosine
  modified_base 50: mod_base = OTHER; note = 2'-O-Methyl-uridine
  modified_base 52: mod_base = OTHER; note = 2'-O-Methyl-adenosine
  modified_base 53: mod_base = OTHER; note = 2'-O-Methyl-guanosine
  modified_base 54: mod_base = OTHER; note = 2'-O-Methyl-guanosine
  modified_base 55: mod_base = OTHER; note = 2'-O-Methyl-cytidine
  modified_base 56: mod_base = OTHER; note = 2'-O-Methyl-uridine
  modified_base 57: mod_base = OTHER; note = Nebularine - ribonebularine
  modified_base 60: mod_base = OTHER; note = 2'-O-Methyl-cytidine
  modified_base 61: mod_base = OTHER; note = 2'-O-Methyl-cytidine
  modified_base 66: mod_base = OTHER; note = 2'-O-Methyl-uridine
  modified_base 67: mod_base = OTHER; note = 2'-O-Methyl-cytidine
  modified_base 70: mod_base = OTHER; note = 2'-O-Methyl-cytidine
  modified_base 71: mod_base = OTHER; note = 2'-O-Methyl-uridine
  modified_base 72: mod_base = OTHER; note = 2'-O-Methyl-uridine
  modified_base 73: mod_base = OTHER; note = 2'-O-Methyl-guanosine
  modified_base 74: mod_base = OTHER; note = 2'-O-Methyl-adenosine
  modified_base 75: mod_base = OTHER; note = 2'-O-Methyl-adenosine
  modified_base 76: mod_base = OTHER; note = 2'-O-Methyl-adenosine
  modified_base 77: mod_base = OTHER; note = 2'-O-Methyl-adenosine
  modified_base 78: mod_base = OTHER; note = 2'-O-Methyl-adenosine
  modified_base 79: mod_base = OTHER; note = 2'-O-Methyl-guanosine
  modified_base 80: mod_base = OTHER; note = 2'-O-Methyl-uridine
  modified_base 81: mod_base = OTHER; note = 2'-O-Methyl-guanosine
  modified_base 83: mod_base = OTHER; note = 2'-O-Methyl-cytidine
  modified_base 84: mod_base = OTHER; note = 2'-O-Methyl-adenosine
  modified_base 85: mod_base = OTHER; note = 2'-O-Methyl-cytidine
  modified_base 86: mod_base = OTHER; note = 2'-O-Methyl-cytidine
  modified_base 87: mod_base = OTHER; note = 2'-O-Methyl-guanosine
  modified_base 88: mod_base = OTHER; note = 2'-O-Methyl-adenosine
  modified_base 89: mod_base = OTHER; note = 2'-O-Methyl-guanosine
  modified_base 90: mod_base = OTHER; note = 2'-O-Methyl-uridine
  modified_base 91: mod_base = OTHER; note = 2'-O-Methyl-cytidine
  modified_base 92: mod_base = OTHER; note = 2'-O-Methyl-guanosine
  modified_base 93: mod_base = OTHER; note = 2'-O-Methyl-guanosine
  modified_base 94: mod_base = OTHER; note = 2'-O-Methyl-uridine
  modified_base 95: mod_base = OTHER; note = 2'-O-Methyl-guanosine
  modified_base 96: mod_base = OTHER; note = 2'-O-Methyl-cytidine
  modified_base 97: mod_base = OTHER; note = 2'-O-Methyl-uridine phosphorothioate
  modified_base 98: mod_base = OTHER; note = 2'-O-Methyl-uridine phosphorothioate
  modified_base 99: mod_base = OTHER; note = 2'-O-Methyl-uridine phosphorothioate
  modified_base 100: mod_base = OTHER; note = 2'-O-Methyl-uridine

SEQ ID NO: 1961 - RNA, 100 nt, synthetic construct; identical to SEQ ID NO: 1907
  source 1..100: mol_type = other RNA; note = Description of Artificial Sequence: Synthetic polynucleotide
  modified_base 1: mod_base = OTHER; note = 2'-O-Methyl-cytidine phosphorothioate
  modified_base 2: mod_base = OTHER; note = 2'-O-Methyl-adenosine phosphorothioate
  modified_base 3: mod_base = OTHER; note = 2'-O-Methyl-guanosine
  modified_base 9: mod_base = OTHER; note = Nebularine - ribonebularine
  modified_base 14: mod_base = OTHER; note = Nebularine - ribonebularine
  modified_base 21: mod_base = OTHER; note = 2'-O-Methyl-guanosine
  modified_base 28: mod_base = OTHER; note = 2'-O-Methyl-adenosine
  modified_base 29: mod_base = OTHER; note = 2'-O-Methyl-guanosine
  modified_base 30: mod_base = OTHER; note = 2'-O-Methyl-cytidine
  modified_base 31: mod_base = OTHER; note = 2'-O-Methyl-uridine
  modified_base 32: mod_base = OTHER; note = 2'-O-Methyl-adenosine
  modified_base 33: mod_base = OTHER; note = 2'-O-Methyl-guanosine
  modified_base 34: mod_base = OTHER; note = 2'-O-Methyl-adenosine
  modified_base 35: mod_base = OTHER; note = 2'-O-Methyl-adenosine
  modified_base 36: mod_base = OTHER; note = 2'-O-Methyl-adenosine
  modified_base 37: mod_base = OTHER; note = 2'-O-Methyl-uridine
  modified_base 38: mod_base = OTHER; note = 2'-O-Methyl-adenosine
  modified_base 39: mod_base = OTHER; note = 2'-O-Methyl-guanosine
  modified_base 40: mod_base = OTHER; note = 2'-O-Methyl-cytidine
  modified_base 41: mod_base = OTHER; note = 2'-O-Methyl-adenosine
  modified_base 42: mod_base = OTHER; note = 2'-O-Methyl-adenosine
  modified_base 46: mod_base = OTHER; note = 2'-O-Methyl-adenosine
  modified_base 48: mod_base = OTHER; note = 2'-O-Methyl-adenosine
  modified_base 50: mod_base = OTHER; note = 2'-O-Methyl-uridine
  modified_base 52: mod_base = OTHER; note = 2'-O-Methyl-adenosine
  modified_base 53: mod_base = OTHER; note = 2'-O-Methyl-guanosine
  modified_base 54: mod_base = OTHER; note = 2'-O-Methyl-guanosine
  modified_base 55: mod_base = OTHER; note = 2'-O-Methyl-cytidine
  modified_base 56: mod_base = OTHER; note = 2'-O-Methyl-uridine
  modified_base 57: mod_base = OTHER; note = 2'-O-Methyl-adenosine
  modified_base 60: mod_base = OTHER; note = 2'-O-Methyl-cytidine
  modified_base 61: mod_base = OTHER; note = 2'-O-Methyl-cytidine
  modified_base 65: mod_base = OTHER; note = Nebularine - ribonebularine
  modified_base 66: mod_base = OTHER; note = 2'-O-Methyl-uridine
  modified_base 67: mod_base = OTHER; note = 2'-O-Methyl-cytidine
  modified_base 70: mod_base = OTHER; note = 2'-O-Methyl-cytidine
  modified_base 71: mod_base = OTHER; note = 2'-O-Methyl-uridine
  modified_base 72: mod_base = OTHER; note = 2'-O-Methyl-uridine
  modified_base 73: mod_base = OTHER; note = 2'-O-Methyl-guanosine
  modified_base 74: mod_base = OTHER; note = 2'-O-Methyl-adenosine
  modified_base 75: mod_base = OTHER; note = 2'-O-Methyl-adenosine
  modified_base 76: mod_base = OTHER; note = 2'-O-Methyl-adenosine
  modified_base 77: mod_base = OTHER; note = 2'-O-Methyl-adenosine
  modified_base 78: mod_base = OTHER; note = 2'-O-Methyl-adenosine
  modified_base 79: mod_base = OTHER; note = 2'-O-Methyl-guanosine
  modified_base 80: mod_base = OTHER; note = 2'-O-Methyl-uridine
  modified_base 81: mod_base = OTHER; note = 2'-O-Methyl-guanosine
  modified_base 83: mod_base = OTHER; note = 2'-O-Methyl-cytidine
  modified_base 84: mod_base = OTHER; note = 2'-O-Methyl-adenosine
  modified_base 85: mod_base = OTHER; note = 2'-O-Methyl-cytidine
  modified_base 86: mod_base = OTHER; note = 2'-O-Methyl-cytidine
  modified_base 87: mod_base = OTHER; note = 2'-O-Methyl-guanosine
  modified_base 88: mod_base = OTHER; note = 2'-O-Methyl-adenosine
  modified_base 89: mod_base = OTHER; note = 2'-O-Methyl-guanosine
  modified_base 90: mod_base = OTHER; note = 2'-O-Methyl-uridine
  modified_base 91: mod_base = OTHER; note = 2'-O-Methyl-cytidine
  modified_base 92: mod_base = OTHER; note = 2'-O-Methyl-guanosine
  modified_base 93: mod_base = OTHER; note = 2'-O-Methyl-guanosine
  modified_base 94: mod_base = OTHER; note = 2'-O-Methyl-uridine
  modified_base 95: mod_base = OTHER; note = 2'-O-Methyl-guanosine
  modified_base 96: mod_base = OTHER; note = 2'-O-Methyl-cytidine
  modified_base 97: mod_base = OTHER; note = 2'-O-Methyl-uridine phosphorothioate
  modified_base 98: mod_base = OTHER; note = 2'-O-Methyl-uridine phosphorothioate
  modified_base 99: mod_base = OTHER; note = 2'-O-Methyl-uridine phosphorothioate
  modified_base 100: mod_base = OTHER; note = 2'-O-Methyl-uridine

SEQ ID NO: 1962 - RNA, 100 nt, synthetic construct; identical to SEQ ID NO: 1908
  source 1..100: mol_type = other RNA; note = Description of Artificial Sequence: Synthetic polynucleotide
  modified_base 1: mod_base = OTHER; note = 2'-O-Methyl-cytidine phosphorothioate
  modified_base 2: mod_base = OTHER; note = 2'-O-Methyl-adenosine phosphorothioate
  modified_base 3: mod_base = OTHER; note = 2'-O-Methyl-guanosine
  modified_base 9: mod_base = OTHER; note = Nebularine - ribonebularine
  modified_base 14: mod_base = OTHER; note = Nebularine - ribonebularine
  modified_base 21: mod_base = OTHER; note = 2'-O-Methyl-guanosine
  modified_base 28: mod_base = OTHER; note = 2'-O-Methyl-adenosine
  modified_base 29: mod_base = OTHER; note = 2'-O-Methyl-guanosine
  modified_base 30: mod_base = OTHER; note = 2'-O-Methyl-cytidine
  modified_base 31: mod_base = OTHER; note = 2'-O-Methyl-uridine
  modified_base 32: mod_base = OTHER; note = 2'-O-Methyl-adenosine
  modified_base 33: mod_base = OTHER; note = 2'-O-Methyl-guanosine
  modified_base 34: mod_base = OTHER; note = Nebularine - ribonebularine
  modified_base 35: mod_base = OTHER; note = 2'-O-Methyl-adenosine
  modified_base 36: mod_base = OTHER; note = 2'-O-Methyl-adenosine
  modified_base 37: mod_base = OTHER; note = 2'-O-Methyl-uridine
  modified_base 38: mod_base = OTHER; note = 2'-O-Methyl-adenosine
  modified_base 39: mod_base = OTHER; note = 2'-O-Methyl-guanosine
  modified_base 40: mod_base = OTHER; note = 2'-O-Methyl-cytidine
  modified_base 41: mod_base = OTHER; note = 2'-O-Methyl-adenosine
  modified_base 42: mod_base = OTHER; note = 2'-O-Methyl-adenosine
  modified_base 46: mod_base = OTHER; note = 2'-O-Methyl-adenosine
  modified_base 48: mod_base = OTHER; note = 2'-O-Methyl-adenosine
  modified_base 50: mod_base = OTHER; note = 2'-O-Methyl-uridine
  modified_base 52: mod_base = OTHER; note = 2'-O-Methyl-adenosine
  modified_base 53: mod_base = OTHER; note = 2'-O-Methyl-guanosine
  modified_base 54: mod_base = OTHER; note = 2'-O-Methyl-guanosine
  modified_base 55: mod_base = OTHER; note = 2'-O-Methyl-cytidine
  modified_base 56: mod_base = OTHER; note = 2'-O-Methyl-uridine
  modified_base 57: mod_base = OTHER; note = Nebularine - ribonebularine
  modified_base 60: mod_base = OTHER; note = 2'-O-Methyl-cytidine
  modified_base 61: mod_base = OTHER; note = 2'-O-Methyl-cytidine
  modified_base 65: mod_base = OTHER; note = Nebularine - ribonebularine
  modified_base 66: mod_base = OTHER; note = 2'-O-Methyl-uridine
  modified_base 67: mod_base = OTHER; note = 2'-O-Methyl-cytidine
  modified_base 70: mod_base = OTHER; note = 2'-O-Methyl-cytidine
  modified_base 71: mod_base = OTHER; note = 2'-O-Methyl-uridine
  modified_base 72: mod_base = OTHER; note = 2'-O-Methyl-uridine
  modified_base 73: mod_base = OTHER; note = 2'-O-Methyl-guanosine
  modified_base 74: mod_base = OTHER; note = 2'-O-Methyl-adenosine
  modified_base 75: mod_base = OTHER; note = 2'-O-Methyl-adenosine
  modified_base 76: mod_base = OTHER; note = 2'-O-Methyl-adenosine
  modified_base 77: mod_base = OTHER; note = 2'-O-Methyl-adenosine
  modified_base 78: mod_base = OTHER; note = 2'-O-Methyl-adenosine
  modified_base 79: mod_base = OTHER; note = 2'-O-Methyl-guanosine
  modified_base 80: mod_base = OTHER; note = 2'-O-Methyl-uridine
  modified_base 81: mod_base = OTHER; note = 2'-O-Methyl-guanosine
  modified_base 83: mod_base = OTHER; note = 2'-O-Methyl-cytidine
  modified_base 84: mod_base = OTHER; note = 2'-O-Methyl-adenosine
  modified_base 85: mod_base = OTHER; note = 2'-O-Methyl-cytidine
  modified_base 86: mod_base = OTHER; note = 2'-O-Methyl-cytidine
  modified_base 87: mod_base = OTHER; note = 2'-O-Methyl-guanosine
  modified_base 88: mod_base = OTHER; note = 2'-O-Methyl-adenosine
  modified_base 89: mod_base = OTHER; note = 2'-O-Methyl-guanosine
  modified_base 90: mod_base = OTHER; note = 2'-O-Methyl-uridine
  modified_base 91: mod_base = OTHER; note = 2'-O-Methyl-cytidine
  modified_base 92: mod_base = OTHER; note = 2'-O-Methyl-guanosine
  modified_base 93: mod_base = OTHER; note = 2'-O-Methyl-guanosine
  modified_base 94: mod_base = OTHER; note = 2'-O-Methyl-uridine
  modified_base 95: mod_base = OTHER; note = 2'-O-Methyl-guanosine
  modified_base 96: mod_base = OTHER; note = 2'-O-Methyl-cytidine
  modified_base 97: mod_base = OTHER; note = 2'-O-Methyl-uridine phosphorothioate
  modified_base 98: mod_base = OTHER; note = 2'-O-Methyl-uridine phosphorothioate
  modified_base 99: mod_base = OTHER; note = 2'-O-Methyl-uridine phosphorothioate
  modified_base 100: mod_base = OTHER; note = 2'-O-Methyl-uridine

SEQ ID NO: 1963 - RNA, 100 nt, synthetic construct; identical to SEQ ID NO: 1909
  source 1..100: mol_type = other RNA; note = Description of Artificial Sequence: Synthetic polynucleotide
  modified_base 1: mod_base = OTHER; note = 2'-O-Methyl-cytidine phosphorothioate
  modified_base 2: mod_base = OTHER; note = 2'-O-Methyl-adenosine phosphorothioate
  modified_base 3: mod_base = OTHER; note = 2'-O-Methyl-guanosine
  modified_base 9: mod_base = OTHER; note = Nebularine - ribonebularine
  modified_base 14: mod_base = OTHER; note = Nebularine - ribonebularine
  modified_base 21: mod_base = OTHER; note = 2'-O-Methyl-guanosine
  modified_base 28: mod_base = OTHER; note = Nebularine - ribonebularine
  modified_base 29: mod_base = OTHER; note = 2'-O-Methyl-guanosine
  modified_base 30: mod_base = OTHER; note = 2'-O-Methyl-cytidine
  modified_base 31: mod_base = OTHER; note = 2'-O-Methyl-uridine
  modified_base 32: mod_base = OTHER; note = 2'-O-Methyl-adenosine
  modified_base 33: mod_base = OTHER; note = 2'-O-Methyl-guanosine
  modified_base 34: mod_base = OTHER; note = Nebularine - ribonebularine
  modified_base 35: mod_base = OTHER; note = 2'-O-Methyl-adenosine
  modified_base 36: mod_base = OTHER; note = 2'-O-Methyl-adenosine
  modified_base 37: mod_base = OTHER; note = 2'-O-Methyl-uridine
  modified_base 38: mod_base = OTHER; note = 2'-O-Methyl-adenosine
  modified_base 39: mod_base = OTHER; note = 2'-O-Methyl-guanosine
  modified_base 40: mod_base = OTHER; note = 2'-O-Methyl-cytidine
  modified_base 41: mod_base = OTHER; note = 2'-O-Methyl-adenosine
  modified_base 42: mod_base = OTHER; note = Nebularine - ribonebularine
  modified_base 46: mod_base = OTHER; note = 2'-O-Methyl-adenosine
  modified_base 48: mod_base = OTHER; note = 2'-O-Methyl-adenosine
  modified_base 50: mod_base = OTHER; note = 2'-O-Methyl-uridine
  modified_base 52: mod_base = OTHER; note = 2'-O-Methyl-adenosine
  modified_base 53: mod_base = OTHER; note = 2'-O-Methyl-guanosine
  modified_base 54: mod_base = OTHER; note = 2'-O-Methyl-guanosine
  modified_base 55: mod_base = OTHER; note = 2'-O-Methyl-cytidine
  modified_base 56: mod_base = OTHER; note = 2'-O-Methyl-uridine
  modified_base 57: mod_base = OTHER; note = Nebularine - ribonebularine
  modified_base 60: mod_base = OTHER; note = 2'-O-Methyl-cytidine
  modified_base 61: mod_base = OTHER; note = 2'-O-Methyl-cytidine
  modified_base 65: mod_base = OTHER; note = Nebularine - ribonebularine
  modified_base 66: mod_base = OTHER; note = 2'-O-Methyl-uridine
  modified_base 67: mod_base = OTHER; note = 2'-O-Methyl-cytidine
  modified_base 70: mod_base = OTHER; note = 2'-O-Methyl-cytidine
  modified_base 71: mod_base = OTHER; note = 2'-O-Methyl-uridine
  modified_base 72: mod_base = OTHER; note = 2'-O-Methyl-uridine
  modified_base 73: mod_base = OTHER; note = 2'-O-Methyl-guanosine
  modified_base 74: mod_base = OTHER; note = 2'-O-Methyl-adenosine
  modified_base 75: mod_base = OTHER; note = 2'-O-Methyl-adenosine
  modified_base 76: mod_base = OTHER; note = 2'-O-Methyl-adenosine
  modified_base 77: mod_base = OTHER; note = 2'-O-Methyl-adenosine
  modified_base 78: mod_base = OTHER; note = 2'-O-Methyl-adenosine
  modified_base 79: mod_base = OTHER; note = 2'-O-Methyl-guanosine
  modified_base 80: mod_base = OTHER; note = 2'-O-Methyl-uridine
  modified_base 81: mod_base = OTHER; note = 2'-O-Methyl-guanosine
  modified_base 83: mod_base = OTHER; note = 2'-O-Methyl-cytidine
  modified_base 84: mod_base = OTHER; note = 2'-O-Methyl-adenosine
  modified_base 85: mod_base = OTHER; note = 2'-O-Methyl-cytidine
  modified_base 86: mod_base = OTHER; note = 2'-O-Methyl-cytidine
  modified_base 87: mod_base = OTHER; note = 2'-O-Methyl-guanosine
  modified_base 88: mod_base = OTHER; note = 2'-O-Methyl-adenosine
  modified_base 89: mod_base = OTHER; note = 2'-O-Methyl-guanosine
  modified_base 90: mod_base = OTHER; note = 2'-O-Methyl-uridine
  modified_base 91: mod_base = OTHER; note = 2'-O-Methyl-cytidine
  modified_base 92: mod_base = OTHER; note = 2'-O-Methyl-guanosine
  modified_base 93: mod_base = OTHER; note = 2'-O-Methyl-guanosine
  modified_base 94: mod_base = OTHER; note = 2'-O-Methyl-uridine
  modified_base 95: mod_base = OTHER; note = 2'-O-Methyl-guanosine
  modified_base 96: mod_base = OTHER; note = 2'-O-Methyl-cytidine
  modified_base 97: mod_base = OTHER; note = 2'-O-Methyl-uridine phosphorothioate
  modified_base 98: mod_base = OTHER; note = 2'-O-Methyl-uridine phosphorothioate
  modified_base 99: mod_base = OTHER; note = 2'-O-Methyl-uridine phosphorothioate
  modified_base 100: mod_base = OTHER; note = 2'-O-Methyl-uridine

SEQ ID NO: 1964 - RNA, 100 nt, synthetic construct; identical to SEQ ID NO: 1910
  source 1..100: mol_type = other RNA; note = Description of Artificial Sequence: Synthetic polynucleotide
  modified_base 1: mod_base = OTHER; note = 2'-O-Methyl-cytidine phosphorothioate
  modified_base 2: mod_base = OTHER; note = 2'-O-Methyl-adenosine phosphorothioate
  modified_base 3: mod_base = OTHER; note = 2'-O-Methyl-guanosine
  modified_base 9: mod_base = OTHER; note = Nebularine - ribonebularine
  modified_base 21: mod_base = OTHER; note = 2'-O-Methyl-guanosine
  modified_base 28: mod_base = OTHER; note = 2'-O-Methyl-adenosine
  modified_base 29: mod_base = OTHER; note = 2'-O-Methyl-guanosine
  modified_base 30: mod_base = OTHER; note = 2'-O-Methyl-cytidine
  modified_base 31: mod_base = OTHER; note = 2'-O-Methyl-uridine
  modified_base 32: mod_base = OTHER; note = 2'-O-Methyl-adenosine
  modified_base 33: mod_base = OTHER; note = 2'-O-Methyl-guanosine
  modified_base 34: mod_base = OTHER; note = Nebularine - ribonebularine
  modified_base 35: mod_base = OTHER; note = 2'-O-Methyl-adenosine
  modified_base 36: mod_base = OTHER; note = 2'-O-Methyl-adenosine
  modified_base 37: mod_base = OTHER; note = 2'-O-Methyl-uridine
  modified_base 38: mod_base = OTHER; note = 2'-O-Methyl-adenosine
  modified_base 39: mod_base = OTHER; note = 2'-O-Methyl-guanosine
  modified_base 40: mod_base = OTHER; note = 2'-O-Methyl-cytidine
  modified_base 41: mod_base = OTHER; note = 2'-O-Methyl-adenosine
  modified_base 42: mod_base = OTHER; note = 2'-O-Methyl-adenosine
  modified_base 46: mod_base = OTHER; note = 2'-O-Methyl-adenosine
  modified_base 48: mod_base = OTHER; note = 2'-O-Methyl-adenosine
  modified_base 50: mod_base = OTHER; note = 2'-O-Methyl-uridine
  modified_base 52: mod_base = OTHER; note = 2'-O-Methyl-adenosine
  modified_base 53: mod_base = OTHER; note = 2'-O-Methyl-guanosine
  modified_base 54: mod_base = OTHER; note = 2'-O-Methyl-guanosine
  modified_base 55: mod_base = OTHER; note = 2'-O-Methyl-cytidine
  modified_base 56: mod_base = OTHER; note = 2'-O-Methyl-uridine
  modified_base 57: mod_base = OTHER; note = Nebularine - ribonebularine
  modified_base 60: mod_base = OTHER; note = 2'-O-Methyl-cytidine
  modified_base 61: mod_base = OTHER; note = 2'-O-Methyl-cytidine
  modified_base 66: mod_base = OTHER; note = 2'-O-Methyl-uridine
  modified_base 67: mod_base = OTHER; note = 2'-O-Methyl-cytidine
  modified_base 70: mod_base = OTHER; note = 2'-O-Methyl-cytidine
  modified_base 71: mod_base = OTHER; note = 2'-O-Methyl-uridine
  modified_base 72: mod_base = OTHER; note = 2'-O-Methyl-uridine
  modified_base 73: mod_base = OTHER; note = 2'-O-Methyl-guanosine
  modified_base 74: mod_base = OTHER; note = 2'-O-Methyl-adenosine
  modified_base 75: mod_base = OTHER; note = 2'-O-Methyl-adenosine
  modified_base 76: mod_base = OTHER; note = 2'-O-Methyl-adenosine
  modified_base 77: mod_base = OTHER; note = 2'-O-Methyl-adenosine
  modified_base 78: mod_base = OTHER; note = 2'-O-Methyl-adenosine
  modified_base 79: mod_base = OTHER; note = 2'-O-Methyl-guanosine
  modified_base 80: mod_base = OTHER; note = 2'-O-Methyl-uridine
  modified_base 81: mod_base = OTHER; note = 2'-O-Methyl-guanosine
  modified_base 83: mod_base = OTHER; note = 2'-O-Methyl-cytidine
  modified_base 84: mod_base = OTHER; note = 2'-O-Methyl-adenosine
  modified_base 85: mod_base = OTHER; note = 2'-O-Methyl-cytidine
  modified_base 86: mod_base = OTHER; note = 2'-O-Methyl-cytidine
  modified_base 87: mod_base = OTHER; note = 2'-O-Methyl-guanosine
  modified_base 88: mod_base = OTHER; note = 2'-O-Methyl-adenosine
  modified_base 89: mod_base = OTHER; note = 2'-O-Methyl-guanosine
  modified_base 90: mod_base = OTHER; note = 2'-O-Methyl-uridine
  modified_base 91: mod_base = OTHER; note = 2'-O-Methyl-cytidine
  modified_base 92: mod_base = OTHER; note = 2'-O-Methyl-guanosine
  modified_base 93: mod_base = OTHER; note = 2'-O-Methyl-guanosine
  modified_base 94: mod_base = OTHER; note = 2'-O-Methyl-uridine
  modified_base 95: mod_base = OTHER; note = 2'-O-Methyl-guanosine
  modified_base 96: mod_base = OTHER; note = 2'-O-Methyl-cytidine
  modified_base 97: mod_base = OTHER; note = 2'-O-Methyl-uridine phosphorothioate
  modified_base 98: mod_base = OTHER; note = 2'-O-Methyl-uridine phosphorothioate
  modified_base 99: mod_base = OTHER; note = 2'-O-Methyl-uridine phosphorothioate
  modified_base 100: mod_base = OTHER; note = 2'-O-Methyl-uridine

SEQ ID NO: 1965 - RNA, 100 nt, synthetic construct; identical to SEQ ID NO: 1911
  source 1..100: mol_type = other RNA; note = Description of Artificial Sequence: Synthetic polynucleotide
  modified_base 1: mod_base = OTHER; note = 2'-O-Methyl-cytidine phosphorothioate
  modified_base 2: mod_base = OTHER; note = 2'-O-Methyl-adenosine phosphorothioate
  modified_base 3: mod_base = OTHER; note = 2'-O-Methyl-guanosine
  modified_base 9: mod_base = OTHER; note = Nebularine - ribonebularine
  modified_base 21: mod_base = OTHER; note = 2'-O-Methyl-guanosine
  modified_base 28: mod_base = OTHER; note = 2'-O-Methyl-adenosine
  modified_base 29: mod_base = OTHER; note = 2'-O-Methyl-guanosine
  modified_base 30: mod_base = OTHER; note = 2'-O-Methyl-cytidine
  modified_base 31: mod_base = OTHER; note = 2'-O-Methyl-uridine
  modified_base 32: mod_base = OTHER; note = 2'-O-Methyl-adenosine
  modified_base 33: mod_base = OTHER; note = 2'-O-Methyl-guanosine
  modified_base 34: mod_base = OTHER; note = 2'-O-Methyl-adenosine
  modified_base 35: mod_base = OTHER; note = 2'-O-Methyl-adenosine
  modified_base 36: mod_base = OTHER; note = 2'-O-Methyl-adenosine
  modified_base 37: mod_base = OTHER; note = 2'-O-Methyl-uridine
  modified_base 38: mod_base = OTHER; note = 2'-O-Methyl-adenosine
  modified_base 39: mod_base = OTHER; note = 2'-O-Methyl-guanosine
  modified_base 40: mod_base = OTHER; note = 2'-O-Methyl-cytidine
  modified_base 41: mod_base = OTHER; note = 2'-O-Methyl-adenosine
  modified_base 42: mod_base = OTHER; note = 2'-O-Methyl-adenosine
  modified_base 46: mod_base = OTHER; note = 2'-O-Methyl-adenosine
  modified_base 48: mod_base = OTHER; note = 2'-O-Methyl-adenosine
  modified_base 50: mod_base = OTHER; note = 2'-O-Methyl-uridine
  modified_base 52: mod_base = OTHER; note = 2'-O-Methyl-adenosine
  modified_base 53: mod_base = OTHER; note = 2'-O-Methyl-guanosine
  modified_base 54: mod_base = OTHER; note = 2'-O-Methyl-guanosine
  modified_base 55: mod_base = OTHER; note = 2'-O-Methyl-cytidine
  modified_base 56: mod_base = OTHER; note = 2'-O-Methyl-uridine
  modified_base 57: mod_base = OTHER; note = Nebularine - ribonebularine
  modified_base 60: mod_base = OTHER; note = 2'-O-Methyl-cytidine
  modified_base 61: mod_base = OTHER; note = 2'-O-Methyl-cytidine
  modified_base 66: mod_base = OTHER; note = 2'-O-Methyl-uridine
  modified_base 67: mod_base = OTHER; note = 2'-O-Methyl-cytidine
  modified_base 70: mod_base = OTHER; note = 2'-O-Methyl-cytidine
  modified_base 71: mod_base = OTHER; note = 2'-O-Methyl-uridine
  modified_base 72: mod_base = OTHER; note = 2'-O-Methyl-uridine
  modified_base 73: mod_base = OTHER; note = 2'-O-Methyl-guanosine
  modified_base 74: mod_base = OTHER; note = 2'-O-Methyl-adenosine
  modified_base 75: mod_base = OTHER; note = 2'-O-Methyl-adenosine
  modified_base 76: mod_base = OTHER; note = 2'-O-Methyl-adenosine
  modified_base 77: mod_base = OTHER; note = 2'-O-Methyl-adenosine
  modified_base 78: mod_base = OTHER; note = 2'-O-Methyl-adenosine
  modified_base 79: mod_base = OTHER; note = 2'-O-Methyl-guanosine
  modified_base 80: mod_base = OTHER; note = 2'-O-Methyl-uridine
  modified_base 81: mod_base = OTHER; note = 2'-O-Methyl-guanosine
  modified_base 83: mod_base = OTHER; note = 2'-O-Methyl-cytidine
  modified_base 84: mod_base = OTHER; note = 2'-O-Methyl-adenosine
  modified_base 85: mod_base = OTHER; note = 2'-O-Methyl-cytidine
  modified_base 86: mod_base = OTHER; note = 2'-O-Methyl-cytidine
  modified_base 87: mod_base = OTHER; note = 2'-O-Methyl-guanosine
  modified_base 88: mod_base = OTHER; note = 2'-O-Methyl-adenosine
  modified_base 89: mod_base = OTHER; note = 2'-O-Methyl-guanosine
  modified_base 90: mod_base = OTHER; note = 2'-O-Methyl-uridine
  modified_base 91: mod_base = OTHER; note = 2'-O-Methyl-cytidine
  modified_base 92: mod_base = OTHER; note = 2'-O-Methyl-guanosine
  modified_base 93: mod_base = OTHER; note = 2'-O-Methyl-guanosine
  modified_base 94: mod_base = OTHER; note = 2'-O-Methyl-uridine
  modified_base 95: mod_base = OTHER; note = 2'-O-Methyl-guanosine
  modified_base 96: mod_base = OTHER; note = 2'-O-Methyl-cytidine
  modified_base 97: mod_base = OTHER; note = 2'-O-Methyl-uridine phosphorothioate
  modified_base 98: mod_base = OTHER; note = 2'-O-Methyl-uridine phosphorothioate
  modified_base 99: mod_base = OTHER; note = 2'-O-Methyl-uridine phosphorothioate
  modified_base 100: mod_base = OTHER; note = 2'-O-Methyl-uridine

SEQ ID NO: 1966 - RNA, 100 nt, synthetic construct; identical to SEQ ID NO: 1912
  source 1..100: mol_type = other RNA; note = Description of Artificial Sequence: Synthetic polynucleotide
  modified_base 1: mod_base = OTHER; note = 2'-O-Methyl-cytidine phosphorothioate
  modified_base 2: mod_base = OTHER; note = 2'-O-Methyl-adenosine phosphorothioate
  modified_base 3: mod_base = OTHER; note = 2'-O-Methyl-guanosine
  modified_base 9: mod_base = OTHER; note = Nebularine - ribonebularine
  modified_base 21: mod_base = OTHER; note = 2'-O-Methyl-guanosine
  modified_base 28: mod_base = OTHER; note = 2'-O-Methyl-adenosine
  modified_base 29: mod_base = OTHER; note = 2'-O-Methyl-guanosine
  modified_base 30: mod_base = OTHER; note = 2'-O-Methyl-cytidine
  modified_base 31: mod_base = OTHER; note = 2'-O-Methyl-uridine
  modified_base 32: mod_base = OTHER; note = 2'-O-Methyl-adenosine
  modified_base 33: mod_base = OTHER; note = 2'-O-Methyl-guanosine
  modified_base 34: mod_base = OTHER; note = 2'-O-Methyl-adenosine
  modified_base 35: mod_base = OTHER; note = 2'-O-Methyl-adenosine
  modified_base 36: mod_base = OTHER; note = 2'-O-Methyl-adenosine
  modified_base 37: mod_base = OTHER; note = 2'-O-Methyl-uridine
  modified_base 38: mod_base = OTHER; note = 2'-O-Methyl-adenosine
  modified_base 39: mod_base = OTHER; note = 2'-O-Methyl-guanosine
  modified_base 40: mod_base = OTHER; note = 2'-O-Methyl-cytidine
  modified_base 41: mod_base = OTHER; note = 2'-O-Methyl-adenosine
  modified_base 42: mod_base = OTHER; note = 2'-O-Methyl-adenosine
  modified_base 46: mod_base = OTHER; note = 2'-O-Methyl-adenosine
  modified_base 48: mod_base = OTHER; note = 2'-O-Methyl-adenosine
  modified_base 50: mod_base = OTHER; note = 2'-O-Methyl-uridine
  modified_base 52: mod_base = OTHER; note = 2'-O-Methyl-adenosine
  modified_base 53: mod_base = OTHER; note = 2'-O-Methyl-guanosine
  modified_base 54: mod_base = OTHER; note = 2'-O-Methyl-guanosine
  modified_base 55: mod_base = OTHER; note = 2'-O-Methyl-cytidine
  modified_base 56: mod_base = OTHER; note = 2'-O-Methyl-uridine
  modified_base 57: mod_base = OTHER; note = 2'-O-Methyl-adenosine
  modified_base 60: mod_base = OTHER; note = 2'-O-Methyl-cytidine
  modified_base 61: mod_base = OTHER; note = 2'-O-Methyl-cytidine
  modified_base 65: mod_base = OTHER; note = Nebularine - ribonebularine
  modified_base 66: mod_base = OTHER; note = 2'-O-Methyl-uridine
  modified_base 67: mod_base = OTHER; note = 2'-O-Methyl-cytidine
  modified_base 70: mod_base = OTHER; note = 2'-O-Methyl-cytidine
  modified_base 71: mod_base = OTHER; note = 2'-O-Methyl-uridine
  modified_base 72: mod_base = OTHER; note = 2'-O-Methyl-uridine
  modified_base 73: mod_base = OTHER; note = 2'-O-Methyl-guanosine
  modified_base 74: mod_base = OTHER; note = 2'-O-Methyl-adenosine
  modified_base 75: mod_base = OTHER; note = 2'-O-Methyl-adenosine
  modified_base 76: mod_base = OTHER; note = 2'-O-Methyl-adenosine
  modified_base 77: mod_base = OTHER; note = 2'-O-Methyl-adenosine
  modified_base 78: mod_base = OTHER; note = 2'-O-Methyl-adenosine
  modified_base 79: mod_base = OTHER; note = 2'-O-Methyl-guanosine
  modified_base 80: mod_base = OTHER; note = 2'-O-Methyl-uridine
  modified_base 81: mod_base = OTHER; note = 2'-O-Methyl-guanosine
  modified_base 83: mod_base = OTHER; note = 2'-O-Methyl-cytidine
  modified_base 84: mod_base = OTHER; note = 2'-O-Methyl-adenosine
  modified_base 85: mod_base = OTHER; note = 2'-O-Methyl-cytidine
  modified_base 86: mod_base = OTHER; note = 2'-O-Methyl-cytidine
  modified_base 87: mod_base = OTHER; note = 2'-O-Methyl-guanosine
  modified_base 88: mod_base = OTHER; note = 2'-O-Methyl-adenosine
  modified_base 89: mod_base = OTHER; note = 2'-O-Methyl-guanosine
  modified_base 90: mod_base = OTHER; note = 2'-O-Methyl-uridine
  modified_base 91: mod_base = OTHER; note = 2'-O-Methyl-cytidine
  modified_base 92: mod_base = OTHER; note = 2'-O-Methyl-guanosine
  modified_base 93: mod_base = OTHER; note = 2'-O-Methyl-guanosine
  modified_base 94: mod_base = OTHER; note = 2'-O-Methyl-uridine
  modified_base 95: mod_base = OTHER; note = 2'-O-Methyl-guanosine
  modified_base 96: mod_base = OTHER; note = 2'-O-Methyl-cytidine
  modified_base 97: mod_base = OTHER; note = 2'-O-Methyl-uridine phosphorothioate
  modified_base 98: mod_base = OTHER; note = 2'-O-Methyl-uridine phosphorothioate
  modified_base 99: mod_base = OTHER; note = 2'-O-Methyl-uridine phosphorothioate
  modified_base 100: mod_base = OTHER; note = 2'-O-Methyl-uridine

SEQ ID NO: 1967 - RNA, 100 nt, synthetic construct; identical to SEQ ID NO: 1913
  source 1..100: mol_type = other RNA; note = Description of Artificial Sequence: Synthetic polynucleotide
  modified_base 1: mod_base = OTHER; note = 2'-O-Methyl-cytidine phosphorothioate
  modified_base 2: mod_base = OTHER; note = 2'-O-Methyl-adenosine phosphorothioate
  modified_base 3: mod_base = OTHER; note = 2'-O-Methyl-guanosine
  modified_base 9: mod_base = OTHER; note = Nebularine - ribonebularine
  modified_base 21: mod_base = OTHER; note = 2'-O-Methyl-guanosine
  modified_base 28: mod_base = OTHER; note = 2'-O-Methyl-adenosine
  modified_base 29: mod_base = OTHER; note = 2'-O-Methyl-guanosine
  modified_base 30: mod_base = OTHER; note = 2'-O-Methyl-cytidine
  modified_base 31: mod_base = OTHER; note = 2'-O-Methyl-uridine
  modified_base 32: mod_base = OTHER; note = 2'-O-Methyl-adenosine
  modified_base 33: mod_base = OTHER; note = 2'-O-Methyl-guanosine
  modified_base 34: mod_base = OTHER; note = Nebularine - ribonebularine
  modified_base 35: mod_base = OTHER; note = 2'-O-Methyl-adenosine
  modified_base 36: mod_base = OTHER; note = 2'-O-Methyl-adenosine
  modified_base 37: mod_base = OTHER; note = 2'-O-Methyl-uridine
  modified_base 38: mod_base = OTHER; note = 2'-O-Methyl-adenosine
  modified_base 39: mod_base = OTHER; note = 2'-O-Methyl-guanosine
  modified_base 40: mod_base = OTHER; note = 2'-O-Methyl-cytidine
  modified_base 41: mod_base = OTHER; note = 2'-O-Methyl-adenosine
  modified_base 42: mod_base = OTHER; note = 2'-O-Methyl-adenosine
  modified_base 46: mod_base = OTHER; note = 2'-O-Methyl-adenosine
  modified_base 48: mod_base = OTHER; note = 2'-O-Methyl-adenosine
  modified_base 50: mod_base = OTHER; note = 2'-O-Methyl-uridine
  modified_base 52: mod_base = OTHER; note = 2'-O-Methyl-adenosine
  modified_base 53: mod_base = OTHER; note = 2'-O-Methyl-guanosine
  modified_base 54: mod_base = OTHER; note = 2'-O-Methyl-guanosine
  modified_base 55: mod_base = OTHER; note = 2'-O-Methyl-cytidine
  modified_base 56: mod_base = OTHER; note = 2'-O-Methyl-uridine
  modified_base 57: mod_base = OTHER; note = Nebularine - ribonebularine
  modified_base 60: mod_base = OTHER; note = 2'-O-Methyl-cytidine
  modified_base 61: mod_base = OTHER; note = 2'-O-Methyl-cytidine
  modified_base 65: mod_base = OTHER; note = Nebularine - ribonebularine
  modified_base 66: mod_base = OTHER; note = 2'-O-Methyl-uridine
  modified_base 67: mod_base = OTHER; note = 2'-O-Methyl-cytidine
  modified_base 70: mod_base = OTHER; note = 2'-O-Methyl-cytidine
  modified_base 71: mod_base = OTHER; note = 2'-O-Methyl-uridine
  modified_base 72: mod_base = OTHER; note = 2'-O-Methyl-uridine
  modified_base 73: mod_base = OTHER; note = 2'-O-Methyl-guanosine
  modified_base 74: mod_base = OTHER; note = 2'-O-Methyl-adenosine
  modified_base 75: mod_base = OTHER; note = 2'-O-Methyl-adenosine
  modified_base 76: mod_base = OTHER; note = 2'-O-Methyl-adenosine
  modified_base 77: mod_base = OTHER; note = 2'-O-Methyl-adenosine
  modified_base 78: mod_base = OTHER; note = 2'-O-Methyl-adenosine
  modified_base 79: mod_base = OTHER; note = 2'-O-Methyl-guanosine
  modified_base 80: mod_base = OTHER; note = 2'-O-Methyl-uridine
  modified_base 81: mod_base = OTHER; note = 2'-O-Methyl-guanosine
  modified_base 83: mod_base = OTHER; note = 2'-O-Methyl-cytidine
  modified_base 84: mod_base = OTHER; note = 2'-O-Methyl-adenosine
  modified_base 85: mod_base = OTHER; note = 2'-O-Methyl-cytidine
  modified_base 86: mod_base = OTHER; note = 2'-O-Methyl-cytidine
  modified_base 87: mod_base = OTHER; note = 2'-O-Methyl-guanosine
  modified_base 88: mod_base = OTHER; note = 2'-O-Methyl-adenosine
  modified_base 89: mod_base = OTHER; note = 2'-O-Methyl-guanosine
  modified_base 90: mod_base = OTHER; note = 2'-O-Methyl-uridine
  modified_base 91: mod_base = OTHER; note = 2'-O-Methyl-cytidine
  modified_base 92: mod_base = OTHER; note = 2'-O-Methyl-guanosine
  modified_base 93: mod_base = OTHER; note = 2'-O-Methyl-guanosine
  modified_base 94: mod_base = OTHER; note = 2'-O-Methyl-uridine
  modified_base 95: mod_base = OTHER; note = 2'-O-Methyl-guanosine
  modified_base 96: mod_base = OTHER; note = 2'-O-Methyl-cytidine
  modified_base 97: mod_base = OTHER; note = 2'-O-Methyl-uridine phosphorothioate
  modified_base 98: mod_base = OTHER; note = 2'-O-Methyl-uridine phosphorothioate
  modified_base 99: mod_base = OTHER; note = 2'-O-Methyl-uridine phosphorothioate
  modified_base 100: mod_base = OTHER; note = 2'-O-Methyl-uridine

SEQ ID NO: 1968 - RNA, 100 nt, synthetic construct; identical to SEQ ID NO: 1914
  source 1..100: mol_type = other RNA; note = Description of Artificial Sequence: Synthetic polynucleotide
  modified_base 1: mod_base = OTHER; note = 2'-O-Methyl-cytidine phosphorothioate
  modified_base 2: mod_base = OTHER; note = 2'-O-Methyl-adenosine phosphorothioate
  modified_base 3: mod_base = OTHER; note = 2'-O-Methyl-guanosine
  modified_base 9: mod_base = OTHER; note = Nebularine - ribonebularine
  modified_base 21: mod_base = OTHER; note = 2'-O-Methyl-guanosine
  modified_base 28: mod_base = OTHER; note = Nebularine - ribonebularine
  modified_base 29: mod_base = OTHER; note = 2'-O-Methyl-guanosine
  modified_base 30: mod_base = OTHER; note = 2'-O-Methyl-cytidine
  modified_base 31: mod_base = OTHER; note = 2'-O-Methyl-uridine
  modified_base 32: mod_base = OTHER; note = 2'-O-Methyl-adenosine
  modified_base 33: mod_base = OTHER; note = 2'-O-Methyl-guanosine
  modified_base 34: mod_base = OTHER; note = Nebularine - ribonebularine
  modified_base 35: mod_base = OTHER; note = 2'-O-Methyl-adenosine
  modified_base 36: mod_base = OTHER; note = 2'-O-Methyl-adenosine
  modified_base 37: mod_base = OTHER; note = 2'-O-Methyl-uridine
  modified_base 38: mod_base = OTHER; note = 2'-O-Methyl-adenosine
  modified_base 39: mod_base = OTHER; note = 2'-O-Methyl-guanosine
  modified_base 40: mod_base = OTHER; note = 2'-O-Methyl-cytidine
  modified_base 41: mod_base = OTHER; note = 2'-O-Methyl-adenosine
  modified_base 42: mod_base = OTHER; note = Nebularine - ribonebularine
  modified_base 46: mod_base = OTHER; note = 2'-O-Methyl-adenosine
  modified_base 48: mod_base = OTHER; note = 2'-O-Methyl-adenosine
  modified_base 50: mod_base = OTHER; note = 2'-O-Methyl-uridine
  modified_base 52: mod_base = OTHER; note = 2'-O-Methyl-adenosine
  modified_base 53: mod_base = OTHER; note = 2'-O-Methyl-guanosine
  modified_base 54: mod_base = OTHER; note = 2'-O-Methyl-guanosine
  modified_base 55: mod_base = OTHER; note = 2'-O-Methyl-cytidine
  modified_base 56: mod_base = OTHER; note = 2'-O-Methyl-uridine
  modified_base 57: mod_base = OTHER; note = Nebularine - ribonebularine
  modified_base 60: mod_base = OTHER; note = 2'-O-Methyl-cytidine
  modified_base 61: mod_base = OTHER; note = 2'-O-Methyl-cytidine
  modified_base 65: mod_base = OTHER; note = Nebularine - ribonebularine
  modified_base 66: mod_base = OTHER; note = 2'-O-Methyl-uridine
  modified_base 67: mod_base = OTHER; note = 2'-O-Methyl-cytidine
  modified_base 70: mod_base = OTHER; note = 2'-O-Methyl-cytidine
  modified_base 71: mod_base = OTHER; note = 2'-O-Methyl-uridine
  modified_base 72: mod_base = OTHER; note = 2'-O-Methyl-uridine
  modified_base 73: mod_base = OTHER; note = 2'-O-Methyl-guanosine
  modified_base 74: mod_base = OTHER; note = 2'-O-Methyl-adenosine
  modified_base 75: mod_base = OTHER; note = 2'-O-Methyl-adenosine
  modified_base 76: mod_base = OTHER; note = 2'-O-Methyl-adenosine
  modified_base 77: mod_base = OTHER; note = 2'-O-Methyl-adenosine
  modified_base 78: mod_base = OTHER; note = 2'-O-Methyl-adenosine
  modified_base 79: mod_base = OTHER; note = 2'-O-Methyl-guanosine
  modified_base 80: mod_base = OTHER; note = 2'-O-Methyl-uridine
  modified_base 81: mod_base = OTHER; note = 2'-O-Methyl-guanosine
  modified_base 83: mod_base = OTHER; note = 2'-O-Methyl-cytidine
  modified_base 84: mod_base = OTHER; note = 2'-O-Methyl-adenosine
  modified_base 85: mod_base = OTHER; note = 2'-O-Methyl-cytidine
  modified_base 86: mod_base = OTHER; note = 2'-O-Methyl-cytidine
  modified_base 87: mod_base = OTHER; note = 2'-O-Methyl-guanosine
  modified_base 88: mod_base = OTHER; note = 2'-O-Methyl-adenosine
  modified_base 89: mod_base = OTHER; note = 2'-O-Methyl-guanosine
  modified_base 90: mod_base = OTHER; note = 2'-O-Methyl-uridine
  modified_base 91: mod_base = OTHER; note = 2'-O-Methyl-cytidine
  modified_base 92: mod_base = OTHER; note = 2'-O-Methyl-guanosine
  modified_base 93: mod_base = OTHER; note = 2'-O-Methyl-guanosine
  modified_base 94: mod_base = OTHER; note = 2'-O-Methyl-uridine
  modified_base 95: mod_base = OTHER; note = 2'-O-Methyl-guanosine
  modified_base 96: mod_base = OTHER; note = 2'-O-Methyl-cytidine
  modified_base 97: mod_base = OTHER; note = 2'-O-Methyl-uridine phosphorothioate
  modified_base 98: mod_base = OTHER; note = 2'-O-Methyl-uridine phosphorothioate
  modified_base 99: mod_base = OTHER; note = 2'-O-Methyl-uridine phosphorothioate
  modified_base 100: mod_base = OTHER; note = 2'-O-Methyl-uridine

SEQ ID NO: 1969 - RNA, 100 nt, synthetic construct; identical to SEQ ID NO: 1915
  source 1..100: mol_type = other RNA; note = Description of Artificial Sequence: Synthetic polynucleotide
  modified_base 1: mod_base = OTHER; note = 2'-O-Methyl-cytidine phosphorothioate
  modified_base 2: mod_base = OTHER; note = 2'-O-Methyl-adenosine phosphorothioate
  modified_base 3: mod_base = OTHER; note = 2'-O-Methyl-guanosine
  modified_base 14: mod_base = OTHER; note = Nebularine - ribonebularine
  modified_base 21: mod_base = OTHER; note = 2'-O-Methyl-guanosine
  modified_base 28: mod_base = OTHER; note = 2'-O-Methyl-adenosine
  modified_base 29: mod_base = OTHER; note = 2'-O-Methyl-guanosine
  modified_base 30: mod_base = OTHER; note = 2'-O-Methyl-cytidine
  modified_base 31: mod_base = OTHER; note = 2'-O-Methyl-uridine
  modified_base 32: mod_base = OTHER; note = 2'-O-Methyl-adenosine
  modified_base 33: mod_base = OTHER; note = 2'-O-Methyl-guanosine
  modified_base 34: mod_base = OTHER; note = Nebularine - ribonebularine
  modified_base 35: mod_base = OTHER; note = 2'-O-Methyl-adenosine
  modified_base 36: mod_base = OTHER; note = 2'-O-Methyl-adenosine
  modified_base 37: mod_base = OTHER; note = 2'-O-Methyl-uridine
  modified_base 38: mod_base = OTHER; note = 2'-O-Methyl-adenosine
  modified_base 39: mod_base = OTHER; note = 2'-O-Methyl-guanosine
  modified_base 40: mod_base = OTHER; note = 2'-O-Methyl-cytidine
  modified_base 41: mod_base = OTHER; note = 2'-O-Methyl-adenosine
  modified_base 42: mod_base = OTHER; note = 2'-O-Methyl-adenosine
  modified_base 46: mod_base = OTHER; note = 2'-O-Methyl-adenosine
  modified_base 48: mod_base = OTHER; note = 2'-O-Methyl-adenosine
  modified_base 50: mod_base = OTHER; note = 2'-O-Methyl-uridine
  modified_base 52: mod_base = OTHER; note = 2'-O-Methyl-adenosine
  modified_base 53: mod_base = OTHER; note = 2'-O-Methyl-guanosine
  modified_base 54: mod_base = OTHER; note = 2'-O-Methyl-guanosine
  modified_base 55: mod_base = OTHER; note = 2'-O-Methyl-cytidine
  modified_base 56: mod_base = OTHER; note = 2'-O-Methyl-uridine
  modified_base 57: mod_base = OTHER; note = 2'-O-Methyl-adenosine
  modified_base 60: mod_base = OTHER; note = 2'-O-Methyl-cytidine
  modified_base 61: mod_base = OTHER; note = 2'-O-Methyl-cytidine
  modified_base 66: mod_base = OTHER; note = 2'-O-Methyl-uridine
  modified_base 67: mod_base = OTHER; note = 2'-O-Methyl-cytidine
  modified_base 70: mod_base = OTHER; note = 2'-O-Methyl-cytidine
  modified_base 71: mod_base = OTHER; note = 2'-O-Methyl-uridine
  modified_base 72: mod_base = OTHER; note = 2'-O-Methyl-uridine
  modified_base 73: mod_base = OTHER; note = 2'-O-Methyl-guanosine
  modified_base 74: mod_base = OTHER; note = 2'-O-Methyl-adenosine
  modified_base 75: mod_base = OTHER; note = 2'-O-Methyl-adenosine
  modified_base 76: mod_base = OTHER; note = 2'-O-Methyl-adenosine
  modified_base 77: mod_base = OTHER; note = 2'-O-Methyl-adenosine
  modified_base 78: mod_base = OTHER; note = 2'-O-Methyl-adenosine
  modified_base 79: mod_base = OTHER; note = 2'-O-Methyl-guanosine
  modified_base 80: mod_base = OTHER; note = 2'-O-Methyl-uridine
  modified_base 81: mod_base = OTHER; note = 2'-O-Methyl-guanosine
  modified_base 83: mod_base = OTHER; note = 2'-O-Methyl-cytidine
  modified_base 84: mod_base = OTHER; note = 2'-O-Methyl-adenosine
  modified_base 85: mod_base = OTHER; note = 2'-O-Methyl-cytidine
  modified_base 86: mod_base = OTHER; note = 2'-O-Methyl-cytidine
  modified_base 87: mod_base = OTHER; note = 2'-O-Methyl-guanosine
  modified_base 88: mod_base = OTHER; note = 2'-O-Methyl-adenosine
  modified_base 89: mod_base = OTHER; note = 2'-O-Methyl-guanosine
  modified_base 90: mod_base = OTHER; note = 2'-O-Methyl-uridine
  modified_base 91: mod_base = OTHER; note = 2'-O-Methyl-cytidine
  modified_base 92: mod_base = OTHER; note = 2'-O-Methyl-guanosine
  modified_base 93: mod_base = OTHER; note = 2'-O-Methyl-guanosine
  modified_base 94: mod_base = OTHER; note = 2'-O-Methyl-uridine
  modified_base 95: mod_base = OTHER; note = 2'-O-Methyl-guanosine
  modified_base 96: mod_base = OTHER; note = 2'-O-Methyl-cytidine
  modified_base 97: mod_base = OTHER; note = 2'-O-Methyl-uridine phosphorothioate
  modified_base 98: mod_base = OTHER; note = 2'-O-Methyl-uridine phosphorothioate
  modified_base 99: mod_base = OTHER; note = 2'-O-Methyl-uridine phosphorothioate
  modified_base 100: mod_base = OTHER; note = 2'-O-Methyl-uridine

SEQ ID NO: 1970 - RNA, 100 nt, synthetic construct; identical to SEQ ID NO: 1916
  source 1..100: mol_type = other RNA; note = Description of Artificial Sequence: Synthetic polynucleotide
  modified_base 1: mod_base = OTHER; note = 2'-O-Methyl-cytidine phosphorothioate
  modified_base 2: mod_base = OTHER; note = 2'-O-Methyl-adenosine phosphorothioate
  modified_base 3: mod_base = OTHER; note = 2'-O-Methyl-guanosine
  modified_base 14: mod_base = OTHER; note = Nebularine - ribonebularine
  modified_base 21: mod_base = OTHER; note = 2'-O-Methyl-guanosine
  modified_base 28: mod_base = OTHER; note = 2'-O-Methyl-adenosine
  modified_base 29: mod_base = OTHER; note = 2'-O-Methyl-guanosine
  modified_base 30: mod_base = OTHER; note = 2'-O-Methyl-cytidine
  modified_base 31: mod_base = OTHER; note = 2'-O-Methyl-uridine
  modified_base 32: mod_base = OTHER; note = 2'-O-Methyl-adenosine
  modified_base 33: mod_base = OTHER; note = 2'-O-Methyl-guanosine
  modified_base 34: mod_base = OTHER; note = Nebularine - ribonebularine
  modified_base 35: mod_base = OTHER; note = 2'-O-Methyl-adenosine
  modified_base 36: mod_base = OTHER; note = 2'-O-Methyl-adenosine
  modified_base 37: mod_base = OTHER; note = 2'-O-Methyl-uridine
  modified_base 38: mod_base = OTHER; note = 2'-O-Methyl-adenosine
  modified_base 39: mod_base = OTHER; note = 2'-O-Methyl-guanosine
  modified_base 40: mod_base = OTHER; note = 2'-O-Methyl-cytidine
  modified_base 41: mod_base = OTHER; note = 2'-O-Methyl-adenosine
  modified_base 42: mod_base = OTHER; note = 2'-O-Methyl-adenosine
  modified_base 46: mod_base = OTHER; note = 2'-O-Methyl-adenosine
  modified_base 48: mod_base = OTHER; note = 2'-O-Methyl-adenosine
  modified_base 50: mod_base = OTHER; note = 2'-O-Methyl-uridine
  modified_base 52: mod_base = OTHER; note = 2'-O-Methyl-adenosine
  modified_base 53: mod_base = OTHER; note = 2'-O-Methyl-guanosine
  modified_base 54: mod_base = OTHER; note = 2'-O-Methyl-guanosine
  modified_base 55: mod_base = OTHER; note = 2'-O-Methyl-cytidine
  modified_base 56: mod_base = OTHER; note = 2'-O-Methyl-uridine
  modified_base 57: mod_base = OTHER; note = Nebularine - ribonebularine
  modified_base 60: mod_base = OTHER; note = 2'-O-Methyl-cytidine
  modified_base 61: mod_base = OTHER; note = 2'-O-Methyl-cytidine
  modified_base 66: mod_base = OTHER; note = 2'-O-Methyl-uridine
  modified_base 67: mod_base = OTHER; note = 2'-O-Methyl-cytidine
  modified_base 70: mod_base = OTHER; note = 2'-O-Methyl-cytidine
  modified_base 71: mod_base = OTHER; note = 2'-O-Methyl-uridine
  modified_base 72: mod_base = OTHER; note = 2'-O-Methyl-uridine
  modified_base 73: mod_base = OTHER; note = 2'-O-Methyl-guanosine
  modified_base 74: mod_base = OTHER; note = 2'-O-Methyl-adenosine
  modified_base 75: mod_base = OTHER; note = 2'-O-Methyl-adenosine
  modified_base 76: mod_base = OTHER; note = 2'-O-Methyl-adenosine
  modified_base 77: mod_base = OTHER; note = 2'-O-Methyl-adenosine
  modified_base 78: mod_base = OTHER; note = 2'-O-Methyl-adenosine
  modified_base 79: mod_base = OTHER; note = 2'-O-Methyl-guanosine
  modified_base 80: mod_base = OTHER; note = 2'-O-Methyl-uridine
  modified_base 81: mod_base = OTHER; note = 2'-O-Methyl-guanosine
  modified_base 83: mod_base = OTHER; note = 2'-O-Methyl-cytidine
  modified_base 84: mod_base = OTHER; note = 2'-O-Methyl-adenosine
  modified_base 85: mod_base = OTHER; note = 2'-O-Methyl-cytidine
  modified_base 86: mod_base = OTHER; note = 2'-O-Methyl-cytidine
  modified_base 87: mod_base = OTHER; note = 2'-O-Methyl-guanosine
  modified_base 88: mod_base = OTHER; note = 2'-O-Methyl-adenosine
  modified_base 89: mod_base = OTHER; note = 2'-O-Methyl-guanosine
  modified_base 90: mod_base = OTHER; note = 2'-O-Methyl-uridine
  modified_base 91: mod_base = OTHER; note = 2'-O-Methyl-cytidine
  modified_base 92: mod_base = OTHER; note = 2'-O-Methyl-guanosine
  modified_base 93: mod_base = OTHER; note = 2'-O-Methyl-guanosine
  modified_base 94: mod_base = OTHER; note = 2'-O-Methyl-uridine
  modified_base 95: mod_base = OTHER; note = 2'-O-Methyl-guanosine
  modified_base 96: mod_base = OTHER; note = 2'-O-Methyl-cytidine
  modified_base 97: mod_base = OTHER; note = 2'-O-Methyl-uridine phosphorothioate
  modified_base 98: mod_base = OTHER; note = 2'-O-Methyl-uridine phosphorothioate
  modified_base 99: mod_base = OTHER; note = 2'-O-Methyl-uridine phosphorothioate
  modified_base 100: mod_base = OTHER; note = 2'-O-Methyl-uridine

SEQ ID NO: 1971 - RNA, 100 nt, synthetic construct; identical to SEQ ID NO: 1917
  source 1..100: mol_type = other RNA; note = Description of Artificial Sequence: Synthetic polynucleotide
  modified_base 1: mod_base = OTHER; note = 2'-O-Methyl-cytidine phosphorothioate
  modified_base 2: mod_base = OTHER; note = 2'-O-Methyl-adenosine phosphorothioate
  modified_base 3: mod_base = OTHER; note = 2'-O-Methyl-guanosine
  modified_base 14: mod_base = OTHER; note = Nebularine - ribonebularine
  modified_base 21: mod_base = OTHER; note = 2'-O-Methyl-guanosine
  modified_base 28: mod_base = OTHER; note = 2'-O-Methyl-adenosine
  modified_base 29: mod_base = OTHER; note = 2'-O-Methyl-guanosine
  modified_base 30: mod_base = OTHER; note = 2'-O-Methyl-cytidine
  modified_base 31: mod_base = OTHER; note = 2'-O-Methyl-uridine
  modified_base 32: mod_base = OTHER; note = 2'-O-Methyl-adenosine
  modified_base 33: mod_base = OTHER; note = 2'-O-Methyl-guanosine
  modified_base 34: mod_base = OTHER; note = 2'-O-Methyl-adenosine
  modified_base 35: mod_base = OTHER; note = 2'-O-Methyl-adenosine
  modified_base 36: mod_base = OTHER; note = 2'-O-Methyl-adenosine
  modified_base 37: mod_base = OTHER; note = 2'-O-Methyl-uridine
  modified_base 38: mod_base = OTHER; note = 2'-O-Methyl-adenosine
  modified_base 39: mod_base = OTHER; note = 2'-O-Methyl-guanosine
  modified_base 40: mod_base = OTHER; note = 2'-O-Methyl-cytidine
  modified_base 41: mod_base = OTHER; note = 2'-O-Methyl-adenosine
  modified_base 42: mod_base = OTHER; note = 2'-O-Methyl-adenosine
  modified_base 46: mod_base = OTHER; note = 2'-O-Methyl-adenosine
  modified_base 48: mod_base = OTHER; note = 2'-O-Methyl-adenosine
  modified_base 50: mod_base = OTHER; note = 2'-O-Methyl-uridine
  modified_base 52: mod_base = OTHER; note = 2'-O-Methyl-adenosine
  modified_base 53: mod_base = OTHER; note = 2'-O-Methyl-guanosine
  modified_base 54: mod_base = OTHER; note = 2'-O-Methyl-guanosine
  modified_base 55: mod_base = OTHER; note = 2'-O-Methyl-cytidine
  modified_base 56: mod_base = OTHER; note = 2'-O-Methyl-uridine
  modified_base 57: mod_base = OTHER; note = Nebularine - ribonebularine
  modified_base 60: mod_base = OTHER; note = 2'-O-Methyl-cytidine
  modified_base 61: mod_base = OTHER; note = 2'-O-Methyl-cytidine
  modified_base 66: mod_base = OTHER; note = 2'-O-Methyl-uridine
  modified_base 67: mod_base = OTHER; note = 2'-O-Methyl-cytidine
  modified_base 70: mod_base = OTHER; note = 2'-O-Methyl-cytidine
  modified_base 71: mod_base = OTHER; note = 2'-O-Methyl-uridine
  modified_base 72: mod_base = OTHER; note = 2'-O-Methyl-uridine
  modified_base 73: mod_base = OTHER; note = 2'-O-Methyl-guanosine
  modified_base 74: mod_base = OTHER; note = 2'-O-Methyl-adenosine
  modified_base 75: mod_base = OTHER; note = 2'-O-Methyl-adenosine
  modified_base 76: mod_base = OTHER; note = 2'-O-Methyl-adenosine
  modified_base 77: mod_base = OTHER; note = 2'-O-Methyl-adenosine
  modified_base 78: mod_base = OTHER; note = 2'-O-Methyl-adenosine
  modified_base 79: mod_base = OTHER; note = 2'-O-Methyl-guanosine
  modified_base 80: mod_base = OTHER; note = 2'-O-Methyl-uridine
  modified_base 81: mod_base = OTHER; note = 2'-O-Methyl-guanosine
  modified_base 83: mod_base = OTHER; note = 2'-O-Methyl-cytidine
  modified_base 84: mod_base = OTHER; note = 2'-O-Methyl-adenosine
  modified_base 85: mod_base = OTHER; note = 2'-O-Methyl-cytidine
  modified_base 86: mod_base = OTHER; note = 2'-O-Methyl-cytidine
  modified_base 87: mod_base = OTHER; note = 2'-O-Methyl-guanosine
  modified_base 88: mod_base = OTHER; note = 2'-O-Methyl-adenosine
  modified_base 89: mod_base = OTHER; note = 2'-O-Methyl-guanosine
  modified_base 90: mod_base = OTHER; note = 2'-O-Methyl-uridine
  modified_base 91: mod_base = OTHER; note = 2'-O-Methyl-cytidine
  modified_base 92: mod_base = OTHER; note = 2'-O-Methyl-guanosine
  modified_base 93: mod_base = OTHER; note = 2'-O-Methyl-guanosine
  modified_base 94: mod_base = OTHER; note = 2'-O-Methyl-uridine
  modified_base 95: mod_base = OTHER; note = 2'-O-Methyl-guanosine
  modified_base 96: mod_base = OTHER; note = 2'-O-Methyl-cytidine
  modified_base 97: mod_base = OTHER; note = 2'-O-Methyl-uridine phosphorothioate
  modified_base 98: mod_base = OTHER; note = 2'-O-Methyl-uridine phosphorothioate
  modified_base 99: mod_base = OTHER; note = 2'-O-Methyl-uridine phosphorothioate
  modified_base 100: mod_base = OTHER; note = 2'-O-Methyl-uridine

SEQ ID NO: 1972 - RNA, 100 nt, synthetic construct; identical to SEQ ID NO: 1918
  source 1..100: mol_type = other RNA; note = Description of Artificial Sequence: Synthetic polynucleotide
  modified_base 1: mod_base = OTHER; note = 2'-O-Methyl-cytidine phosphorothioate
  modified_base 2: mod_base = OTHER; note = 2'-O-Methyl-adenosine phosphorothioate
  modified_base 3: mod_base = OTHER; note = 2'-O-Methyl-guanosine
  modified_base 14: mod_base = OTHER; note = Nebularine - ribonebularine
  modified_base 21: mod_base = OTHER; note = 2'-O-Methyl-guanosine
  modified_base 28: mod_base = OTHER; note = 2'-O-Methyl-adenosine
  modified_base 29: mod_base = OTHER; note = 2'-O-Methyl-guanosine
  modified_base 30: mod_base = OTHER; note = 2'-O-Methyl-cytidine
  modified_base 31: mod_base = OTHER; note = 2'-O-Methyl-uridine
  modified_base 32: mod_base = OTHER; note = 2'-O-Methyl-adenosine
  modified_base 33: mod_base = OTHER; note = 2'-O-Methyl-guanosine
  modified_base 34: mod_base = OTHER; note = 2'-O-Methyl-adenosine
  modified_base 35: mod_base = OTHER; note = 2'-O-Methyl-adenosine
  modified_base 36: mod_base = OTHER; note = 2'-O-Methyl-adenosine
  modified_base 37: mod_base = OTHER; note = 2'-O-Methyl-uridine
  modified_base 38: mod_base = OTHER; note = 2'-O-Methyl-adenosine
  modified_base 39: mod_base = OTHER; note = 2'-O-Methyl-guanosine
  modified_base 40: mod_base = OTHER; note = 2'-O-Methyl-cytidine
  modified_base 41: mod_base = OTHER; note = 2'-O-Methyl-adenosine
  modified_base 42: mod_base = OTHER; note = 2'-O-Methyl-adenosine
  modified_base 46: mod_base = OTHER; note = 2'-O-Methyl-adenosine
  modified_base 48: mod_base = OTHER; note = 2'-O-Methyl-adenosine
  modified_base 50: mod_base = OTHER; note = 2'-O-Methyl-uridine
  modified_base 52: mod_base = OTHER; note = 2'-O-Methyl-adenosine
  modified_base 53: mod_base = OTHER; note = 2'-O-Methyl-guanosine
  modified_base 54: mod_base = OTHER; note = 2'-O-Methyl-guanosine
  modified_base 55: mod_base = OTHER; note = 2'-O-Methyl-cytidine
  modified_base 56: mod_base = OTHER; note = 2'-O-Methyl-uridine
  modified_base 57: mod_base = OTHER; note = 2'-O-Methyl-adenosine
  modified_base 60: mod_base = OTHER; note = 2'-O-Methyl-cytidine
  modified_base 61: mod_base = OTHER; note = 2'-O-Methyl-cytidine
  modified_base 65: mod_base = OTHER; note = Nebularine - ribonebularine
  modified_base 66: mod_base = OTHER; note = 2'-O-Methyl-uridine
  modified_base 67: mod_base = OTHER; note = 2'-O-Methyl-cytidine
  modified_base 70: mod_base = OTHER; note = 2'-O-Methyl-cytidine
  modified_base 71: mod_base = OTHER; note = 2'-O-Methyl-uridine
  modified_base 72: mod_base = OTHER; note = 2'-O-Methyl-uridine
  modified_base 73: mod_base = OTHER; note = 2'-O-Methyl-guanosine
  modified_base 74: mod_base = OTHER; note = 2'-O-Methyl-adenosine
  modified_base 75: mod_base = OTHER; note = 2'-O-Methyl-adenosine
  modified_base 76: mod_base = OTHER; note = 2'-O-Methyl-adenosine
  modified_base 77: mod_base = OTHER; note = 2'-O-Methyl-adenosine
  modified_base 78: mod_base = OTHER; note = 2'-O-Methyl-adenosine
  modified_base 79: mod_base = OTHER; note = 2'-O-Methyl-guanosine
  modified_base 80: mod_base = OTHER; note = 2'-O-Methyl-uridine
  modified_base 81: mod_base = OTHER; note = 2'-O-Methyl-guanosine
  modified_base 83: mod_base = OTHER; note = 2'-O-Methyl-cytidine
  modified_base 84: mod_base = OTHER; note = 2'-O-Methyl-adenosine
  modified_base 85: mod_base = OTHER; note = 2'-O-Methyl-cytidine
  modified_base 86: mod_base = OTHER; note = 2'-O-Methyl-cytidine
  modified_base 87: mod_base = OTHER; note = 2'-O-Methyl-guanosine
  modified_base 88: mod_base = OTHER; note = 2'-O-Methyl-adenosine
  modified_base 89: mod_base = OTHER; note = 2'-O-Methyl-guanosine
  modified_base 90: mod_base = OTHER; note = 2'-O-Methyl-uridine
  modified_base 91: mod_base = OTHER; note = 2'-O-Methyl-cytidine
  modified_base 92: mod_base = OTHER; note = 2'-O-Methyl-guanosine
  modified_base 93: mod_base = OTHER; note = 2'-O-Methyl-guanosine
  modified_base 94: mod_base = OTHER; note = 2'-O-Methyl-uridine
  modified_base 95: mod_base = OTHER; note = 2'-O-Methyl-guanosine
  modified_base 96: mod_base = OTHER; note = 2'-O-Methyl-cytidine
  modified_base 97: mod_base = OTHER; note = 2'-O-Methyl-uridine phosphorothioate
  modified_base 98: mod_base = OTHER; note = 2'-O-Methyl-uridine phosphorothioate
  modified_base 99: mod_base = OTHER; note = 2'-O-Methyl-uridine phosphorothioate
  modified_base 100: mod_base = OTHER; note = 2'-O-Methyl-uridine

SEQ ID NO: 1973 - RNA, 100 nt, synthetic construct; identical to SEQ ID NO: 1919
  source 1..100: mol_type = other RNA; note = Description of Artificial Sequence: Synthetic polynucleotide
  modified_base 1: mod_base = OTHER; note = 2'-O-Methyl-cytidine phosphorothioate
  modified_base 2: mod_base = OTHER; note = 2'-O-Methyl-adenosine phosphorothioate
  modified_base 3: mod_base = OTHER; note = 2'-O-Methyl-guanosine
  modified_base 14: mod_base = OTHER; note = Nebularine - ribonebularine
  modified_base 21: mod_base = OTHER; note = 2'-O-Methyl-guanosine
  modified_base 28: mod_base = OTHER; note = 2'-O-Methyl-adenosine
  modified_base 29: mod_base = OTHER; note = 2'-O-Methyl-guanosine
  modified_base 30: mod_base = OTHER; note = 2'-O-Methyl-cytidine
  modified_base 31: mod_base = OTHER; note = 2'-O-Methyl-uridine
  modified_base 32: mod_base = OTHER; note = 2'-O-Methyl-adenosine
  modified_base 33: mod_base = OTHER; note = 2'-O-Methyl-guanosine
  modified_base 34: mod_base = OTHER; note = Nebularine - ribonebularine
  modified_base 35: mod_base = OTHER; note = 2'-O-Methyl-adenosine
  modified_base 36: mod_base = OTHER; note = 2'-O-Methyl-adenosine
  modified_base 37: mod_base = OTHER; note = 2'-O-Methyl-uridine
  modified_base 38: mod_base = OTHER; note = 2'-O-Methyl-adenosine
  modified_base 39: mod_base = OTHER; note = 2'-O-Methyl-guanosine
  modified_base 40: mod_base = OTHER; note = 2'-O-Methyl-cytidine
  modified_base 41: mod_base = OTHER; note = 2'-O-Methyl-adenosine
  modified_base 42: mod_base = OTHER; note = 2'-O-Methyl-adenosine
  modified_base 46: mod_base = OTHER; note = 2'-O-Methyl-adenosine
  modified_base 48: mod_base = OTHER; note = 2'-O-Methyl-adenosine
  modified_base 50: mod_base = OTHER; note = 2'-O-Methyl-uridine
  modified_base 52: mod_base = OTHER; note = 2'-O-Methyl-adenosine
  modified_base 53: mod_base = OTHER; note = 2'-O-Methyl-guanosine
  modified_base 54: mod_base = OTHER; note = 2'-O-Methyl-guanosine
  modified_base 55: mod_base = OTHER; note = 2'-O-Methyl-cytidine
  modified_base 56: mod_base = OTHER; note = 2'-O-Methyl-uridine
  modified_base 57: mod_base = OTHER; note = Nebularine - ribonebularine
  modified_base 60: mod_base = OTHER; note = 2'-O-Methyl-cytidine
  modified_base 61: mod_base = OTHER; note = 2'-O-Methyl-cytidine
  modified_base 65: mod_base = OTHER; note = Nebularine - ribonebularine
  modified_base 66: mod_base = OTHER; note = 2'-O-Methyl-uridine
  modified_base 67: mod_base = OTHER; note = 2'-O-Methyl-cytidine
  modified_base 70: mod_base = OTHER; note = 2'-O-Methyl-cytidine
  modified_base 71: mod_base = OTHER; note = 2'-O-Methyl-uridine
  modified_base 72: mod_base = OTHER; note = 2'-O-Methyl-uridine
  modified_base 73: mod_base = OTHER; note = 2'-O-Methyl-guanosine
  modified_base 74: mod_base = OTHER; note = 2'-O-Methyl-adenosine
  modified_base 75: mod_base = OTHER; note = 2'-O-Methyl-adenosine
  modified_base 76: mod_base = OTHER; note = 2'-O-Methyl-adenosine
  modified_base 77: mod_base = OTHER; note = 2'-O-Methyl-adenosine
  modified_base 78: mod_base = OTHER; note = 2'-O-Methyl-adenosine
  modified_base 79: mod_base = OTHER; note = 2'-O-Methyl-guanosine
  modified_base 80: mod_base = OTHER; note = 2'-O-Methyl-uridine
  modified_base 81: mod_base = OTHER; note = 2'-O-Methyl-guanosine
  modified_base 83: mod_base = OTHER; note = 2'-O-Methyl-cytidine
  modified_base 84: mod_base = OTHER; note = 2'-O-Methyl-adenosine
  modified_base 85: mod_base = OTHER; note = 2'-O-Methyl-cytidine
  modified_base 86: mod_base = OTHER; note = 2'-O-Methyl-cytidine
  modified_base 87: mod_base = OTHER; note = 2'-O-Methyl-guanosine
  modified_base 88: mod_base = OTHER; note = 2'-O-Methyl-adenosine
  modified_base 89: mod_base = OTHER; note = 2'-O-Methyl-guanosine
  modified_base 90: mod_base = OTHER; note = 2'-O-Methyl-uridine
  modified_base 91: mod_base = OTHER; note = 2'-O-Methyl-cytidine
  modified_base 92: mod_base = OTHER; note = 2'-O-Methyl-guanosine
  modified_base 93: mod_base = OTHER; note = 2'-O-Methyl-guanosine
  modified_base 94: mod_base = OTHER; note = 2'-O-Methyl-uridine
  modified_base 95: mod_base = OTHER; note = 2'-O-Methyl-guanosine
  modified_base 96: mod_base = OTHER; note = 2'-O-Methyl-cytidine
  modified_base 97: mod_base = OTHER; note = 2'-O-Methyl-uridine phosphorothioate
  modified_base 98: mod_base = OTHER; note = 2'-O-Methyl-uridine phosphorothioate
  modified_base 99: mod_base = OTHER; note = 2'-O-Methyl-uridine phosphorothioate
  modified_base 100: mod_base = OTHER; note = 2'-O-Methyl-uridine

SEQ ID NO: 1974 - RNA, 100 nt, synthetic construct; identical to SEQ ID NO: 1920
  source 1..100: mol_type = other RNA; note = Description of Artificial Sequence: Synthetic polynucleotide
  modified_base 1: mod_base = OTHER; note = 2'-O-Methyl-cytidine phosphorothioate
  modified_base 2: mod_base = OTHER; note = 2'-O-Methyl-adenosine phosphorothioate
  modified_base 3: mod_base = OTHER; note = 2'-O-Methyl-guanosine
  modified_base 14: mod_base = OTHER; note = Nebularine - ribonebularine
  modified_base 21: mod_base = OTHER; note = 2'-O-Methyl-guanosine
  modified_base 28: mod_base = OTHER; note = Nebularine - ribonebularine
  modified_base 29: mod_base = OTHER; note = 2'-O-Methyl-guanosine
  modified_base 30: mod_base = OTHER; note = 2'-O-Methyl-cytidine
  modified_base 31: mod_base = OTHER; note = 2'-O-Methyl-uridine
  modified_base 32: mod_base = OTHER; note = 2'-O-Methyl-adenosine
  modified_base 33: mod_base = OTHER; note = 2'-O-Methyl-guanosine
  modified_base 34: mod_base = OTHER; note = Nebularine - ribonebularine
  modified_base 35: mod_base = OTHER; note = 2'-O-Methyl-adenosine
  modified_base 36: mod_base = OTHER; note = 2'-O-Methyl-adenosine
  modified_base 37: mod_base = OTHER; note = 2'-O-Methyl-uridine
  modified_base 38: mod_base = OTHER; note = 2'-O-Methyl-adenosine
  modified_base 39: mod_base = OTHER; note = 2'-O-Methyl-guanosine
  modified_base 40: mod_base = OTHER; note = 2'-O-Methyl-cytidine
  modified_base 41: mod_base = OTHER; note = 2'-O-Methyl-adenosine
  modified_base 42: mod_base = OTHER; note = Nebularine - ribonebularine
  modified_base 46: mod_base = OTHER; note = 2'-O-Methyl-adenosine
  modified_base 48: mod_base = OTHER; note = 2'-O-Methyl-adenosine
  modified_base 50: mod_base = OTHER; note = 2'-O-Methyl-uridine
  modified_base 52: mod_base = OTHER; note = 2'-O-Methyl-adenosine
  modified_base 53: mod_base = OTHER; note = 2'-O-Methyl-guanosine
  modified_base 54: mod_base = OTHER; note = 2'-O-Methyl-guanosine
  modified_base 55: mod_base = OTHER; note = 2'-O-Methyl-cytidine
  modified_base 56: mod_base = OTHER; note = 2'-O-Methyl-uridine
  modified_base 57: mod_base = OTHER; note = Nebularine - ribonebularine
  modified_base 60: mod_base = OTHER; note = 2'-O-Methyl-cytidine
  modified_base 61: mod_base = OTHER; note = 2'-O-Methyl-cytidine
  modified_base 65: mod_base = OTHER; note = Nebularine - ribonebularine
  modified_base 66: mod_base = OTHER; note = 2'-O-Methyl-uridine
  modified_base 67: mod_base = OTHER; note = 2'-O-Methyl-cytidine
  modified_base 70: mod_base = OTHER; note = 2'-O-Methyl-cytidine
  modified_base 71: mod_base = OTHER; note = 2'-O-Methyl-uridine
  modified_base 72: mod_base = OTHER; note = 2'-O-Methyl-uridine
  modified_base 73: mod_base = OTHER; note = 2'-O-Methyl-guanosine
  modified_base 74: mod_base = OTHER; note = 2'-O-Methyl-adenosine
  modified_base 75: mod_base = OTHER; note = 2'-O-Methyl-adenosine
  modified_base 76: mod_base = OTHER; note = 2'-O-Methyl-adenosine
  modified_base 77: mod_base = OTHER; note = 2'-O-Methyl-adenosine
  modified_base 78: mod_base = OTHER; note = 2'-O-Methyl-adenosine
  modified_base 79: mod_base = OTHER; note = 2'-O-Methyl-guanosine
  modified_base 80: mod_base = OTHER; note = 2'-O-Methyl-uridine
  modified_base 81: mod_base = OTHER; note = 2'-O-Methyl-guanosine
  modified_base 83: mod_base = OTHER; note = 2'-O-Methyl-cytidine
  modified_base 84: mod_base = OTHER; note = 2'-O-Methyl-adenosine
  modified_base 85: mod_base = OTHER; note = 2'-O-Methyl-cytidine
  modified_base 86: mod_base = OTHER; note = 2'-O-Methyl-cytidine
  modified_base 87: mod_base = OTHER; note = 2'-O-Methyl-guanosine
  modified_base 88: mod_base = OTHER; note = 2'-O-Methyl-adenosine
  modified_base 89: mod_base = OTHER; note = 2'-O-Methyl-guanosine
  modified_base 90: mod_base = OTHER; note = 2'-O-Methyl-uridine
  modified_base 91: mod_base = OTHER; note = 2'-O-Methyl-cytidine
  modified_base 92: mod_base = OTHER; note = 2'-O-Methyl-guanosine
  modified_base 93: mod_base = OTHER; note = 2'-O-Methyl-guanosine
  modified_base 94: mod_base = OTHER; note = 2'-O-Methyl-uridine
  modified_base 95: mod_base = OTHER; note = 2'-O-Methyl-guanosine
  modified_base 96: mod_base = OTHER; note = 2'-O-Methyl-cytidine
  modified_base 97: mod_base = OTHER; note = 2'-O-Methyl-uridine phosphorothioate
  modified_base 98: mod_base = OTHER; note = 2'-O-Methyl-uridine phosphorothioate
  modified_base 99: mod_base = OTHER; note = 2'-O-Methyl-uridine phosphorothioate
  modified_base 100: mod_base = OTHER; note = 2'-O-Methyl-uridine

SEQ ID NO: 1975 - RNA, 100 nt, synthetic construct; identical to SEQ ID NO: 1921
  source 1..100: mol_type = other RNA; note = Description of Artificial Sequence: Synthetic polynucleotide
  modified_base 1: mod_base = OTHER; note = 2'-O-Methyl-cytidine phosphorothioate
  modified_base 2: mod_base = OTHER; note = 2'-O-Methyl-adenosine phosphorothioate
  modified_base 3: mod_base = OTHER; note = 2'-O-Methyl-guanosine
  modified_base 9: mod_base = OTHER; note = Nebularine - ribonebularine
  modified_base 14: mod_base = OTHER; note = Nebularine - ribonebularine
  modified_base 21: mod_base = OTHER; note = 2'-O-Methyl-guanosine
  modified_base 28: mod_base = OTHER; note = Nebularine - 2'-O-methylnebularine
  modified_base 29: mod_base = OTHER; note = 2'-O-Methyl-guanosine
  modified_base 30: mod_base = OTHER; note = 2'-O-Methyl-cytidine
  modified_base 31: mod_base = OTHER; note = 2'-O-Methyl-uridine
  modified_base 32: mod_base = OTHER; note = 2'-O-Methyl-adenosine
  modified_base 33: mod_base = OTHER; note = 2'-O-Methyl-guanosine
  modified_base 34: mod_base = OTHER; note = Nebularine - 2'-O-methylnebularine
  modified_base 35: mod_base = OTHER; note = 2'-O-Methyl-adenosine
  modified_base 36: mod_base = OTHER; note = 2'-O-Methyl-adenosine
  modified_base 37: mod_base = OTHER; note = 2'-O-Methyl-uridine
  modified_base 38: mod_base = OTHER; note = 2'-O-Methyl-adenosine
  modified_base 39: mod_base = OTHER; note = 2'-O-Methyl-guanosine
  modified_base 40: mod_base = OTHER; note = 2'-O-Methyl-cytidine
  modified_base 41: mod_base = OTHER; note = 2'-O-Methyl-adenosine
  modified_base 42: mod_base = OTHER; note = Nebularine - 2'-O-methylnebularine
  modified_base 46: mod_base = OTHER; note = 2'-O-Methyl-adenosine
  modified_base 48: mod_base = OTHER; note = 2'-O-Methyl-adenosine
  modified_base 50: mod_base = OTHER; note = 2'-O-Methyl-uridine
  modified_base 52: mod_base = OTHER; note = 2'-O-Methyl-adenosine
  modified_base 53: mod_base = OTHER; note = 2'-O-Methyl-guanosine
  modified_base 54: mod_base = OTHER; note = 2'-O-Methyl-guanosine
  modified_base 55: mod_base = OTHER; note = 2'-O-Methyl-cytidine
  modified_base 56: mod_base = OTHER; note = 2'-O-Methyl-uridine
  modified_base 57: mod_base = OTHER; note = Nebularine - 2'-O-methylnebularine
  modified_base 60: mod_base = OTHER; note = 2'-O-Methyl-cytidine
  modified_base 61: mod_base = OTHER; note = 2'-O-Methyl-cytidine
  modified_base 66: mod_base = OTHER; note = 2'-O-Methyl-uridine
  modified_base 67: mod_base = OTHER; note = 2'-O-Methyl-cytidine
  modified_base 70: mod_base = OTHER; note = 2'-O-Methyl-cytidine
  modified_base 71: mod_base = OTHER; note = 2'-O-Methyl-uridine
  modified_base 72: mod_base = OTHER; note = 2'-O-Methyl-uridine
  modified_base 73: mod_base = OTHER; note = 2'-O-Methyl-guanosine
  modified_base 74: mod_base = OTHER; note = 2'-O-Methyl-adenosine
  modified_base 75: mod_base = OTHER; note = 2'-O-Methyl-adenosine
  modified_base 76: mod_base = OTHER; note = 2'-O-Methyl-adenosine
  modified_base 77: mod_base = OTHER; note = 2'-O-Methyl-adenosine
  modified_base 78: mod_base = OTHER; note = 2'-O-Methyl-adenosine
  modified_base 79: mod_base = OTHER; note = 2'-O-Methyl-guanosine
  modified_base 80: mod_base = OTHER; note = 2'-O-Methyl-uridine
  modified_base 81: mod_base = OTHER; note = 2'-O-Methyl-guanosine
  modified_base 83: mod_base = OTHER; note = 2'-O-Methyl-cytidine
  modified_base 84: mod_base = OTHER; note = 2'-O-Methyl-adenosine
  modified_base 85: mod_base = OTHER; note = 2'-O-Methyl-cytidine
  modified_base 86: mod_base = OTHER; note = 2'-O-Methyl-cytidine
  modified_base 87: mod_base = OTHER; note = 2'-O-Methyl-guanosine
  modified_base 88: mod_base = OTHER; note = 2'-O-Methyl-adenosine
  modified_base 89: mod_base = OTHER; note = 2'-O-Methyl-guanosine
  modified_base 90: mod_base = OTHER; note = 2'-O-Methyl-uridine
  modified_base 91: mod_base = OTHER; note = 2'-O-Methyl-cytidine
  modified_base 92: mod_base = OTHER; note = 2'-O-Methyl-guanosine
  modified_base 93: mod_base = OTHER; note = 2'-O-Methyl-guanosine
  modified_base 94: mod_base = OTHER; note = 2'-O-Methyl-uridine
  modified_base 95: mod_base = OTHER; note = 2'-O-Methyl-guanosine
  modified_base 96: mod_base = OTHER; note = 2'-O-Methyl-cytidine
  modified_base 97: mod_base = OTHER; note = 2'-O-Methyl-uridine phosphorothioate
  modified_base 98: mod_base = OTHER; note = 2'-O-Methyl-uridine phosphorothioate
  modified_base 99: mod_base = OTHER; note = 2'-O-Methyl-uridine phosphorothioate
  modified_base 100: mod_base = OTHER; note = 2'-O-Methyl-uridine

SEQ ID NO: 1976 - RNA, 100 nt, synthetic construct; identical to SEQ ID NO: 1922
  source 1..100: mol_type = other RNA; note = Description of Artificial Sequence: Synthetic polynucleotide
  modified_base 1: mod_base = OTHER; note = 2'-O-Methyl-cytidine phosphorothioate
  modified_base 2: mod_base = OTHER; note = 2'-O-Methyl-adenosine phosphorothioate
  modified_base 3: mod_base = OTHER; note = 2'-O-Methyl-guanosine
  modified_base 9: mod_base = OTHER; note = Nebularine - ribonebularine
  modified_base 14: mod_base = OTHER; note = Nebularine - ribonebularine
  modified_base 21: mod_base = OTHER; note = 2'-O-Methyl-guanosine
  modified_base 28: mod_base = OTHER; note = 2'-O-Methyl-adenosine
  modified_base 29: mod_base = OTHER; note = 2'-O-Methyl-guanosine
  modified_base 30: mod_base = OTHER; note = 2'-O-Methyl-cytidine
  modified_base 31: mod_base = OTHER; note = 2'-O-Methyl-uridine
  modified_base 32: mod_base = OTHER; note = 2'-O-Methyl-adenosine
  modified_base 33: mod_base = OTHER; note = 2'-O-Methyl-guanosine
  modified_base 34: mod_base = OTHER; note = Nebularine - 2'-O-methylnebularine
  modified_base 35: mod_base = OTHER; note = 2'-O-Methyl-adenosine
  modified_base 36: mod_base = OTHER; note = 2'-O-Methyl-adenosine
  modified_base 37: mod_base = OTHER; note = 2'-O-Methyl-uridine
  modified_base 38: mod_base = OTHER; note = 2'-O-Methyl-adenosine
  modified_base 39: mod_base = OTHER; note = 2'-O-Methyl-guanosine
  modified_base 40: mod_base = OTHER; note = 2'-O-Methyl-cytidine
  modified_base 41: mod_base = OTHER; note = 2'-O-Methyl-adenosine
  modified_base 42: mod_base = OTHER; note = Nebularine - 2'-O-methylnebularine
  modified_base 46: mod_base = OTHER; note = 2'-O-Methyl-adenosine
  modified_base 48: mod_base = OTHER; note = 2'-O-Methyl-adenosine
  modified_base 50: mod_base = OTHER; note = 2'-O-Methyl-uridine
  modified_base 52: mod_base = OTHER; note = 2'-O-Methyl-adenosine
  modified_base 53: mod_base = OTHER; note = 2'-O-Methyl-guanosine
  modified_base 54: mod_base = OTHER; note = 2'-O-Methyl-guanosine
  modified_base 55: mod_base = OTHER; note = 2'-O-Methyl-cytidine
  modified_base 56: mod_base = OTHER; note = 2'-O-Methyl-uridine
  modified_base 57: mod_base = OTHER; note = Nebularine - 2'-O-methylnebularine
  modified_base 60: mod_base = OTHER; note = 2'-O-Methyl-cytidine
  modified_base 61: mod_base = OTHER; note = 2'-O-Methyl-cytidine
  modified_base 66: mod_base = OTHER; note = 2'-O-Methyl-uridine
  modified_base 67: mod_base = OTHER; note = 2'-O-Methyl-cytidine
  modified_base 70: mod_base = OTHER; note = 2'-O-Methyl-cytidine
  modified_base 71: mod_base = OTHER; note = 2'-O-Methyl-uridine
  modified_base 72: mod_base = OTHER; note = 2'-O-Methyl-uridine
  modified_base 73: mod_base = OTHER; note = 2'-O-Methyl-guanosine
  modified_base 74: mod_base = OTHER; note = 2'-O-Methyl-adenosine
  modified_base 75: mod_base = OTHER; note = 2'-O-Methyl-adenosine
  modified_base 76: mod_base = OTHER; note = 2'-O-Methyl-adenosine
  modified_base 77: mod_base = OTHER; note = 2'-O-Methyl-adenosine
  modified_base 78: mod_base = OTHER; note = 2'-O-Methyl-adenosine
  modified_base 79: mod_base = OTHER; note = 2'-O-Methyl-guanosine
  modified_base 80: mod_base = OTHER; note = 2'-O-Methyl-uridine
  modified_base 81: mod_base = OTHER; note = 2'-O-Methyl-guanosine
  modified_base 83: mod_base = OTHER; note = 2'-O-Methyl-cytidine
  modified_base 84: mod_base = OTHER; note = 2'-O-Methyl-adenosine
  modified_base 85: mod_base = OTHER; note = 2'-O-Methyl-cytidine
  modified_base 86: mod_base = OTHER; note = 2'-O-Methyl-cytidine
  modified_base 87: mod_base = OTHER; note = 2'-O-Methyl-guanosine
  modified_base 88: mod_base = OTHER; note = 2'-O-Methyl-adenosine
  modified_base 89: mod_base = OTHER; note = 2'-O-Methyl-guanosine
  modified_base 90: mod_base = OTHER; note = 2'-O-Methyl-uridine
  modified_base 91: mod_base = OTHER; note = 2'-O-Methyl-cytidine
  modified_base 92: mod_base = OTHER; note = 2'-O-Methyl-guanosine
  modified_base 93: mod_base = OTHER; note = 2'-O-Methyl-guanosine
  modified_base 94: mod_base = OTHER; note = 2'-O-Methyl-uridine
  modified_base 95: mod_base = OTHER; note = 2'-O-Methyl-guanosine
  modified_base 96: mod_base = OTHER; note = 2'-O-Methyl-cytidine
  modified_base 97: mod_base = OTHER; note = 2'-O-Methyl-uridine phosphorothioate
  modified_base 98: mod_base = OTHER; note = 2'-O-Methyl-uridine phosphorothioate
  modified_base 99: mod_base = OTHER; note = 2'-O-Methyl-uridine phosphorothioate
  modified_base 100: mod_base = OTHER; note = 2'-O-Methyl-uridine

SEQ ID NO: 1977 - RNA, 100 nt, synthetic construct; identical to SEQ ID NO: 1923
  source 1..100: mol_type = other RNA; note = Description of Artificial Sequence: Synthetic polynucleotide
  modified_base 1: mod_base = OTHER; note = 2'-O-Methyl-cytidine phosphorothioate
  modified_base 2: mod_base = OTHER; note = 2'-O-Methyl-adenosine phosphorothioate
  modified_base 3: mod_base = OTHER; note = 2'-O-Methyl-guanosine
  modified_base 9: mod_base = OTHER; note = Nebularine - ribonebularine
  modified_base 14: mod_base = OTHER; note = Nebularine - ribonebularine
  modified_base 21: mod_base = OTHER; note = 2'-O-Methyl-guanosine
  modified_base 28: mod_base = OTHER; note = 2'-O-Methyl-adenosine
  modified_base 29: mod_base = OTHER; note = 2'-O-Methyl-guanosine
  modified_base 30: mod_base = OTHER; note = 2'-O-Methyl-cytidine
  modified_base 31: mod_base = OTHER; note = 2'-O-Methyl-uridine
  modified_base 32: mod_base = OTHER; note = 2'-O-Methyl-adenosine
  modified_base 33: mod_base = OTHER; note = 2'-O-Methyl-guanosine
  modified_base 34: mod_base = OTHER; note = 2'-O-Methyl-adenosine
  modified_base 35: mod_base = OTHER; note = 2'-O-Methyl-adenosine
  modified_base 36: mod_base = OTHER; note = 2'-O-Methyl-adenosine
  modified_base 37: mod_base = OTHER; note = 2'-O-Methyl-uridine
  modified_base 38: mod_base = OTHER; note = 2'-O-Methyl-adenosine
  modified_base 39: mod_base = OTHER; note = 2'-O-Methyl-guanosine
  modified_base 40: mod_base = OTHER; note = 2'-O-Methyl-cytidine
  modified_base 41: mod_base = OTHER; note = 2'-O-Methyl-adenosine
  modified_base 42: mod_base = OTHER; note = Nebularine - 2'-O-methylnebularine
  modified_base 46: mod_base = OTHER; note = 2'-O-Methyl-adenosine
  modified_base 48: mod_base = OTHER; note = 2'-O-Methyl-adenosine
  modified_base 50: mod_base = OTHER; note = 2'-O-Methyl-uridine
  modified_base 52: mod_base = OTHER; note = 2'-O-Methyl-adenosine
  modified_base 53: mod_base = OTHER; note = 2'-O-Methyl-guanosine
  modified_base 54: mod_base = OTHER; note = 2'-O-Methyl-guanosine
  modified_base 55: mod_base = OTHER; note = 2'-O-Methyl-cytidine
  modified_base 56: mod_base = OTHER; note = 2'-O-Methyl-uridine
  modified_base 57: mod_base = OTHER; note = Nebularine - 2'-O-methylnebularine
  modified_base 60: mod_base = OTHER; note = 2'-O-Methyl-cytidine
  modified_base 61: mod_base = OTHER; note = 2'-O-Methyl-cytidine
  modified_base 66: mod_base = OTHER; note = 2'-O-Methyl-uridine
  modified_base 67: mod_base = OTHER; note = 2'-O-Methyl-cytidine
  modified_base 70: mod_base = OTHER; note = 2'-O-Methyl-cytidine
  modified_base 71: mod_base = OTHER; note = 2'-O-Methyl-uridine
  modified_base 72: mod_base = OTHER; note = 2'-O-Methyl-uridine
  modified_base 73: mod_base = OTHER; note = 2'-O-Methyl-guanosine
  modified_base 74: mod_base = OTHER; note = 2'-O-Methyl-adenosine
  modified_base 75: mod_base = OTHER; note = 2'-O-Methyl-adenosine
  modified_base 76: mod_base = OTHER; note = 2'-O-Methyl-adenosine
  modified_base 77: mod_base = OTHER; note = 2'-O-Methyl-adenosine
  modified_base 78: mod_base = OTHER; note = 2'-O-Methyl-adenosine
  modified_base 79: mod_base = OTHER; note = 2'-O-Methyl-guanosine
  modified_base 80: mod_base = OTHER; note = 2'-O-Methyl-uridine
  modified_base 81: mod_base = OTHER; note = 2'-O-Methyl-guanosine
  modified_base 83: mod_base = OTHER; note = 2'-O-Methyl-cytidine
  modified_base 84: mod_base = OTHER; note = 2'-O-Methyl-adenosine
  modified_base 85: mod_base = OTHER; note = 2'-O-Methyl-cytidine
  modified_base 86: mod_base = OTHER; note = 2'-O-Methyl-cytidine
  modified_base 87: mod_base = OTHER; note = 2'-O-Methyl-guanosine
  modified_base 88: mod_base = OTHER; note = 2'-O-Methyl-adenosine
  modified_base 89: mod_base = OTHER; note = 2'-O-Methyl-guanosine
  modified_base 90: mod_base = OTHER; note = 2'-O-Methyl-uridine
  modified_base 91: mod_base = OTHER; note = 2'-O-Methyl-cytidine
  modified_base 92: mod_base = OTHER; note = 2'-O-Methyl-guanosine
  modified_base 93: mod_base = OTHER; note = 2'-O-Methyl-guanosine
  modified_base 94: mod_base = OTHER; note = 2'-O-Methyl-uridine
  modified_base 95: mod_base = OTHER; note = 2'-O-Methyl-guanosine
  modified_base 96: mod_base = OTHER; note = 2'-O-Methyl-cytidine
  modified_base 97: mod_base = OTHER; note = 2'-O-Methyl-uridine phosphorothioate
  modified_base 98: mod_base = OTHER; note = 2'-O-Methyl-uridine phosphorothioate
  modified_base 99: mod_base = OTHER; note = 2'-O-Methyl-uridine phosphorothioate
  modified_base 100: mod_base = OTHER; note = 2'-O-Methyl-uridine

SEQ ID NO: 1978 - RNA, 100 nt, synthetic construct; identical to SEQ ID NO: 1924
  source 1..100: mol_type = other RNA; note = Description of Artificial Sequence: Synthetic polynucleotide
  modified_base 1: mod_base = OTHER; note = 2'-O-Methyl-cytidine phosphorothioate
  modified_base 2: mod_base = OTHER; note = 2'-O-Methyl-adenosine phosphorothioate
  modified_base 3: mod_base = OTHER; note = 2'-O-Methyl-guanosine
  modified_base 9: mod_base = OTHER; note = Nebularine - ribonebularine
  modified_base 14: mod_base = OTHER; note = Nebularine - ribonebularine
  modified_base 21: mod_base = OTHER; note = 2'-O-Methyl-guanosine
  modified_base 28: mod_base = OTHER; note = 2'-O-Methyl-adenosine
  modified_base 29: mod_base = OTHER; note = 2'-O-Methyl-guanosine
  modified_base 30: mod_base = OTHER; note = 2'-O-Methyl-cytidine
  modified_base 31: mod_base = OTHER; note = 2'-O-Methyl-uridine
  modified_base 32: mod_base = OTHER; note = 2'-O-Methyl-adenosine
  modified_base 33: mod_base = OTHER; note = 2'-O-Methyl-guanosine
  modified_base 34: mod_base = OTHER; note = 2'-O-Methyl-adenosine
  modified_base 35: mod_base = OTHER; note = 2'-O-Methyl-adenosine
  modified_base 36: mod_base = OTHER; note = 2'-O-Methyl-adenosine
  modified_base 37: mod_base = OTHER; note = 2'-O-Methyl-uridine
  modified_base 38: mod_base = OTHER; note = 2'-O-Methyl-adenosine
  modified_base 39: mod_base = OTHER; note = 2'-O-Methyl-guanosine
  modified_base 40: mod_base = OTHER; note = 2'-O-Methyl-cytidine
  modified_base 41: mod_base = OTHER; note = 2'-O-Methyl-adenosine
  modified_base 42: mod_base = OTHER; note = 2'-O-Methyl-adenosine
  modified_base 46: mod_base = OTHER; note = 2'-O-Methyl-adenosine
  modified_base 48: mod_base = OTHER; note = 2'-O-Methyl-adenosine
  modified_base 50: mod_base = OTHER; note = 2'-O-Methyl-uridine
  modified_base 52: mod_base = OTHER; note = 2'-O-Methyl-adenosine
  modified_base 53: mod_base = OTHER; note = 2'-O-Methyl-guanosine
  modified_base 54: mod_base = OTHER; note = 2'-O-Methyl-guanosine
  modified_base 55: mod_base = OTHER; note = 2'-O-Methyl-cytidine
  modified_base 56: mod_base = OTHER; note = 2'-O-Methyl-uridine
  modified_base 57: mod_base = OTHER; note = Nebularine - 2'-O-methylnebularine
  modified_base 60: mod_base = OTHER; note = 2'-O-Methyl-cytidine
  modified_base 61: mod_base = OTHER; note = 2'-O-Methyl-cytidine
  modified_base 66: mod_base = OTHER; note = 2'-O-Methyl-uridine
  modified_base 67: mod_base = OTHER; note = 2'-O-Methyl-cytidine
  modified_base 70: mod_base = OTHER; note = 2'-O-Methyl-cytidine
  modified_base 71: mod_base = OTHER; note = 2'-O-Methyl-uridine
  modified_base 72: mod_base = OTHER; note = 2'-O-Methyl-uridine
  modified_base 73: mod_base = OTHER; note = 2'-O-Methyl-guanosine
  modified_base 74: mod_base = OTHER; note = 2'-O-Methyl-adenosine
  modified_base 75: mod_base = OTHER; note = 2'-O-Methyl-adenosine
  modified_base 76: mod_base = OTHER; note = 2'-O-Methyl-adenosine
  modified_base 77: mod_base = OTHER; note = 2'-O-Methyl-adenosine
  modified_base 78: mod_base = OTHER; note = 2'-O-Methyl-adenosine
  modified_base 79: mod_base = OTHER; note = 2'-O-Methyl-guanosine
  modified_base 80: mod_base = OTHER; note = 2'-O-Methyl-uridine
  modified_base 81: mod_base = OTHER; note = 2'-O-Methyl-guanosine
  modified_base 83: mod_base = OTHER; note = 2'-O-Methyl-cytidine
  modified_base 84: mod_base = OTHER; note = 2'-O-Methyl-adenosine
  modified_base 85: mod_base = OTHER; note = 2'-O-Methyl-cytidine
  modified_base 86: mod_base = OTHER; note = 2'-O-Methyl-cytidine
  modified_base 87: mod_base = OTHER; note = 2'-O-Methyl-guanosine
  modified_base 88: mod_base = OTHER; note = 2'-O-Methyl-adenosine
  modified_base 89: mod_base = OTHER; note = 2'-O-Methyl-guanosine
  modified_base 90: mod_base = OTHER; note = 2'-O-Methyl-uridine
  modified_base 91: mod_base = OTHER; note = 2'-O-Methyl-cytidine
  modified_base 92: mod_base = OTHER; note = 2'-O-Methyl-guanosine
  modified_base 93: mod_base = OTHER; note = 2'-O-Methyl-guanosine
  modified_base 94: mod_base = OTHER; note = 2'-O-Methyl-uridine
  modified_base 95: mod_base = OTHER; note = 2'-O-Methyl-guanosine
  modified_base 96: mod_base = OTHER; note = 2'-O-Methyl-cytidine
  modified_base 97: mod_base = OTHER; note = 2'-O-Methyl-uridine phosphorothioate
  modified_base 98: mod_base = OTHER; note = 2'-O-Methyl-uridine phosphorothioate
  modified_base 99: mod_base = OTHER; note = 2'-O-Methyl-uridine phosphorothioate
  modified_base 100: mod_base = OTHER; note = 2'-O-Methyl-uridine

SEQ ID NO: 1979 - RNA, 100 nt, synthetic construct; identical to SEQ ID NO: 1925
  source 1..100: mol_type = other RNA; note = Description of Artificial Sequence: Synthetic polynucleotide
  modified_base 1: mod_base = OTHER; note = 2'-O-Methyl-cytidine phosphorothioate
  modified_base 2: mod_base = OTHER; note = 2'-O-Methyl-adenosine phosphorothioate
  modified_base 3: mod_base = OTHER; note = 2'-O-Methyl-guanosine
  modified_base 9: mod_base = OTHER; note = Nebularine - ribonebularine
  modified_base 14: mod_base = OTHER; note = Nebularine - ribonebularine
  modified_base 21: mod_base = OTHER; note = 2'-O-Methyl-guanosine
  modified_base 28: mod_base = OTHER; note = Nebularine - 2'-O-methylnebularine
  modified_base 29: mod_base = OTHER; note = 2'-O-Methyl-guanosine
  modified_base 30: mod_base = OTHER; note = 2'-O-Methyl-cytidine
  modified_base 31: mod_base = OTHER; note = 2'-O-Methyl-uridine
  modified_base 32: mod_base = OTHER; note = 2'-O-Methyl-adenosine
  modified_base 33: mod_base = OTHER; note = 2'-O-Methyl-guanosine
  modified_base 34: mod_base = OTHER; note = 2'-O-Methyl-adenosine
  modified_base 35: mod_base = OTHER; note = 2'-O-Methyl-adenosine
  modified_base 36: mod_base = OTHER; note = 2'-O-Methyl-adenosine
  modified_base 37: mod_base = OTHER; note = 2'-O-Methyl-uridine
  modified_base 38: mod_base = OTHER; note = 2'-O-Methyl-adenosine
  modified_base 39: mod_base = OTHER; note = 2'-O-Methyl-guanosine
  modified_base 40: mod_base = OTHER; note = 2'-O-Methyl-cytidine
  modified_base 41: mod_base = OTHER; note = 2'-O-Methyl-adenosine
  modified_base 42: mod_base = OTHER; note = 2'-O-Methyl-adenosine
  modified_base 46: mod_base = OTHER; note = 2'-O-Methyl-adenosine
  modified_base 48: mod_base = OTHER; note = 2'-O-Methyl-adenosine
  modified_base 50: mod_base = OTHER; note = 2'-O-Methyl-uridine
  modified_base 52: mod_base = OTHER; note = 2'-O-Methyl-adenosine
  modified_base 53: mod_base = OTHER; note = 2'-O-Methyl-guanosine
  modified_base 54: mod_base = OTHER; note = 2'-O-Methyl-guanosine
  modified_base 55: mod_base = OTHER; note = 2'-O-Methyl-cytidine
  modified_base 56: mod_base = OTHER; note = 2'-O-Methyl-uridine
  modified_base 57: mod_base = OTHER; note = 2'-O-Methyl-adenosine
  modified_base 60: mod_base = OTHER; note = 2'-O-Methyl-cytidine
  modified_base 61: mod_base = OTHER; note = 2'-O-Methyl-cytidine
  modified_base 66: mod_base = OTHER; note = 2'-O-Methyl-uridine
  modified_base 67: mod_base = OTHER; note = 2'-O-Methyl-cytidine
  modified_base 70: mod_base = OTHER; note = 2'-O-Methyl-cytidine
  modified_base 71: mod_base = OTHER; note = 2'-O-Methyl-uridine
  modified_base 72: mod_base = OTHER; note = 2'-O-Methyl-uridine
  modified_base 73: mod_base = OTHER; note = 2'-O-Methyl-guanosine
  modified_base 74: mod_base = OTHER; note = 2'-O-Methyl-adenosine
  modified_base 75: mod_base = OTHER; note = 2'-O-Methyl-adenosine
  modified_base 76: mod_base = OTHER; note = 2'-O-Methyl-adenosine
  modified_base 77: mod_base = OTHER; note = 2'-O-Methyl-adenosine
  modified_base 78: mod_base = OTHER; note = 2'-O-Methyl-adenosine
  modified_base 79: mod_base = OTHER; note = 2'-O-Methyl-guanosine
  modified_base 80: mod_base = OTHER; note = 2'-O-Methyl-uridine
  modified_base 81: mod_base = OTHER; note = 2'-O-Methyl-guanosine
  modified_base 83: mod_base = OTHER; note = 2'-O-Methyl-cytidine
  modified_base 84: mod_base = OTHER; note = 2'-O-Methyl-adenosine
  modified_base 85: mod_base = OTHER; note = 2'-O-Methyl-cytidine
  modified_base 86: mod_base = OTHER; note = 2'-O-Methyl-cytidine
  modified_base 87: mod_base = OTHER; note = 2'-O-Methyl-guanosine
  modified_base 88: mod_base = OTHER; note = 2'-O-Methyl-adenosine
  modified_base 89: mod_base = OTHER; note = 2'-O-Methyl-guanosine
  modified_base 90: mod_base = OTHER; note = 2'-O-Methyl-uridine
  modified_base 91: mod_base = OTHER; note = 2'-O-Methyl-cytidine
  modified_base 92: mod_base = OTHER; note = 2'-O-Methyl-guanosine
  modified_base 93: mod_base = OTHER; note = 2'-O-Methyl-guanosine
  modified_base 94: mod_base = OTHER; note = 2'-O-Methyl-uridine
  modified_base 95: mod_base = OTHER; note = 2'-O-Methyl-guanosine
  modified_base 96: mod_base = OTHER; note = 2'-O-Methyl-cytidine
  modified_base 97: mod_base = OTHER; note = 2'-O-Methyl-uridine phosphorothioate
  modified_base 98: mod_base = OTHER; note = 2'-O-Methyl-uridine phosphorothioate
  modified_base 99: mod_base = OTHER; note = 2'-O-Methyl-uridine phosphorothioate
  modified_base 100: mod_base = OTHER; note = 2'-O-Methyl-uridine

SEQ ID NO: 1980 - RNA, 100 nt, synthetic construct; identical to SEQ ID NO: 1926
  source 1..100: mol_type = other RNA; note = Description of Artificial Sequence: Synthetic polynucleotide
  modified_base 1: mod_base = OTHER; note = 2'-O-Methyl-cytidine phosphorothioate
  modified_base 2: mod_base = OTHER; note = 2'-O-Methyl-adenosine phosphorothioate
  modified_base 3: mod_base = OTHER; note = 2'-O-Methyl-guanosine
  modified_base 9: mod_base = OTHER; note = Nebularine - ribonebularine
  modified_base 14: mod_base = OTHER; note = Nebularine - ribonebularine
  modified_base 21: mod_base = OTHER; note = 2'-O-Methyl-guanosine
  modified_base 28: mod_base = OTHER; note = 2'-O-Methyl-adenosine
  modified_base 29: mod_base = OTHER; note = 2'-O-Methyl-guanosine
  modified_base 30: mod_base = OTHER; note = 2'-O-Methyl-cytidine
  modified_base 31: mod_base = OTHER; note = 2'-O-Methyl-uridine
  modified_base 32: mod_base = OTHER; note = 2'-O-Methyl-adenosine
  modified_base 33: mod_base = OTHER; note = 2'-O-Methyl-guanosine
  modified_base 34: mod_base = OTHER; note = 2'-O-Methyl-adenosine
  modified_base 35: mod_base = OTHER; note = 2'-O-Methyl-adenosine
  modified_base 36: mod_base = OTHER; note = 2'-O-Methyl-adenosine
  modified_base 37: mod_base = OTHER; note = 2'-O-Methyl-uridine
  modified_base 38: mod_base = OTHER; note = 2'-O-Methyl-adenosine
  modified_base 39: mod_base = OTHER; note = 2'-O-Methyl-guanosine
  modified_base 40: mod_base = OTHER; note = 2'-O-Methyl-cytidine
  modified_base 41: mod_base = OTHER; note = 2'-O-Methyl-adenosine
  modified_base 42: mod_base = OTHER; note = Nebularine - 2'-O-methylnebularine
  modified_base 46: mod_base = OTHER; note = 2'-O-Methyl-adenosine
  modified_base 48: mod_base = OTHER; note = 2'-O-Methyl-adenosine
  modified_base 50: mod_base = OTHER; note = 2'-O-Methyl-uridine
  modified_base 52: mod_base = OTHER; note = 2'-O-Methyl-adenosine
  modified_base 53: mod_base = OTHER; note = 2'-O-Methyl-guanosine
  modified_base 54: mod_base = OTHER; note = 2'-O-Methyl-guanosine
  modified_base 55: mod_base = OTHER; note = 2'-O-Methyl-cytidine
  modified_base 56: mod_base = OTHER; note = 2'-O-Methyl-uridine
  modified_base 57: mod_base = OTHER; note = 2'-O-Methyl-adenosine
  modified_base 60: mod_base = OTHER; note = 2'-O-Methyl-cytidine
  modified_base 61: mod_base = OTHER; note = 2'-O-Methyl-cytidine
  modified_base 66: mod_base = OTHER; note = 2'-O-Methyl-uridine
  modified_base 67: mod_base = OTHER; note = 2'-O-Methyl-cytidine
  modified_base 70: mod_base = OTHER; note = 2'-O-Methyl-cytidine
  modified_base 71: mod_base = OTHER; note = 2'-O-Methyl-uridine
  modified_base 72: mod_base = OTHER; note = 2'-O-Methyl-uridine
  modified_base 73: mod_base = OTHER; note = 2'-O-Methyl-guanosine
  modified_base 74: mod_base = OTHER; note = 2'-O-Methyl-adenosine
  modified_base 75: mod_base = OTHER; note = 2'-O-Methyl-adenosine
  modified_base 76: mod_base = OTHER; note = 2'-O-Methyl-adenosine
  modified_base 77: mod_base = OTHER; note = 2'-O-Methyl-adenosine
  modified_base 78: mod_base = OTHER; note = 2'-O-Methyl-adenosine
  modified_base 79: mod_base = OTHER; note = 2'-O-Methyl-guanosine
  modified_base 80: mod_base = OTHER; note = 2'-O-Methyl-uridine
  modified_base 81: mod_base = OTHER; note = 2'-O-Methyl-guanosine
  modified_base 83: mod_base = OTHER; note = 2'-O-Methyl-cytidine
  modified_base 84: mod_base = OTHER; note = 2'-O-Methyl-adenosine
  modified_base 85: mod_base = OTHER; note = 2'-O-Methyl-cytidine
  modified_base 86: mod_base = OTHER; note = 2'-O-Methyl-cytidine
  modified_base 87: mod_base = OTHER; note = 2'-O-Methyl-guanosine
  modified_base 88: mod_base = OTHER; note = 2'-O-Methyl-adenosine
  modified_base 89: mod_base = OTHER; note = 2'-O-Methyl-guanosine
  modified_base 90: mod_base = OTHER; note = 2'-O-Methyl-uridine
  modified_base 91: mod_base = OTHER; note = 2'-O-Methyl-cytidine
  modified_base 92: mod_base = OTHER; note = 2'-O-Methyl-guanosine
  modified_base 93: mod_base = OTHER; note = 2'-O-Methyl-guanosine
  modified_base 94: mod_base = OTHER; note = 2'-O-Methyl-uridine
  modified_base 95: mod_base = OTHER; note = 2'-O-Methyl-guanosine
  modified_base 96: mod_base = OTHER; note = 2'-O-Methyl-cytidine
  modified_base 97: mod_base = OTHER; note = 2'-O-Methyl-uridine phosphorothioate
  modified_base 98: mod_base = OTHER; note = 2'-O-Methyl-uridine phosphorothioate
  modified_base 99: mod_base = OTHER; note = 2'-O-Methyl-uridine phosphorothioate
  modified_base 100: mod_base = OTHER; note = 2'-O-Methyl-uridine

SEQ ID NO: 1981 - RNA, 100 nt, synthetic construct; identical to SEQ ID NO: 1927
  source 1..100: mol_type = other RNA; note = Description of Artificial Sequence: Synthetic polynucleotide
  modified_base 1: mod_base = OTHER; note = 2'-O-Methyl-cytidine phosphorothioate
  modified_base 2: mod_base = OTHER; note = 2'-O-Methyl-adenosine phosphorothioate
  modified_base 3: mod_base = OTHER; note = 2'-O-Methyl-guanosine
  modified_base 9: mod_base = OTHER; note = Nebularine - ribonebularine
  modified_base 14: mod_base = OTHER; note = Nebularine - ribonebularine
  modified_base 21: mod_base = OTHER; note = 2'-O-Methyl-guanosine
  modified_base 28: mod_base = OTHER; note = 2'-O-Methyl-adenosine
  modified_base 29: mod_base = OTHER; note = 2'-O-Methyl-guanosine
  modified_base 30: mod_base = OTHER; note = 2'-O-Methyl-cytidine
  modified_base 31: mod_base = OTHER; note = 2'-O-Methyl-uridine
  modified_base 32: mod_base = OTHER; note = 2'-O-Methyl-adenosine
  modified_base 33: mod_base = OTHER; note = 2'-O-Methyl-guanosine
  modified_base 34: mod_base = OTHER; note = Nebularine - 2'-O-methylnebularine
  modified_base 35: mod_base = OTHER; note = 2'-O-Methyl-adenosine
  modified_base 36: mod_base = OTHER; note = 2'-O-Methyl-adenosine
  modified_base 37: mod_base = OTHER; note = 2'-O-Methyl-uridine
  modified_base 38: mod_base = OTHER; note = 2'-O-Methyl-adenosine
  modified_base 39: mod_base = OTHER; note = 2'-O-Methyl-guanosine
  modified_base 40: mod_base = OTHER; note = 2'-O-Methyl-cytidine
  modified_base 41: mod_base = OTHER; note = 2'-O-Methyl-adenosine
  modified_base 42: mod_base = OTHER; note = Nebularine - 2'-O-methylnebularine
  modified_base 46: mod_base = OTHER; note = 2'-O-Methyl-adenosine
  modified_base 48: mod_base = OTHER; note = 2'-O-Methyl-adenosine
  modified_base 50: mod_base = OTHER; note = 2'-O-Methyl-uridine
  modified_base 52: mod_base = OTHER; note = 2'-O-Methyl-adenosine
  modified_base 53: mod_base = OTHER; note = 2'-O-Methyl-guanosine
  modified_base 54: mod_base = OTHER; note = 2'-O-Methyl-guanosine
  modified_base 55: mod_base = OTHER; note = 2'-O-Methyl-cytidine
  modified_base 56: mod_base = OTHER; note = 2'-O-Methyl-uridine
  modified_base 57: mod_base = OTHER; note = 2'-O-Methyl-adenosine
  modified_base 60: mod_base = OTHER; note = 2'-O-Methyl-cytidine
  modified_base 61: mod_base = OTHER; note = 2'-O-Methyl-cytidine
  modified_base 66: mod_base = OTHER; note = 2'-O-Methyl-uridine
  modified_base 67: mod_base = OTHER; note = 2'-O-Methyl-cytidine
  modified_base 70: mod_base = OTHER; note = 2'-O-Methyl-cytidine
  modified_base 71: mod_base = OTHER; note = 2'-O-Methyl-uridine
  modified_base 72: mod_base = OTHER; note = 2'-O-Methyl-uridine
  modified_base 73: mod_base = OTHER; note = 2'-O-Methyl-guanosine
  modified_base 74: mod_base = OTHER; note = 2'-O-Methyl-adenosine
  modified_base 75: mod_base = OTHER; note = 2'-O-Methyl-adenosine
  modified_base 76: mod_base = OTHER; note = 2'-O-Methyl-adenosine
  modified_base 77: mod_base = OTHER; note = 2'-O-Methyl-adenosine
  modified_base 78: mod_base = OTHER; note = 2'-O-Methyl-adenosine
  modified_base 79: mod_base = OTHER; note = 2'-O-Methyl-guanosine
  modified_base 80: mod_base = OTHER; note = 2'-O-Methyl-uridine
  modified_base 81: mod_base = OTHER; note = 2'-O-Methyl-guanosine
  modified_base 83: mod_base = OTHER; note = 2'-O-Methyl-cytidine
  modified_base 84: mod_base = OTHER; note = 2'-O-Methyl-adenosine
  modified_base 85: mod_base = OTHER; note = 2'-O-Methyl-cytidine
  modified_base 86: mod_base = OTHER; note = 2'-O-Methyl-cytidine
  modified_base 87: mod_base = OTHER; note = 2'-O-Methyl-guanosine
  modified_base 88: mod_base = OTHER; note = 2'-O-Methyl-adenosine
  modified_base 89: mod_base = OTHER; note = 2'-O-Methyl-guanosine
  modified_base 90: mod_base = OTHER; note = 2'-O-Methyl-uridine
  modified_base 91: mod_base = OTHER; note = 2'-O-Methyl-cytidine
  modified_base 92: mod_base = OTHER; note = 2'-O-Methyl-guanosine
  modified_base 93: mod_base = OTHER; note = 2'-O-Methyl-guanosine
  modified_base 94: mod_base = OTHER; note = 2'-O-Methyl-uridine
  modified_base 95: mod_base = OTHER; note = 2'-O-Methyl-guanosine
  modified_base 96: mod_base = OTHER; note = 2'-O-Methyl-cytidine
  modified_base 97: mod_base = OTHER; note = 2'-O-Methyl-uridine phosphorothioate
  modified_base 98: mod_base = OTHER; note = 2'-O-Methyl-uridine phosphorothioate
  modified_base 99: mod_base = OTHER; note = 2'-O-Methyl-uridine phosphorothioate
  modified_base 100: mod_base = OTHER; note = 2'-O-Methyl-uridine

SEQ ID NO: 1982 - RNA, 100 nt, synthetic construct; identical to SEQ ID NO: 1928
  source 1..100: mol_type = other RNA; note = Description of Artificial Sequence: Synthetic polynucleotide
  modified_base 1: mod_base = OTHER; note = 2'-O-Methyl-cytidine phosphorothioate
  modified_base 2: mod_base = OTHER; note = 2'-O-Methyl-adenosine phosphorothioate
  modified_base 3: mod_base = OTHER; note = 2'-O-Methyl-guanosine
  modified_base 14: mod_base = OTHER; note = Nebularine - ribonebularine
  modified_base 21: mod_base = OTHER; note = 2'-O-Methyl-guanosine
  modified_base 28: mod_base = OTHER; note = Nebularine - 2'-O-methylnebularine
  modified_base 29: mod_base = OTHER; note = 2'-O-Methyl-guanosine
  modified_base 30: mod_base = OTHER; note = 2'-O-Methyl-cytidine
  modified_base 31: mod_base = OTHER; note = 2'-O-Methyl-uridine
  modified_base 32: mod_base = OTHER; note = 2'-O-Methyl-adenosine
  modified_base 33: mod_base = OTHER; note = 2'-O-Methyl-guanosine
  modified_base 34: mod_base = OTHER; note = Nebularine - 2'-O-methylnebularine
  modified_base 35: mod_base = OTHER; note = 2'-O-Methyl-adenosine
  modified_base 36: mod_base = OTHER; note = 2'-O-Methyl-adenosine
  modified_base 37: mod_base = OTHER; note = 2'-O-Methyl-uridine
  modified_base 38: mod_base = OTHER; note = 2'-O-Methyl-adenosine
  modified_base 39: mod_base = OTHER; note = 2'-O-Methyl-guanosine
  modified_base 40: mod_base = OTHER; note = 2'-O-Methyl-cytidine
  modified_base 41: mod_base = OTHER; note = 2'-O-Methyl-adenosine
  modified_base 42: mod_base = OTHER; note = Nebularine - 2'-O-methylnebularine
  modified_base 46: mod_base = OTHER; note = 2'-O-Methyl-adenosine
  modified_base 48: mod_base = OTHER; note = 2'-O-Methyl-adenosine
  modified_base 50: mod_base = OTHER; note = 2'-O-Methyl-uridine
  modified_base 52: mod_base = OTHER; note = 2'-O-Methyl-adenosine
  modified_base 53: mod_base = OTHER; note = 2'-O-Methyl-guanosine
  modified_base 54: mod_base = OTHER; note = 2'-O-Methyl-guanosine
  modified_base 55: mod_base = OTHER; note = 2'-O-Methyl-cytidine
  modified_base 56: mod_base = OTHER; note = 2'-O-Methyl-uridine
  modified_base 57: mod_base = OTHER; note = Nebularine - 2'-O-methylnebularine
  modified_base 60: mod_base = OTHER; note = 2'-O-Methyl-cytidine
  modified_base 61: mod_base = OTHER; note = 2'-O-Methyl-cytidine
  modified_base 66: mod_base = OTHER; note = 2'-O-Methyl-uridine
  modified_base 67: mod_base = OTHER; note = 2'-O-Methyl-cytidine
  modified_base 70: mod_base = OTHER; note = 2'-O-Methyl-cytidine
  modified_base 71: mod_base = OTHER; note = 2'-O-Methyl-uridine
  modified_base 72: mod_base = OTHER; note = 2'-O-Methyl-uridine
  modified_base 73: mod_base = OTHER; note = 2'-O-Methyl-guanosine
  modified_base 74: mod_base = OTHER; note = 2'-O-Methyl-adenosine
  modified_base 75: mod_base = OTHER; note = 2'-O-Methyl-adenosine
  modified_base 76: mod_base = OTHER; note = 2'-O-Methyl-adenosine
  modified_base 77: mod_base = OTHER; note = 2'-O-Methyl-adenosine
  modified_base 78: mod_base = OTHER; note = 2'-O-Methyl-adenosine
  modified_base 79: mod_base = OTHER; note = 2'-O-Methyl-guanosine
  modified_base 80: mod_base = OTHER; note = 2'-O-Methyl-uridine
  modified_base 81: mod_base = OTHER; note = 2'-O-Methyl-guanosine
  modified_base 83: mod_base = OTHER; note = 2'-O-Methyl-cytidine
  modified_base 84: mod_base = OTHER; note = 2'-O-Methyl-adenosine
  modified_base 85: mod_base = OTHER; note = 2'-O-Methyl-cytidine
  modified_base 86: mod_base = OTHER; note = 2'-O-Methyl-cytidine
  modified_base 87: mod_base = OTHER; note = 2'-O-Methyl-guanosine
  modified_base 88: mod_base = OTHER; note = 2'-O-Methyl-adenosine
  modified_base 89: mod_base = OTHER; note = 2'-O-Methyl-guanosine
  modified_base 90: mod_base = OTHER; note = 2'-O-Methyl-uridine
  modified_base 91: mod_base = OTHER; note = 2'-O-Methyl-cytidine
  modified_base 92: mod_base = OTHER; note = 2'-O-Methyl-guanosine
  modified_base 93: mod_base = OTHER; note = 2'-O-Methyl-guanosine
  modified_base 94: mod_base = OTHER; note = 2'-O-Methyl-uridine
  modified_base 95: mod_base = OTHER; note = 2'-O-Methyl-guanosine
  modified_base 96: mod_base = OTHER; note = 2'-O-Methyl-cytidine
  modified_base 97: mod_base = OTHER; note = 2'-O-Methyl-uridine phosphorothioate
  modified_base 98: mod_base = OTHER; note = 2'-O-Methyl-uridine phosphorothioate
  modified_base 99: mod_base = OTHER; note = 2'-O-Methyl-uridine phosphorothioate
  modified_base 100: mod_base = OTHER; note = 2'-O-Methyl-uridine

SEQ ID NO: 1983 - RNA, 100 nt, synthetic construct; identical to SEQ ID NO: 1930
  source 1..100: mol_type = other RNA; note = Description of Artificial Sequence: Synthetic polynucleotide
  modified_base 1: mod_base = OTHER; note = 2'-O-Methyl-cytidine phosphorothioate
  modified_base 2: mod_base = OTHER; note = 2'-O-Methyl-adenosine phosphorothioate
  modified_base 3: mod_base = OTHER; note = 2'-O-Methyl-guanosine
  modified_base 14: mod_base = OTHER; note = Nebularine - ribonebularine
  modified_base 21: mod_base = OTHER; note = 2'-O-Methyl-guanosine
  modified_base 28: mod_base = OTHER; note = 2'-O-Methyl-adenosine
  modified_base 29: mod_base = OTHER; note = 2'-O-Methyl-guanosine
  modified_base 30: mod_base = OTHER; note = 2'-O-Methyl-cytidine
  modified_base 31: mod_base = OTHER; note = 2'-O-Methyl-uridine
  modified_base 32: mod_base = OTHER; note = 2'-O-Methyl-adenosine
  modified_base 33: mod_base = OTHER; note = 2'-O-Methyl-guanosine
  modified_base 34: mod_base = OTHER; note = 2'-O-Methyl-adenosine
  modified_base 35: mod_base = OTHER; note = 2'-O-Methyl-adenosine
  modified_base 36: mod_base = OTHER; note = 2'-O-Methyl-adenosine
  modified_base 37: mod_base = OTHER; note = 2'-O-Methyl-uridine
  modified_base 38: mod_base = OTHER; note = 2'-O-Methyl-adenosine
  modified_base 39: mod_base = OTHER; note = 2'-O-Methyl-guanosine
  modified_base 40: mod_base = OTHER; note = 2'-O-Methyl-cytidine
  modified_base 41: mod_base = OTHER; note = 2'-O-Methyl-adenosine
  modified_base 42: mod_base = OTHER; note = Nebularine - 2'-O-methylnebularine
  modified_base 46: mod_base = OTHER; note = 2'-O-Methyl-adenosine
  modified_base 48: mod_base = OTHER; note = 2'-O-Methyl-adenosine
  modified_base 50: mod_base = OTHER; note = 2'-O-Methyl-uridine
  modified_base 52: mod_base = OTHER; note = 2'-O-Methyl-adenosine
  modified_base 53: mod_base = OTHER; note = 2'-O-Methyl-guanosine
  modified_base 54: mod_base = OTHER; note = 2'-O-Methyl-guanosine
  modified_base 55: mod_base = OTHER; note = 2'-O-Methyl-cytidine
  modified_base 56: mod_base = OTHER; note = 2'-O-Methyl-uridine
  modified_base 57: mod_base = OTHER; note = Nebularine - 2'-O-methylnebularine
  modified_base 60: mod_base = OTHER; note = 2'-O-Methyl-cytidine
  modified_base 61: mod_base = OTHER; note = 2'-O-Methyl-cytidine
  modified_base 66: mod_base = OTHER; note = 2'-O-Methyl-uridine
  modified_base 67: mod_base = OTHER; note = 2'-O-Methyl-cytidine
  modified_base 70: mod_base = OTHER; note = 2'-O-Methyl-cytidine
  modified_base 71: mod_base = OTHER; note = 2'-O-Methyl-uridine
  modified_base 72: mod_base = OTHER; note = 2'-O-Methyl-uridine
  modified_base 73: mod_base = OTHER; note = 2'-O-Methyl-guanosine
  modified_base 74: mod_base = OTHER; note = 2'-O-Methyl-adenosine
  modified_base 75: mod_base = OTHER; note = 2'-O-Methyl-adenosine
  modified_base 76: mod_base = OTHER; note = 2'-O-Methyl-adenosine
  modified_base 77: mod_base = OTHER; note = 2'-O-Methyl-adenosine
  modified_base 78: mod_base = OTHER; note = 2'-O-Methyl-adenosine
  modified_base 79: mod_base = OTHER; note = 2'-O-Methyl-guanosine
  modified_base 80: mod_base = OTHER; note = 2'-O-Methyl-uridine
  modified_base 81: mod_base = OTHER; note = 2'-O-Methyl-guanosine
  modified_base 83: mod_base = OTHER; note = 2'-O-Methyl-cytidine
  modified_base 84: mod_base = OTHER; note = 2'-O-Methyl-adenosine
  modified_base 85: mod_base = OTHER; note = 2'-O-Methyl-cytidine
  modified_base 86: mod_base = OTHER; note = 2'-O-Methyl-cytidine
  modified_base 87: mod_base = OTHER; note = 2'-O-Methyl-guanosine
  modified_base 88: mod_base = OTHER; note = 2'-O-Methyl-adenosine
  modified_base 89: mod_base = OTHER; note = 2'-O-Methyl-guanosine
  modified_base 90: mod_base = OTHER; note = 2'-O-Methyl-uridine
  modified_base 91: mod_base = OTHER; note = 2'-O-Methyl-cytidine
  modified_base 92: mod_base = OTHER; note = 2'-O-Methyl-guanosine
  modified_base 93: mod_base = OTHER; note = 2'-O-Methyl-guanosine
  modified_base 94: mod_base = OTHER; note = 2'-O-Methyl-uridine
  modified_base 95: mod_base = OTHER; note = 2'-O-Methyl-guanosine
  modified_base 96: mod_base = OTHER; note = 2'-O-Methyl-cytidine
  modified_base 97: mod_base = OTHER; note = 2'-O-Methyl-uridine phosphorothioate
  modified_base 98: mod_base = OTHER; note = 2'-O-Methyl-uridine phosphorothioate
  modified_base 99: mod_base = OTHER; note = 2'-O-Methyl-uridine phosphorothioate
  modified_base 100: mod_base = OTHER; note = 2'-O-Methyl-uridine

SEQ ID NO: 1984 - RNA, 100 nt, synthetic construct; identical to SEQ ID NO: 1931
  source 1..100: mol_type = other RNA; note = Description of Artificial Sequence: Synthetic polynucleotide
  modified_base 1: mod_base = OTHER; note = 2'-O-Methyl-cytidine phosphorothioate
  modified_base 2: mod_base = OTHER; note = 2'-O-Methyl-adenosine phosphorothioate
  modified_base 3: mod_base = OTHER; note = 2'-O-Methyl-guanosine
  modified_base 14: mod_base = OTHER; note = Nebularine - ribonebularine
  modified_base 21: mod_base = OTHER; note = 2'-O-Methyl-guanosine
  modified_base 28: mod_base = OTHER; note = Nebularine - 2'-O-methylnebularine
  modified_base 29: mod_base = OTHER; note = 2'-O-Methyl-guanosine
  modified_base 30: mod_base = OTHER; note = 2'-O-Methyl-cytidine
  modified_base 31: mod_base = OTHER; note = 2'-O-Methyl-uridine
  modified_base 32: mod_base = OTHER; note = 2'-O-Methyl-adenosine
  modified_base 33: mod_base = OTHER; note = 2'-O-Methyl-guanosine
  modified_base 34: mod_base = OTHER; note = 2'-O-Methyl-adenosine
  modified_base 35: mod_base = OTHER; note = 2'-O-Methyl-adenosine
  modified_base 36: mod_base = OTHER; note = 2'-O-Methyl-adenosine
  modified_base 37: mod_base = OTHER; note = 2'-O-Methyl-uridine
  modified_base 38: mod_base = OTHER; note = 2'-O-Methyl-adenosine
  modified_base 39: mod_base = OTHER; note = 2'-O-Methyl-guanosine
  modified_base 40: mod_base = OTHER; note = 2'-O-Methyl-cytidine
  modified_base 41: mod_base = OTHER; note = 2'-O-Methyl-adenosine
  modified_base 42: mod_base = OTHER; note = 2'-O-Methyl-adenosine
  modified_base 46: mod_base = OTHER; note = 2'-O-Methyl-adenosine
  modified_base 48: mod_base = OTHER; note = 2'-O-Methyl-adenosine
  modified_base 50: mod_base = OTHER; note = 2'-O-Methyl-uridine
  modified_base 52: mod_base = OTHER; note = 2'-O-Methyl-adenosine
  modified_base 53: mod_base = OTHER; note = 2'-O-Methyl-guanosine
  modified_base 54: mod_base = OTHER; note = 2'-O-Methyl-guanosine
  modified_base 55: mod_base = OTHER; note = 2'-O-Methyl-cytidine
  modified_base 56: mod_base = OTHER; note = 2'-O-Methyl-uridine
  modified_base 57: mod_base = OTHER; note = 2'-O-Methyl-adenosine
  modified_base 60: mod_base = OTHER; note = 2'-O-Methyl-cytidine
  modified_base 61: mod_base = OTHER; note = 2'-O-Methyl-cytidine
  modified_base 66: mod_base = OTHER; note = 2'-O-Methyl-uridine
  modified_base 67: mod_base = OTHER; note = 2'-O-Methyl-cytidine
  modified_base 70: mod_base = OTHER; note = 2'-O-Methyl-cytidine
  modified_base 71: mod_base = OTHER; note = 2'-O-Methyl-uridine
  modified_base 72: mod_base = OTHER; note = 2'-O-Methyl-uridine
  modified_base 73: mod_base = OTHER; note = 2'-O-Methyl-guanosine
  modified_base 74: mod_base = OTHER; note = 2'-O-Methyl-adenosine
  modified_base 75: mod_base = OTHER; note = 2'-O-Methyl-adenosine
  modified_base 76: mod_base = OTHER; note = 2'-O-Methyl-adenosine
  modified_base 77: mod_base = OTHER; note = 2'-O-Methyl-adenosine
  modified_base 78: mod_base = OTHER; note = 2'-O-Methyl-adenosine
  modified_base 79: mod_base = OTHER; note = 2'-O-Methyl-guanosine
  modified_base 80: mod_base = OTHER; note = 2'-O-Methyl-uridine
  modified_base 81: mod_base = OTHER; note = 2'-O-Methyl-guanosine
  modified_base 83: mod_base = OTHER; note = 2'-O-Methyl-cytidine
  modified_base 84: mod_base = OTHER; note = 2'-O-Methyl-adenosine
  modified_base 85: mod_base = OTHER; note = 2'-O-Methyl-cytidine
  modified_base 86: mod_base = OTHER; note = 2'-O-Methyl-cytidine
  modified_base 87: mod_base = OTHER; note = 2'-O-Methyl-guanosine
  modified_base 88: mod_base = OTHER; note = 2'-O-Methyl-adenosine
  modified_base 89: mod_base = OTHER; note = 2'-O-Methyl-guanosine
  modified_base 90: mod_base = OTHER; note = 2'-O-Methyl-uridine
  modified_base 91: mod_base = OTHER; note = 2'-O-Methyl-cytidine
  modified_base 92: mod_base = OTHER; note = 2'-O-Methyl-guanosine
  modified_base 93: mod_base = OTHER; note = 2'-O-Methyl-guanosine
  modified_base 94: mod_base = OTHER; note = 2'-O-Methyl-uridine
  modified_base 95: mod_base = OTHER; note = 2'-O-Methyl-guanosine
  modified_base 96: mod_base = OTHER; note = 2'-O-Methyl-cytidine
  modified_base 97: mod_base = OTHER; note = 2'-O-Methyl-uridine phosphorothioate
  modified_base 98: mod_base = OTHER; note = 2'-O-Methyl-uridine phosphorothioate
  modified_base 99: mod_base = OTHER; note = 2'-O-Methyl-uridine phosphorothioate
  modified_base 100: mod_base = OTHER; note = 2'-O-Methyl-uridine

SEQ ID NO: 1985 - RNA, 100 nt, synthetic construct; identical to SEQ ID NO: 1932
  source 1..100: mol_type = other RNA; note = Description of Artificial Sequence: Synthetic polynucleotide
  modified_base 1: mod_base = OTHER; note = 2'-O-Methyl-cytidine phosphorothioate
  modified_base 2: mod_base = OTHER; note = 2'-O-Methyl-adenosine phosphorothioate
  modified_base 3: mod_base = OTHER; note = 2'-O-Methyl-guanosine
  modified_base 14: mod_base = OTHER; note = Nebularine - ribonebularine
  modified_base 21: mod_base = OTHER; note = 2'-O-Methyl-guanosine
  modified_base 28: mod_base = OTHER; note = 2'-O-Methyl-adenosine
  modified_base 29: mod_base = OTHER; note = 2'-O-Methyl-guanosine
  modified_base 30: mod_base = OTHER; note = 2'-O-Methyl-cytidine
  modified_base 31: mod_base = OTHER; note = 2'-O-Methyl-uridine
  modified_base 32: mod_base = OTHER; note = 2'-O-Methyl-adenosine
  modified_base 33: mod_base = OTHER; note = 2'-O-Methyl-guanosine
  modified_base 34: mod_base = OTHER; note = 2'-O-Methyl-adenosine
  modified_base 35: mod_base = OTHER; note = 2'-O-Methyl-adenosine
  modified_base 36: mod_base = OTHER; note = 2'-O-Methyl-adenosine
  modified_base 37: mod_base = OTHER; note = 2'-O-Methyl-uridine
  modified_base 38: mod_base = OTHER; note = 2'-O-Methyl-adenosine
  modified_base 39: mod_base = OTHER; note = 2'-O-Methyl-guanosine
  modified_base 40: mod_base = OTHER; note = 2'-O-Methyl-cytidine
  modified_base 41: mod_base = OTHER; note = 2'-O-Methyl-adenosine
  modified_base 42: mod_base = OTHER; note = Nebularine - 2'-O-methylnebularine
  modified_base 46: mod_base = OTHER; note = 2'-O-Methyl-adenosine
  modified_base 48: mod_base = OTHER; note = 2'-O-Methyl-adenosine
  modified_base 50: mod_base = OTHER; note = 2'-O-Methyl-uridine
  modified_base 52: mod_base = OTHER; note = 2'-O-Methyl-adenosine
  modified_base 53: mod_base = OTHER; note = 2'-O-Methyl-guanosine
  modified_base 54: mod_base = OTHER; note = 2'-O-Methyl-guanosine
  modified_base 55: mod_base = OTHER; note = 2'-O-Methyl-cytidine
  modified_base 56: mod_base = OTHER; note = 2'-O-Methyl-uridine
  modified_base 57: mod_base = OTHER; note = 2'-O-Methyl-adenosine
  modified_base 60: mod_base = OTHER; note = 2'-O-Methyl-cytidine
  modified_base 61: mod_base = OTHER; note = 2'-O-Methyl-cytidine
  modified_base 66: mod_base = OTHER; note = 2'-O-Methyl-uridine
  modified_base 67: mod_base = OTHER; note = 2'-O-Methyl-cytidine
  modified_base 70: mod_base = OTHER; note = 2'-O-Methyl-cytidine
  modified_base 71: mod_base = OTHER; note = 2'-O-Methyl-uridine
  modified_base 72: mod_base = OTHER; note = 2'-O-Methyl-uridine
  modified_base 73: mod_base = OTHER; note = 2'-O-Methyl-guanosine
  modified_base 74: mod_base = OTHER; note = 2'-O-Methyl-adenosine
  modified_base 75: mod_base = OTHER; note = 2'-O-Methyl-adenosine
  modified_base 76: mod_base = OTHER; note = 2'-O-Methyl-adenosine
  modified_base 77: mod_base = OTHER; note = 2'-O-Methyl-adenosine
  modified_base 78: mod_base = OTHER; note = 2'-O-Methyl-adenosine
  modified_base 79: mod_base = OTHER; note = 2'-O-Methyl-guanosine
  modified_base 80: mod_base = OTHER; note = 2'-O-Methyl-uridine
  modified_base 81: mod_base = OTHER; note = 2'-O-Methyl-guanosine
  modified_base 83: mod_base = OTHER; note = 2'-O-Methyl-cytidine
  modified_base 84: mod_base = OTHER; note = 2'-O-Methyl-adenosine
  modified_base 85: mod_base = OTHER; note = 2'-O-Methyl-cytidine
  modified_base 86: mod_base = OTHER; note = 2'-O-Methyl-cytidine
  modified_base 87: mod_base = OTHER; note = 2'-O-Methyl-guanosine
  modified_base 88: mod_base = OTHER; note = 2'-O-Methyl-adenosine
  modified_base 89: mod_base = OTHER; note = 2'-O-Methyl-guanosine
  modified_base 90: mod_base = OTHER; note = 2'-O-Methyl-uridine
  modified_base 91: mod_base = OTHER; note = 2'-O-Methyl-cytidine
  modified_base 92: mod_base = OTHER; note = 2'-O-Methyl-guanosine
  modified_base 93: mod_base = OTHER; note = 2'-O-Methyl-guanosine
  modified_base 94: mod_base = OTHER; note = 2'-O-Methyl-uridine
  modified_base 95: mod_base = OTHER; note = 2'-O-Methyl-guanosine
  modified_base 96: mod_base = OTHER; note = 2'-O-Methyl-cytidine
  modified_base 97: mod_base = OTHER; note = 2'-O-Methyl-uridine phosphorothioate
  modified_base 98: mod_base = OTHER; note = 2'-O-Methyl-uridine phosphorothioate
  modified_base 99: mod_base = OTHER; note = 2'-O-Methyl-uridine phosphorothioate
  modified_base 100: mod_base = OTHER; note = 2'-O-Methyl-uridine

SEQ ID NO: 1986 - RNA, 100 nt, synthetic construct; identical to SEQ ID NO: 1933
  source 1..100: mol_type = other RNA; note = Description of Artificial Sequence: Synthetic polynucleotide
  modified_base 1: mod_base = OTHER; note = 2'-O-Methyl-cytidine phosphorothioate
  modified_base 2: mod_base = OTHER; note = 2'-O-Methyl-adenosine phosphorothioate
  modified_base 3: mod_base = OTHER; note = 2'-O-Methyl-guanosine
  modified_base 14: mod_base = OTHER; note = Nebularine - ribonebularine
  modified_base 21: mod_base = OTHER; note = 2'-O-Methyl-guanosine
  modified_base 28: mod_base = OTHER; note = 2'-O-Methyl-adenosine
  modified_base 29: mod_base = OTHER; note = 2'-O-Methyl-guanosine
  modified_base 30: mod_base = OTHER; note = 2'-O-Methyl-cytidine
  modified_base 31: mod_base = OTHER; note = 2'-O-Methyl-uridine
  modified_base 32: mod_base = OTHER; note = 2'-O-Methyl-adenosine
  modified_base 33: mod_base = OTHER; note = 2'-O-Methyl-guanosine
  modified_base 34: mod_base = OTHER; note = Nebularine - 2'-O-methylnebularine
  modified_base 35: mod_base = OTHER; note = 2'-O-Methyl-adenosine
  modified_base 36: mod_base = OTHER; note = 2'-O-Methyl-adenosine
  modified_base 37: mod_base = OTHER; note = 2'-O-Methyl-uridine
  modified_base 38: mod_base = OTHER; note = 2'-O-Methyl-adenosine
  modified_base 39: mod_base = OTHER; note = 2'-O-Methyl-guanosine
  modified_base 40: mod_base = OTHER; note = 2'-O-Methyl-cytidine
  modified_base 41: mod_base = OTHER; note = 2'-O-Methyl-adenosine
  modified_base 42: mod_base = OTHER; note = Nebularine - 2'-O-methylnebularine
  modified_base 46: mod_base = OTHER; note = 2'-O-Methyl-adenosine
  modified_base 48: mod_base = OTHER; note = 2'-O-Methyl-adenosine
  modified_base 50: mod_base = OTHER; note = 2'-O-Methyl-uridine
  modified_base 52: mod_base = OTHER; note = 2'-O-Methyl-adenosine
  modified_base 53: mod_base = OTHER; note = 2'-O-Methyl-guanosine
  modified_base 54: mod_base = OTHER; note = 2'-O-Methyl-guanosine
  modified_base 55: mod_base = OTHER; note = 2'-O-Methyl-cytidine
  modified_base 56: mod_base = OTHER; note = 2'-O-Methyl-uridine
  modified_base 57: mod_base = OTHER; note = 2'-O-Methyl-adenosine
  modified_base 60: mod_base = OTHER; note = 2'-O-Methyl-cytidine
  modified_base 61: mod_base = OTHER; note = 2'-O-Methyl-cytidine
  modified_base 66: mod_base = OTHER; note = 2'-O-Methyl-uridine
  modified_base 67: mod_base = OTHER; note = 2'-O-Methyl-cytidine
  modified_base 70: mod_base = OTHER; note = 2'-O-Methyl-cytidine
  modified_base 71: mod_base = OTHER; note = 2'-O-Methyl-uridine
  modified_base 72: mod_base = OTHER; note = 2'-O-Methyl-uridine
  modified_base 73: mod_base = OTHER; note = 2'-O-Methyl-guanosine
  modified_base 74: mod_base = OTHER; note = 2'-O-Methyl-adenosine
  modified_base 75: mod_base = OTHER; note = 2'-O-Methyl-adenosine
  modified_base 76: mod_base = OTHER; note = 2'-O-Methyl-adenosine
  modified_base 77: mod_base = OTHER; note = 2'-O-Methyl-adenosine
  modified_base 78: mod_base = OTHER; note = 2'-O-Methyl-adenosine
  modified_base 79: mod_base = OTHER; note = 2'-O-Methyl-guanosine
  modified_base 80: mod_base = OTHER; note = 2'-O-Methyl-uridine
  modified_base 81: mod_base = OTHER; note = 2'-O-Methyl-guanosine
  modified_base 83: mod_base = OTHER; note = 2'-O-Methyl-cytidine
  modified_base 84: mod_base = OTHER; note = 2'-O-Methyl-adenosine
  modified_base 85: mod_base = OTHER; note = 2'-O-Methyl-cytidine
  modified_base 86: mod_base = OTHER; note = 2'-O-Methyl-cytidine
  modified_base 87: mod_base = OTHER; note = 2'-O-Methyl-guanosine
  modified_base 88: mod_base = OTHER; note = 2'-O-Methyl-adenosine
  modified_base 89: mod_base = OTHER; note = 2'-O-Methyl-guanosine
  modified_base 90: mod_base = OTHER; note = 2'-O-Methyl-uridine
  modified_base 91: mod_base = OTHER; note = 2'-O-Methyl-cytidine
  modified_base 92: mod_base = OTHER; note = 2'-O-Methyl-guanosine
  modified_base 93: mod_base = OTHER; note = 2'-O-Methyl-guanosine
  modified_base 94: mod_base = OTHER; note = 2'-O-Methyl-uridine
  modified_base 95: mod_base = OTHER; note = 2'-O-Methyl-guanosine
  modified_base 96: mod_base = OTHER; note = 2'-O-Methyl-cytidine
  modified_base 97: mod_base = OTHER; note = 2'-O-Methyl-uridine phosphorothioate
  modified_base 98: mod_base = OTHER; note = 2'-O-Methyl-uridine phosphorothioate
  modified_base 99: mod_base = OTHER; note = 2'-O-Methyl-uridine phosphorothioate
  modified_base 100: mod_base = OTHER; note = 2'-O-Methyl-uridine

SEQ ID NO: 1987 - RNA, 100 nt, synthetic construct; identical to SEQ ID NO: 1934
  source 1..100: mol_type = other RNA; note = Description of Artificial Sequence: Synthetic polynucleotide
  modified_base 1: mod_base = OTHER; note = 2'-O-Methyl-cytidine phosphorothioate
  modified_base 2: mod_base = OTHER; note = 2'-O-Methyl-adenosine phosphorothioate
  modified_base 3: mod_base = OTHER; note = 2'-O-Methyl-guanosine
  modified_base 9: mod_base = OTHER; note = Nebularine - ribonebularine
  modified_base 21: mod_base = OTHER; note = 2'-O-Methyl-guanosine
  modified_base 28: mod_base = OTHER; note = Nebularine - 2'-O-methylnebularine
  modified_base 29: mod_base = OTHER; note = 2'-O-Methyl-guanosine
  modified_base 30: mod_base = OTHER; note = 2'-O-Methyl-cytidine
  modified_base 31: mod_base = OTHER; note = 2'-O-Methyl-uridine
  modified_base 32: mod_base = OTHER; note = 2'-O-Methyl-adenosine
  modified_base 33: mod_base = OTHER; note = 2'-O-Methyl-guanosine
  modified_base 34: mod_base = OTHER; note = Nebularine - 2'-O-methylnebularine
  modified_base 35: mod_base = OTHER; note = 2'-O-Methyl-adenosine
  modified_base 36: mod_base = OTHER; note = 2'-O-Methyl-adenosine
  modified_base 37: mod_base = OTHER; note = 2'-O-Methyl-uridine
  modified_base 38: mod_base = OTHER; note = 2'-O-Methyl-adenosine
  modified_base 39: mod_base = OTHER; note = 2'-O-Methyl-guanosine
  modified_base 40: mod_base = OTHER; note = 2'-O-Methyl-cytidine
  modified_base 41: mod_base = OTHER; note = 2'-O-Methyl-adenosine
  modified_base 42: mod_base = OTHER; note = Nebularine - 2'-O-methylnebularine
  modified_base 46: mod_base = OTHER; note = 2'-O-Methyl-adenosine
  modified_base 48: mod_base = OTHER; note = 2'-O-Methyl-adenosine
  modified_base 50: mod_base = OTHER; note = 2'-O-Methyl-uridine
  modified_base 52: mod_base = OTHER; note = 2'-O-Methyl-adenosine
  modified_base 53: mod_base = OTHER; note = 2'-O-Methyl-guanosine
  modified_base 54: mod_base = OTHER; note = 2'-O-Methyl-guanosine
  modified_base 55: mod_base = OTHER; note = 2'-O-Methyl-cytidine
  modified_base 56: mod_base = OTHER; note = 2'-O-Methyl-uridine
  modified_base 57: mod_base = OTHER; note = Nebularine - 2'-O-methylnebularine
  modified_base 60: mod_base = OTHER; note = 2'-O-Methyl-cytidine
  modified_base 61: mod_base = OTHER; note = 2'-O-Methyl-cytidine
  modified_base 66: mod_base = OTHER; note = 2'-O-Methyl-uridine
  modified_base 67: mod_base = OTHER; note = 2'-O-Methyl-cytidine
  modified_base 70: mod_base = OTHER; note = 2'-O-Methyl-cytidine
  modified_base 71: mod_base = OTHER; note = 2'-O-Methyl-uridine
  modified_base 72: mod_base = OTHER; note = 2'-O-Methyl-uridine
  modified_base 73: mod_base = OTHER; note = 2'-O-Methyl-guanosine
  modified_base 74: mod_base = OTHER; note = 2'-O-Methyl-adenosine
  modified_base 75: mod_base = OTHER; note = 2'-O-Methyl-adenosine
  modified_base 76: mod_base = OTHER; note = 2'-O-Methyl-adenosine
  modified_base 77: mod_base = OTHER; note = 2'-O-Methyl-adenosine
  modified_base 78: mod_base = OTHER; note = 2'-O-Methyl-adenosine
  modified_base 79: mod_base = OTHER; note = 2'-O-Methyl-guanosine
  modified_base 80: mod_base = OTHER; note = 2'-O-Methyl-uridine
  modified_base 81: mod_base = OTHER; note = 2'-O-Methyl-guanosine
  modified_base 83: mod_base = OTHER; note = 2'-O-Methyl-cytidine
  modified_base 84: mod_base = OTHER; note = 2'-O-Methyl-adenosine
  modified_base 85: mod_base = OTHER; note = 2'-O-Methyl-cytidine
  modified_base 86: mod_base = OTHER; note = 2'-O-Methyl-cytidine
  modified_base 87: mod_base = OTHER; note = 2'-O-Methyl-guanosine
  modified_base 88: mod_base = OTHER; note = 2'-O-Methyl-adenosine
  modified_base 89: mod_base = OTHER; note = 2'-O-Methyl-guanosine
  modified_base 90: mod_base = OTHER; note = 2'-O-Methyl-uridine
  modified_base 91: mod_base = OTHER; note = 2'-O-Methyl-cytidine
  modified_base 92: mod_base = OTHER; note = 2'-O-Methyl-guanosine
  modified_base 93: mod_base = OTHER; note = 2'-O-Methyl-guanosine
  modified_base 94: mod_base = OTHER; note = 2'-O-Methyl-uridine
  modified_base 95: mod_base = OTHER; note = 2'-O-Methyl-guanosine
  modified_base 96: mod_base = OTHER; note = 2'-O-Methyl-cytidine
  modified_base 97: mod_base = OTHER; note = 2'-O-Methyl-uridine phosphorothioate
  modified_base 98: mod_base = OTHER; note = 2'-O-Methyl-uridine phosphorothioate
  modified_base 99: mod_base = OTHER; note = 2'-O-Methyl-uridine phosphorothioate
  modified_base 100: mod_base = OTHER; note = 2'-O-Methyl-uridine

SEQ ID NO: 1988 - RNA, 100 nt, synthetic construct; identical to SEQ ID NO: 1935
  source 1..100: mol_type = other RNA; note = Description of Artificial Sequence: Synthetic polynucleotide
  modified_base 1: mod_base = OTHER; note = 2'-O-Methyl-cytidine phosphorothioate
  modified_base 2: mod_base = OTHER; note = 2'-O-Methyl-adenosine phosphorothioate
  modified_base 3: mod_base = OTHER; note = 2'-O-Methyl-guanosine
  modified_base 9: mod_base = OTHER; note = Nebularine - ribonebularine
  modified_base 21: mod_base = OTHER; note = 2'-O-Methyl-guanosine
  modified_base 28: mod_base = OTHER; note = 2'-O-Methyl-adenosine
  modified_base 29: mod_base = OTHER; note = 2'-O-Methyl-guanosine
  modified_base 30: mod_base = OTHER; note = 2'-O-Methyl-cytidine
  modified_base 31: mod_base = OTHER; note = 2'-O-Methyl-uridine
  modified_base 32: mod_base = OTHER; note = 2'-O-Methyl-adenosine
  modified_base 33: mod_base = OTHER; note = 2'-O-Methyl-guanosine
  modified_base 34: mod_base = OTHER; note = Nebularine - 2'-O-methylnebularine
  modified_base 35: mod_base = OTHER; note = 2'-O-Methyl-adenosine
  modified_base 36: mod_base = OTHER; note = 2'-O-Methyl-adenosine
  modified_base 37: mod_base = OTHER; note = 2'-O-Methyl-uridine
  modified_base 38: mod_base = OTHER; note = 2'-O-Methyl-adenosine
  modified_base 39: mod_base = OTHER; note = 2'-O-Methyl-guanosine
  modified_base 40: mod_base = OTHER; note = 2'-O-Methyl-cytidine
  modified_base 41: mod_base = OTHER; note = 2'-O-Methyl-adenosine
  modified_base 42: mod_base = OTHER; note = Nebularine - 2'-O-methylnebularine
  modified_base 46: mod_base = OTHER; note = 2'-O-Methyl-adenosine
  modified_base 48: mod_base = OTHER; note = 2'-O-Methyl-adenosine
  modified_base 50: mod_base = OTHER; note = 2'-O-Methyl-uridine
  modified_base 52: mod_base = OTHER; note = 2'-O-Methyl-adenosine
  modified_base 53: mod_base = OTHER; note = 2'-O-Methyl-guanosine
  modified_base 54: mod_base = OTHER; note = 2'-O-Methyl-guanosine
  modified_base 55: mod_base = OTHER; note = 2'-O-Methyl-cytidine
  modified_base 56: mod_base = OTHER; note = 2'-O-Methyl-uridine
  modified_base 57: mod_base = OTHER; note = Nebularine - 2'-O-methylnebularine
  modified_base 60: mod_base = OTHER; note = 2'-O-Methyl-cytidine
  modified_base 61: mod_base = OTHER; note = 2'-O-Methyl-cytidine
  modified_base 66: mod_base = OTHER; note = 2'-O-Methyl-uridine
  modified_base 67: mod_base = OTHER; note = 2'-O-Methyl-cytidine
  modified_base 70: mod_base = OTHER; note = 2'-O-Methyl-cytidine
  modified_base 71: mod_base = OTHER; note = 2'-O-Methyl-uridine
  modified_base 72: mod_base = OTHER; note = 2'-O-Methyl-uridine
  modified_base 73: mod_base = OTHER; note = 2'-O-Methyl-guanosine
  modified_base 74: mod_base = OTHER; note = 2'-O-Methyl-adenosine
  modified_base 75: mod_base = OTHER; note = 2'-O-Methyl-adenosine
  modified_base 76: mod_base = OTHER; note = 2'-O-Methyl-adenosine
  modified_base 77: mod_base = OTHER; note = 2'-O-Methyl-adenosine
  modified_base 78: mod_base = OTHER; note = 2'-O-Methyl-adenosine
  modified_base 79: mod_base = OTHER; note = 2'-O-Methyl-guanosine
  modified_base 80: mod_base = OTHER; note = 2'-O-Methyl-uridine
  modified_base 81: mod_base = OTHER; note = 2'-O-Methyl-guanosine
  modified_base 83: mod_base = OTHER; note = 2'-O-Methyl-cytidine
  modified_base 84: mod_base = OTHER; note = 2'-O-Methyl-adenosine
  modified_base 85: mod_base = OTHER; note = 2'-O-Methyl-cytidine
  modified_base 86: mod_base = OTHER; note = 2'-O-Methyl-cytidine
  modified_base 87: mod_base = OTHER; note = 2'-O-Methyl-guanosine
  modified_base 88: mod_base = OTHER; note = 2'-O-Methyl-adenosine
  modified_base 89: mod_base = OTHER; note = 2'-O-Methyl-guanosine
  modified_base 90: mod_base = OTHER; note = 2'-O-Methyl-uridine
  modified_base 91: mod_base = OTHER; note = 2'-O-Methyl-cytidine
  modified_base 92: mod_base = OTHER; note = 2'-O-Methyl-guanosine
  modified_base 93: mod_base = OTHER; note = 2'-O-Methyl-guanosine
  modified_base 94: mod_base = OTHER; note = 2'-O-Methyl-uridine
  modified_base 95: mod_base = OTHER; note = 2'-O-Methyl-guanosine
  modified_base 96: mod_base = OTHER; note = 2'-O-Methyl-cytidine
  modified_base 97: mod_base = OTHER; note = 2'-O-Methyl-uridine phosphorothioate
  modified_base 98: mod_base = OTHER; note = 2'-O-Methyl-uridine phosphorothioate
  modified_base 99: mod_base = OTHER; note = 2'-O-Methyl-uridine phosphorothioate
  modified_base 100: mod_base = OTHER; note = 2'-O-Methyl-uridine

SEQ ID NO: 1989 - RNA, 100 nt, synthetic construct; identical to SEQ ID NO: 1936
  source 1..100: mol_type = other RNA; note = Description of Artificial Sequence: Synthetic polynucleotide
  modified_base 1: mod_base = OTHER; note = 2'-O-Methyl-cytidine phosphorothioate
  modified_base 2: mod_base = OTHER; note = 2'-O-Methyl-adenosine phosphorothioate
  modified_base 3: mod_base = OTHER; note = 2'-O-Methyl-guanosine
  modified_base 9: mod_base = OTHER; note = Nebularine - ribonebularine
  modified_base 21: mod_base = OTHER; note = 2'-O-Methyl-guanosine
  modified_base 28: mod_base = OTHER; note = 2'-O-Methyl-adenosine
  modified_base 29: mod_base = OTHER; note = 2'-O-Methyl-guanosine
  modified_base 30: mod_base = OTHER; note = 2'-O-Methyl-cytidine
  modified_base 31: mod_base = OTHER; note = 2'-O-Methyl-uridine
  modified_base 32: mod_base = OTHER; note = 2'-O-Methyl-adenosine
  modified_base 33: mod_base = OTHER; note = 2'-O-Methyl-guanosine
  modified_base 34: mod_base = OTHER; note = 2'-O-Methyl-adenosine
  modified_base 35: mod_base = OTHER; note = 2'-O-Methyl-adenosine
  modified_base 36: mod_base = OTHER; note = 2'-O-Methyl-adenosine
  modified_base 37: mod_base = OTHER; note = 2'-O-Methyl-uridine
  modified_base 38: mod_base = OTHER; note = 2'-O-Methyl-adenosine
  modified_base 39: mod_base = OTHER; note = 2'-O-Methyl-guanosine
  modified_base 40: mod_base = OTHER; note = 2'-O-Methyl-cytidine
  modified_base 41: mod_base = OTHER; note = 2'-O-Methyl-adenosine
  modified_base 42: mod_base = OTHER; note = Nebularine - 2'-O-methylnebularine
  modified_base 46: mod_base = OTHER; note = 2'-O-Methyl-adenosine
  modified_base 48: mod_base = OTHER; note = 2'-O-Methyl-adenosine
  modified_base 50: mod_base = OTHER; note = 2'-O-Methyl-uridine
  modified_base 52: mod_base = OTHER; note = 2'-O-Methyl-adenosine
  modified_base 53: mod_base = OTHER; note = 2'-O-Methyl-guanosine
  modified_base 54: mod_base = OTHER; note = 2'-O-Methyl-guanosine
  modified_base 55: mod_base = OTHER; note = 2'-O-Methyl-cytidine
  modified_base 56: mod_base = OTHER; note = 2'-O-Methyl-uridine
  modified_base 57: mod_base = OTHER; note = Nebularine - 2'-O-methylnebularine
  modified_base 60: mod_base = OTHER; note = 2'-O-Methyl-cytidine
  modified_base 61: mod_base = OTHER; note = 2'-O-Methyl-cytidine
  modified_base 66: mod_base = OTHER; note = 2'-O-Methyl-uridine
  modified_base 67: mod_base = OTHER; note = 2'-O-Methyl-cytidine
  modified_base 70: mod_base = OTHER; note = 2'-O-Methyl-cytidine
  modified_base 71: mod_base = OTHER; note = 2'-O-Methyl-uridine
  modified_base 72: mod_base = OTHER; note = 2'-O-Methyl-uridine
  modified_base 73: mod_base = OTHER; note = 2'-O-Methyl-guanosine
  modified_base 74: mod_base = OTHER; note = 2'-O-Methyl-adenosine
  modified_base 75: mod_base = OTHER; note = 2'-O-Methyl-adenosine
  modified_base 76: mod_base = OTHER; note = 2'-O-Methyl-adenosine
  modified_base 77: mod_base = OTHER; note = 2'-O-Methyl-adenosine
  modified_base 78: mod_base = OTHER; note = 2'-O-Methyl-adenosine
  modified_base 79: mod_base = OTHER; note = 2'-O-Methyl-guanosine
  modified_base 80: mod_base = OTHER; note = 2'-O-Methyl-uridine
  modified_base 81: mod_base = OTHER; note = 2'-O-Methyl-guanosine
  modified_base 83: mod_base = OTHER; note = 2'-O-Methyl-cytidine
  modified_base 84: mod_base = OTHER; note = 2'-O-Methyl-adenosine
  modified_base 85: mod_base = OTHER; note = 2'-O-Methyl-cytidine
  modified_base 86: mod_base = OTHER; note = 2'-O-Methyl-cytidine
  modified_base 87: mod_base = OTHER; note = 2'-O-Methyl-guanosine
  modified_base 88: mod_base = OTHER; note = 2'-O-Methyl-adenosine
  modified_base 89: mod_base = OTHER; note = 2'-O-Methyl-guanosine
  modified_base 90: mod_base = OTHER; note = 2'-O-Methyl-uridine
  modified_base 91: mod_base = OTHER; note = 2'-O-Methyl-cytidine
  modified_base 92: mod_base = OTHER; note = 2'-O-Methyl-guanosine
  modified_base 93: mod_base = OTHER; note = 2'-O-Methyl-guanosine
  modified_base 94: mod_base = OTHER; note = 2'-O-Methyl-uridine
  modified_base 95: mod_base = OTHER; note = 2'-O-Methyl-guanosine
  modified_base 96: mod_base = OTHER; note = 2'-O-Methyl-cytidine
  modified_base 97: mod_base = OTHER; note = 2'-O-Methyl-uridine phosphorothioate
  modified_base 98: mod_base = OTHER; note = 2'-O-Methyl-uridine phosphorothioate
  modified_base 99: mod_base = OTHER; note = 2'-O-Methyl-uridine phosphorothioate
  modified_base 100: mod_base = OTHER; note = 2'-O-Methyl-uridine

SEQ ID NO: 1990 - RNA, 100 nt, synthetic construct; identical to SEQ ID NO: 1937
  source 1..100: mol_type = other RNA; note = Description of Artificial Sequence: Synthetic polynucleotide
  modified_base 1: mod_base = OTHER; note = 2'-O-Methyl-cytidine phosphorothioate
  modified_base 2: mod_base = OTHER; note = 2'-O-Methyl-adenosine phosphorothioate
  modified_base 3: mod_base = OTHER; note = 2'-O-Methyl-guanosine
  modified_base 9: mod_base = OTHER; note = Nebularine - ribonebularine
  modified_base 21: mod_base = OTHER; note = 2'-O-Methyl-guanosine
  modified_base 28: mod_base = OTHER; note = Nebularine - 2'-O-methylnebularine
  modified_base 29: mod_base = OTHER; note = 2'-O-Methyl-guanosine
  modified_base 30: mod_base = OTHER; note = 2'-O-Methyl-cytidine
  modified_base 31: mod_base = OTHER; note = 2'-O-Methyl-uridine
  modified_base 32: mod_base = OTHER; note = 2'-O-Methyl-adenosine
  modified_base 33: mod_base = OTHER; note = 2'-O-Methyl-guanosine
  modified_base 34: mod_base = OTHER; note = 2'-O-Methyl-adenosine
  modified_base 35: mod_base = OTHER; note = 2'-O-Methyl-adenosine
  modified_base 36: mod_base = OTHER; note = 2'-O-Methyl-adenosine
  modified_base 37: mod_base = OTHER; note = 2'-O-Methyl-uridine
  modified_base 38: mod_base = OTHER; note = 2'-O-Methyl-adenosine
  modified_base 39: mod_base = OTHER; note = 2'-O-Methyl-guanosine
  modified_base 40: mod_base = OTHER; note = 2'-O-Methyl-cytidine
  modified_base 41: mod_base = OTHER; note = 2'-O-Methyl-adenosine
  modified_base 42: mod_base = OTHER; note = 2'-O-Methyl-adenosine
  modified_base 46: mod_base = OTHER; note = 2'-O-Methyl-adenosine
  modified_base 48: mod_base = OTHER; note = 2'-O-Methyl-adenosine
  modified_base 50: mod_base = OTHER; note = 2'-O-Methyl-uridine
  modified_base 52: mod_base = OTHER; note = 2'-O-Methyl-adenosine
  modified_base 53: mod_base = OTHER; note = 2'-O-Methyl-guanosine
  modified_base 54: mod_base = OTHER; note = 2'-O-Methyl-guanosine
  modified_base 55: mod_base = OTHER; note = 2'-O-Methyl-cytidine
  modified_base 56: mod_base = OTHER; note = 2'-O-Methyl-uridine
  modified_base 57: mod_base = OTHER; note = 2'-O-Methyl-adenosine
  modified_base 60: mod_base = OTHER; note = 2'-O-Methyl-cytidine
  modified_base 61: mod_base = OTHER; note = 2'-O-Methyl-cytidine
  modified_base 66: mod_base = OTHER; note = 2'-O-Methyl-uridine
  modified_base 67: mod_base = OTHER; note = 2'-O-Methyl-cytidine
  modified_base 70: mod_base = OTHER; note = 2'-O-Methyl-cytidine
  modified_base 71: mod_base = OTHER; note = 2'-O-Methyl-uridine
  modified_base 72: mod_base = OTHER; note = 2'-O-Methyl-uridine
  modified_base 73: mod_base = OTHER; note = 2'-O-Methyl-guanosine
  modified_base 74: mod_base = OTHER; note = 2'-O-Methyl-adenosine
  modified_base 75: mod_base = OTHER; note = 2'-O-Methyl-adenosine
  modified_base 76: mod_base = OTHER; note = 2'-O-Methyl-adenosine
  modified_base 77: mod_base = OTHER; note = 2'-O-Methyl-adenosine
  modified_base 78: mod_base = OTHER; note = 2'-O-Methyl-adenosine
  modified_base 79: mod_base = OTHER; note = 2'-O-Methyl-guanosine
  modified_base 80: mod_base = OTHER; note = 2'-O-Methyl-uridine
  modified_base 81: mod_base = OTHER; note = 2'-O-Methyl-guanosine
  modified_base 83: mod_base = OTHER; note = 2'-O-Methyl-cytidine
  modified_base 84: mod_base = OTHER; note = 2'-O-Methyl-adenosine
  modified_base 85: mod_base = OTHER; note = 2'-O-Methyl-cytidine
  modified_base 86: mod_base = OTHER; note = 2'-O-Methyl-cytidine
  modified_base 87: mod_base = OTHER; note = 2'-O-Methyl-guanosine
  modified_base 88: mod_base = OTHER; note = 2'-O-Methyl-adenosine
  modified_base 89: mod_base = OTHER; note = 2'-O-Methyl-guanosine
  modified_base 90: mod_base = OTHER; note = 2'-O-Methyl-uridine
  modified_base 91: mod_base = OTHER; note = 2'-O-Methyl-cytidine
  modified_base 92: mod_base = OTHER; note = 2'-O-Methyl-guanosine
  modified_base 93: mod_base = OTHER; note = 2'-O-Methyl-guanosine
  modified_base 94: mod_base = OTHER; note = 2'-O-Methyl-uridine
  modified_base 95: mod_base = OTHER; note = 2'-O-Methyl-guanosine
  modified_base 96: mod_base = OTHER; note = 2'-O-Methyl-cytidine
  modified_base 97: mod_base = OTHER; note = 2'-O-Methyl-uridine phosphorothioate
  modified_base 98: mod_base = OTHER; note = 2'-O-Methyl-uridine phosphorothioate
  modified_base 99: mod_base = OTHER; note = 2'-O-Methyl-uridine phosphorothioate
  modified_base 100: mod_base = OTHER; note = 2'-O-Methyl-uridine

SEQ ID NO: 1991 - RNA, 100 nt, synthetic construct; identical to SEQ ID NO: 1938
  source 1..100: mol_type = other RNA; note = Description of Artificial Sequence: Synthetic polynucleotide
  modified_base 1: mod_base = OTHER; note = 2'-O-Methyl-cytidine phosphorothioate
  modified_base 2: mod_base = OTHER; note = 2'-O-Methyl-adenosine phosphorothioate
  modified_base 3: mod_base = OTHER; note = 2'-O-Methyl-guanosine
  modified_base 9: mod_base = OTHER; note = Nebularine - ribonebularine
  modified_base 21: mod_base = OTHER; note = 2'-O-Methyl-guanosine
  modified_base 28: mod_base = OTHER; note = 2'-O-Methyl-adenosine
  modified_base 29: mod_base = OTHER; note = 2'-O-Methyl-guanosine
  modified_base 30: mod_base = OTHER; note = 2'-O-Methyl-cytidine
  modified_base 31: mod_base = OTHER; note = 2'-O-Methyl-uridine
  modified_base 32: mod_base = OTHER; note = 2'-O-Methyl-adenosine
  modified_base 33: mod_base = OTHER; note = 2'-O-Methyl-guanosine
  modified_base 34: mod_base = OTHER; note = 2'-O-Methyl-adenosine
  modified_base 35: mod_base = OTHER; note = 2'-O-Methyl-adenosine
  modified_base 36: mod_base = OTHER; note = 2'-O-Methyl-adenosine
  modified_base 37: mod_base = OTHER; note = 2'-O-Methyl-uridine
  modified_base 38: mod_base = OTHER; note = 2'-O-Methyl-adenosine
  modified_base 39: mod_base = OTHER; note = 2'-O-Methyl-guanosine
  modified_base 40: mod_base = OTHER; note = 2'-O-Methyl-cytidine
  modified_base 41: mod_base = OTHER; note = 2'-O-Methyl-adenosine
  modified_base 42: mod_base = OTHER; note = Nebularine - 2'-O-methylnebularine
  modified_base 46: mod_base = OTHER; note = 2'-O-Methyl-adenosine
  modified_base 48: mod_base = OTHER; note = 2'-O-Methyl-adenosine
  modified_base 50: mod_base = OTHER; note = 2'-O-Methyl-uridine
  modified_base 52: mod_base = OTHER; note = 2'-O-Methyl-adenosine
  modified_base 53: mod_base = OTHER; note = 2'-O-Methyl-guanosine
  modified_base 54: mod_base = OTHER; note = 2'-O-Methyl-guanosine
  modified_base 55: mod_base = OTHER; note = 2'-O-Methyl-cytidine
  modified_base 56: mod_base = OTHER; note = 2'-O-Methyl-uridine
  modified_base 57: mod_base = OTHER; note = 2'-O-Methyl-adenosine
  modified_base 60: mod_base = OTHER; note = 2'-O-Methyl-cytidine
  modified_base 61: mod_base = OTHER; note = 2'-O-Methyl-cytidine
  modified_base 66: mod_base = OTHER; note = 2'-O-Methyl-uridine
  modified_base 67: mod_base = OTHER; note = 2'-O-Methyl-cytidine
  modified_base 70: mod_base = OTHER; note = 2'-O-Methyl-cytidine
  modified_base 71: mod_base = OTHER; note = 2'-O-Methyl-uridine
  modified_base 72: mod_base = OTHER; note = 2'-O-Methyl-uridine
  modified_base 73: mod_base = OTHER; note = 2'-O-Methyl-guanosine
  modified_base 74: mod_base = OTHER; note = 2'-O-Methyl-adenosine
  modified_base 75: mod_base = OTHER; note = 2'-O-Methyl-adenosine
  modified_base 76: mod_base = OTHER; note = 2'-O-Methyl-adenosine
  modified_base 77: mod_base = OTHER; note = 2'-O-Methyl-adenosine
  modified_base 78: mod_base = OTHER; note = 2'-O-Methyl-adenosine
  modified_base 79: mod_base = OTHER; note = 2'-O-Methyl-guanosine
  modified_base 80: mod_base = OTHER; note = 2'-O-Methyl-uridine
  modified_base 81: mod_base = OTHER; note = 2'-O-Methyl-guanosine
  modified_base 83: mod_base = OTHER; note = 2'-O-Methyl-cytidine
  modified_base 84: mod_base = OTHER; note = 2'-O-Methyl-adenosine
  modified_base 85: mod_base = OTHER; note = 2'-O-Methyl-cytidine
  modified_base 86: mod_base = OTHER; note = 2'-O-Methyl-cytidine
  modified_base 87: mod_base = OTHER; note = 2'-O-Methyl-guanosine
  modified_base 88: mod_base = OTHER; note = 2'-O-Methyl-adenosine
  modified_base 89: mod_base = OTHER; note = 2'-O-Methyl-guanosine
  modified_base 90: mod_base = OTHER; note = 2'-O-Methyl-uridine
  modified_base 91: mod_base = OTHER; note = 2'-O-Methyl-cytidine
  modified_base 92: mod_base = OTHER; note = 2'-O-Methyl-guanosine
  modified_base 93: mod_base = OTHER; note = 2'-O-Methyl-guanosine
  modified_base 94: mod_base = OTHER; note = 2'-O-Methyl-uridine
  modified_base 95: mod_base = OTHER; note = 2'-O-Methyl-guanosine
  modified_base 96: mod_base = OTHER; note = 2'-O-Methyl-cytidine
  modified_base 97: mod_base = OTHER; note = 2'-O-Methyl-uridine phosphorothioate
  modified_base 98: mod_base = OTHER; note = 2'-O-Methyl-uridine phosphorothioate
  modified_base 99: mod_base = OTHER; note = 2'-O-Methyl-uridine phosphorothioate
  modified_base 100: mod_base = OTHER; note = 2'-O-Methyl-uridine

SEQ ID NO: 1992 - RNA, 100 nt, synthetic construct; identical to SEQ ID NO: 1939
  source 1..100: mol_type = other RNA; note = Description of Artificial Sequence: Synthetic polynucleotide
  modified_base 1: mod_base = OTHER; note = 2'-O-Methyl-cytidine phosphorothioate
  modified_base 2: mod_base = OTHER; note = 2'-O-Methyl-adenosine phosphorothioate
  modified_base 3: mod_base = OTHER; note = 2'-O-Methyl-guanosine
  modified_base 9: mod_base = OTHER; note = Nebularine - ribonebularine
  modified_base 21: mod_base = OTHER; note = 2'-O-Methyl-guanosine
  modified_base 28: mod_base = OTHER; note = 2'-O-Methyl-adenosine
  modified_base 29: mod_base = OTHER; note = 2'-O-Methyl-guanosine
  modified_base 30: mod_base = OTHER; note = 2'-O-Methyl-cytidine
  modified_base 31: mod_base = OTHER; note = 2'-O-Methyl-uridine
  modified_base 32: mod_base = OTHER; note = 2'-O-Methyl-adenosine
  modified_base 33: mod_base = OTHER; note = 2'-O-Methyl-guanosine
  modified_base 34: mod_base = OTHER; note = Nebularine - 2'-O-methylnebularine
  modified_base 35: mod_base = OTHER; note = 2'-O-Methyl-adenosine
  modified_base 36: mod_base = OTHER; note = 2'-O-Methyl-adenosine
  modified_base 37: mod_base = OTHER; note = 2'-O-Methyl-uridine
  modified_base 38: mod_base = OTHER; note = 2'-O-Methyl-adenosine
  modified_base 39: mod_base = OTHER; note = 2'-O-Methyl-guanosine
  modified_base 40: mod_base = OTHER; note = 2'-O-Methyl-cytidine
  modified_base 41: mod_base = OTHER; note = 2'-O-Methyl-adenosine
  modified_base 42: mod_base = OTHER; note = Nebularine - 2'-O-methylnebularine
  modified_base 46: mod_base = OTHER; note = 2'-O-Methyl-adenosine
  modified_base 48: mod_base = OTHER; note = 2'-O-Methyl-adenosine
  modified_base 50: mod_base = OTHER; note = 2'-O-Methyl-uridine
  modified_base 52: mod_base = OTHER; note = 2'-O-Methyl-adenosine
  modified_base 53: mod_base = OTHER; note = 2'-O-Methyl-guanosine
  modified_base 54: mod_base = OTHER; note = 2'-O-Methyl-guanosine
  modified_base 55: mod_base = OTHER; note = 2'-O-Methyl-cytidine
  modified_base 56: mod_base = OTHER; note = 2'-O-Methyl-uridine
  modified_base 57: mod_base = OTHER; note = 2'-O-Methyl-adenosine
  modified_base 60: mod_base = OTHER; note = 2'-O-Methyl-cytidine
  modified_base 61: mod_base = OTHER; note = 2'-O-Methyl-cytidine
  modified_base 66: mod_base = OTHER; note = 2'-O-Methyl-uridine
  modified_base 67: mod_base = OTHER; note = 2'-O-Methyl-cytidine
  modified_base 70: mod_base = OTHER; note = 2'-O-Methyl-cytidine
  modified_base 71: mod_base = OTHER; note = 2'-O-Methyl-uridine
  modified_base 72: mod_base = OTHER; note = 2'-O-Methyl-uridine
  modified_base 73: mod_base = OTHER; note = 2'-O-Methyl-guanosine
  modified_base 74: mod_base = OTHER; note = 2'-O-Methyl-adenosine
  modified_base 75: mod_base = OTHER; note = 2'-O-Methyl-adenosine
  modified_base 76: mod_base = OTHER; note = 2'-O-Methyl-adenosine
  modified_base 77: mod_base = OTHER; note = 2'-O-Methyl-adenosine
  modified_base 78: mod_base = OTHER; note = 2'-O-Methyl-adenosine
  modified_base 79: mod_base = OTHER; note = 2'-O-Methyl-guanosine
  modified_base 80: mod_base = OTHER; note = 2'-O-Methyl-uridine
  modified_base 81: mod_base = OTHER; note = 2'-O-Methyl-guanosine
  modified_base 83: mod_base = OTHER; note = 2'-O-Methyl-cytidine
  modified_base 84: mod_base = OTHER; note = 2'-O-Methyl-adenosine
  modified_base 85: mod_base = OTHER; note = 2'-O-Methyl-cytidine
  modified_base 86: mod_base = OTHER; note = 2'-O-Methyl-cytidine
  modified_base 87: mod_base = OTHER; note = 2'-O-Methyl-guanosine
  modified_base 88: mod_base = OTHER; note = 2'-O-Methyl-adenosine
  modified_base 89: mod_base = OTHER; note = 2'-O-Methyl-guanosine
  modified_base 90: mod_base = OTHER; note = 2'-O-Methyl-uridine
  modified_base 91: mod_base = OTHER; note = 2'-O-Methyl-cytidine
  modified_base 92: mod_base = OTHER; note = 2'-O-Methyl-guanosine
  modified_base 93: mod_base = OTHER; note = 2'-O-Methyl-guanosine
  modified_base 94: mod_base = OTHER; note = 2'-O-Methyl-uridine
  modified_base 95: mod_base = OTHER; note = 2'-O-Methyl-guanosine
  modified_base 96: mod_base = OTHER; note = 2'-O-Methyl-cytidine
  modified_base 97: mod_base = OTHER; note = 2'-O-Methyl-uridine phosphorothioate
  modified_base 98: mod_base = OTHER; note = 2'-O-Methyl-uridine phosphorothioate
  modified_base 99: mod_base = OTHER; note = 2'-O-Methyl-uridine phosphorothioate
  modified_base 100: mod_base = OTHER; note = 2'-O-Methyl-uridine

SEQ ID NO: 1993 - RNA, 100 nt, synthetic construct; identical to SEQ ID NO: 1940
  source 1..100: mol_type = other RNA; note = Description of Artificial Sequence: Synthetic polynucleotide
  modified_base 1: mod_base = OTHER; note = 2'-O-Methyl-cytidine phosphorothioate
  modified_base 2: mod_base = OTHER; note = 2'-O-Methyl-adenosine phosphorothioate
  modified_base 3: mod_base = OTHER; note = 2'-O-Methyl-guanosine
  modified_base 9: mod_base = OTHER; note = Nebularine - ribonebularine
  modified_base 21: mod_base = OTHER; note = 2'-O-Methyl-guanosine
  modified_base 28: mod_base = OTHER; note = 2'-O-Methyl-adenosine
  modified_base 29: mod_base = OTHER; note = 2'-O-Methyl-guanosine
  modified_base 30: mod_base = OTHER; note = 2'-O-Methyl-cytidine
  modified_base 31: mod_base = OTHER; note = 2'-O-Methyl-uridine
  modified_base 32: mod_base = OTHER; note = 2'-O-Methyl-adenosine
  modified_base 33: mod_base = OTHER; note = 2'-O-Methyl-guanosine
  modified_base 34: mod_base = OTHER; note = Nebularine - 2'-O-methylnebularine
  modified_base 35: mod_base = OTHER; note = 2'-O-Methyl-adenosine
  modified_base 36: mod_base = OTHER; note = 2'-O-Methyl-adenosine
  modified_base 37: mod_base = OTHER; note = 2'-O-Methyl-uridine
  modified_base 38: mod_base = OTHER; note = 2'-O-Methyl-adenosine
  modified_base 39: mod_base = OTHER; note = 2'-O-Methyl-guanosine
  modified_base 40: mod_base = OTHER; note = 2'-O-Methyl-cytidine
  modified_base 41: mod_base = OTHER; note = 2'-O-Methyl-adenosine
  modified_base 42: mod_base = OTHER; note = 2'-O-Methyl-adenosine
  modified_base 46: mod_base = OTHER; note = 2'-O-Methyl-adenosine
  modified_base 48: mod_base = OTHER; note = 2'-O-Methyl-adenosine
  modified_base 50: mod_base = OTHER; note = 2'-O-Methyl-uridine
  modified_base 52: mod_base = OTHER; note = 2'-O-Methyl-adenosine
  modified_base 53: mod_base = OTHER; note = 2'-O-Methyl-guanosine
  modified_base 54: mod_base = OTHER; note = 2'-O-Methyl-guanosine
  modified_base 55: mod_base = OTHER; note = 2'-O-Methyl-cytidine
  modified_base 56: mod_base = OTHER; note = 2'-O-Methyl-uridine
  modified_base 57: mod_base = OTHER; note = 2'-O-Methyl-adenosine
  modified_base 60: mod_base = OTHER; note = 2'-O-Methyl-cytidine
  modified_base 61: mod_base = OTHER; note = 2'-O-Methyl-cytidine
  modified_base 66: mod_base = OTHER; note = 2'-O-Methyl-uridine
  modified_base 67: mod_base = OTHER; note = 2'-O-Methyl-cytidine
  modified_base 70: mod_base = OTHER; note = 2'-O-Methyl-cytidine
  modified_base 71: mod_base = OTHER; note = 2'-O-Methyl-uridine
  modified_base 72: mod_base = OTHER; note = 2'-O-Methyl-uridine
  modified_base 73: mod_base = OTHER; note = 2'-O-Methyl-guanosine
  modified_base 74: mod_base = OTHER; note = 2'-O-Methyl-adenosine
  modified_base 75: mod_base = OTHER; note = 2'-O-Methyl-adenosine
  modified_base 76: mod_base = OTHER; note = 2'-O-Methyl-adenosine
  modified_base 77: mod_base = OTHER; note = 2'-O-Methyl-adenosine
  modified_base 78: mod_base = OTHER; note = 2'-O-Methyl-adenosine
  modified_base 79: mod_base = OTHER; note = 2'-O-Methyl-guanosine
  modified_base 80: mod_base = OTHER; note = 2'-O-Methyl-uridine
  modified_base 81: mod_base = OTHER; note = 2'-O-Methyl-guanosine
  modified_base 83: mod_base = OTHER; note = 2'-O-Methyl-cytidine
  modified_base 84: mod_base = OTHER; note = 2'-O-Methyl-adenosine
  modified_base 85: mod_base = OTHER; note = 2'-O-Methyl-cytidine
  modified_base 86: mod_base = OTHER; note = 2'-O-Methyl-cytidine
  modified_base 87: mod_base = OTHER; note = 2'-O-Methyl-guanosine
  modified_base 88: mod_base = OTHER; note = 2'-O-Methyl-adenosine
  modified_base 89: mod_base = OTHER; note = 2'-O-Methyl-guanosine
  modified_base 90: mod_base = OTHER; note = 2'-O-Methyl-uridine
  modified_base 91: mod_base = OTHER; note = 2'-O-Methyl-cytidine
  modified_base 92: mod_base = OTHER; note = 2'-O-Methyl-guanosine
  modified_base 93: mod_base = OTHER; note = 2'-O-Methyl-guanosine
  modified_base 94: mod_base = OTHER; note = 2'-O-Methyl-uridine
  modified_base 95: mod_base = OTHER; note = 2'-O-Methyl-guanosine
  modified_base 96: mod_base = OTHER; note = 2'-O-Methyl-cytidine
  modified_base 97: mod_base = OTHER; note = 2'-O-Methyl-uridine phosphorothioate
  modified_base 98: mod_base = OTHER; note = 2'-O-Methyl-uridine phosphorothioate
  modified_base 99: mod_base = OTHER; note = 2'-O-Methyl-uridine phosphorothioate
  modified_base 100: mod_base = OTHER; note = 2'-O-Methyl-uridine

SEQ ID NO: 1994 - DNA, 100 bp, synthetic construct; identical to SEQ ID NO: 1941
  source 1..100: mol_type = other DNA; note = Description of Artificial Sequence: Synthetic oligonucleotide; note = Description of Combined DNA/RNA Molecule: Synthetic oligonucleotide
  modified_base 1: mod_base = OTHER; note = 2'-O-Methyl-cytidine phosphorothioate
  modified_base 2: mod_base = OTHER; note = 2'-O-Methyl-adenosine phosphorothioate
  modified_base 3: mod_base = OTHER; note = 2'-O-Methyl-guanosine
  modified_base 9: mod_base = OTHER; note = Nebularine - 2'-deoxynebularine
  modified_base 14: mod_base = OTHER; note = Nebularine - 2'-deoxynebularine
  modified_base 21: mod_base = OTHER; note = 2'-O-Methyl-guanosine
  modified_base 28: mod_base = OTHER; note = 2'-O-Methyl-adenosine
  modified_base 29: mod_base = OTHER; note = 2'-O-Methyl-guanosine
  modified_base 30: mod_base = OTHER; note = 2'-O-Methyl-cytidine
  modified_base 31: mod_base = OTHER; note = 2'-O-Methyl-uridine
  modified_base 32: mod_base = OTHER; note = 2'-O-Methyl-adenosine
  modified_base 33: mod_base = OTHER; note = 2'-O-Methyl-guanosine
  modified_base 34: mod_base = OTHER; note = 2'-O-Methyl-adenosine
  modified_base 35: mod_base = OTHER; note = 2'-O-Methyl-adenosine
  modified_base 36: mod_base = OTHER; note = 2'-O-Methyl-adenosine
  modified_base 37: mod_base = OTHER; note = 2'-O-Methyl-uridine
  modified_base 38: mod_base = OTHER; note = 2'-O-Methyl-adenosine
  modified_base 39: mod_base = OTHER; note = 2'-O-Methyl-guanosine
  modified_base 40: mod_base = OTHER; note = 2'-O-Methyl-cytidine
  modified_base 41: mod_base = OTHER; note = 2'-O-Methyl-adenosine
  modified_base 42: mod_base = OTHER; note = 2'-O-Methyl-adenosine
  modified_base 46: mod_base = OTHER; note = 2'-O-Methyl-adenosine
  modified_base 48: mod_base = OTHER; note = 2'-O-Methyl-adenosine
  modified_base 50: mod_base = OTHER; note = 2'-O-Methyl-uridine
  modified_base 52: mod_base = OTHER; note = 2'-O-Methyl-adenosine
  modified_base 53: mod_base = OTHER; note = 2'-O-Methyl-guanosine
  modified_base 54: mod_base = OTHER; note = 2'-O-Methyl-guanosine
  modified_base 55: mod_base = OTHER; note = 2'-O-Methyl-cytidine
  modified_base 56: mod_base = OTHER; note = 2'-O-Methyl-uridine
  modified_base 57: mod_base = OTHER; note = 2'-O-Methyl-adenosine
  modified_base 60: mod_base = OTHER; note = 2'-O-Methyl-cytidine
  modified_base 61: mod_base = OTHER; note = 2'-O-Methyl-cytidine
  modified_base 66: mod_base = OTHER; note = 2'-O-Methyl-uridine
  modified_base 67: mod_base = OTHER; note = 2'-O-Methyl-cytidine
  modified_base 70: mod_base = OTHER; note = 2'-O-Methyl-cytidine
  modified_base 71: mod_base = OTHER; note = 2'-O-Methyl-uridine
  modified_base 72: mod_base = OTHER; note = 2'-O-Methyl-uridine
  modified_base 73: mod_base = OTHER; note = 2'-O-Methyl-guanosine
  modified_base 74: mod_base = OTHER; note = 2'-O-Methyl-adenosine
  modified_base 75: mod_base = OTHER; note = 2'-O-Methyl-adenosine
  modified_base 76: mod_base = OTHER; note = 2'-O-Methyl-adenosine
  modified_base 77: mod_base = OTHER; note = 2'-O-Methyl-adenosine
  modified_base 78: mod_base = OTHER; note = 2'-O-Methyl-adenosine
  modified_base 79: mod_base = OTHER; note = 2'-O-Methyl-guanosine
  modified_base 80: mod_base = OTHER; note = 2'-O-Methyl-uridine
  modified_base 81: mod_base = OTHER; note = 2'-O-Methyl-guanosine
  modified_base 83: mod_base = OTHER; note = 2'-O-Methyl-cytidine
  modified_base 84: mod_base = OTHER; note = 2'-O-Methyl-adenosine
  modified_base 85: mod_base = OTHER; note = 2'-O-Methyl-cytidine
  modified_base 86: mod_base = OTHER; note = 2'-O-Methyl-cytidine
  modified_base 87: mod_base = OTHER; note = 2'-O-Methyl-guanosine
  modified_base 88: mod_base = OTHER; note = 2'-O-Methyl-adenosine
  modified_base 89: mod_base = OTHER; note = 2'-O-Methyl-guanosine
  modified_base 90: mod_base = OTHER; note = 2'-O-Methyl-uridine
  modified_base 91: mod_base = OTHER; note = 2'-O-Methyl-cytidine
  modified_base 92: mod_base = OTHER; note = 2'-O-Methyl-guanosine
  modified_base 93: mod_base = OTHER; note = 2'-O-Methyl-guanosine
  modified_base 94: mod_base = OTHER; note = 2'-O-Methyl-uridine
  modified_base 95: mod_base = OTHER; note = 2'-O-Methyl-guanosine
  modified_base 96: mod_base = OTHER; note = 2'-O-Methyl-cytidine
  modified_base 97: mod_base = OTHER; note = 2'-O-Methyl-uridine phosphorothioate
  modified_base 98: mod_base = OTHER; note = 2'-O-Methyl-uridine phosphorothioate
  modified_base 99: mod_base = OTHER; note = 2'-O-Methyl-uridine phosphorothioate
  modified_base 100: mod_base = OTHER; note = 2'-O-Methyl-uridine
  misc_feature 1..8: note = RNA
  misc_feature 9: note = DNA
  misc_feature 10..13: note = RNA
  misc_feature 14: note = DNA
  misc_feature 15..100: note = RNA

SEQ ID NO: 1995 - DNA, 100 bp, synthetic construct; identical to SEQ ID NO: 1942
  source 1..100: mol_type = other DNA; note = Description of Artificial Sequence: Synthetic oligonucleotide; note = Description of Combined DNA/RNA Molecule: Synthetic oligonucleotide
  modified_base 1: mod_base = OTHER; note = 2'-O-Methyl-cytidine phosphorothioate
  modified_base 2: mod_base = OTHER; note = 2'-O-Methyl-adenosine phosphorothioate
  modified_base 3: mod_base = OTHER; note = 2'-O-Methyl-guanosine
  modified_base 9: mod_base = OTHER; note = Nebularine - 2'-deoxynebularine
  modified_base 21: mod_base = OTHER; note = 2'-O-Methyl-guanosine
  modified_base 28: mod_base = OTHER; note = 2'-O-Methyl-adenosine
  modified_base 29: mod_base = OTHER; note = 2'-O-Methyl-guanosine
  modified_base 30: mod_base = OTHER; note = 2'-O-Methyl-cytidine
  modified_base 31: mod_base = OTHER; note = 2'-O-Methyl-uridine
  modified_base 32: mod_base = OTHER; note = 2'-O-Methyl-adenosine
  modified_base 33: mod_base = OTHER; note = 2'-O-Methyl-guanosine
  modified_base 34: mod_base = OTHER; note = 2'-O-Methyl-adenosine
  modified_base 35: mod_base = OTHER; note = 2'-O-Methyl-adenosine
  modified_base 36: mod_base = OTHER; note = 2'-O-Methyl-adenosine
  modified_base 37: mod_base = OTHER; note = 2'-O-Methyl-uridine
  modified_base 38: mod_base = OTHER; note = 2'-O-Methyl-adenosine
  modified_base 39: mod_base = OTHER; note = 2'-O-Methyl-guanosine
  modified_base 40: mod_base = OTHER; note = 2'-O-Methyl-cytidine
  modified_base 41: mod_base = OTHER; note = 2'-O-Methyl-adenosine
  modified_base 42: mod_base = OTHER; note = 2'-O-Methyl-adenosine
  modified_base 46: mod_base = OTHER; note = 2'-O-Methyl-adenosine
  modified_base 48: mod_base = OTHER; note = 2'-O-Methyl-adenosine
  modified_base 50: mod_base = OTHER; note = 2'-O-Methyl-uridine
  modified_base 52: mod_base = OTHER; note = 2'-O-Methyl-adenosine
  modified_base 53: mod_base = OTHER; note = 2'-O-Methyl-guanosine
  modified_base 54: mod_base = OTHER; note = 2'-O-Methyl-guanosine
  modified_base 55: mod_base = OTHER; note = 2'-O-Methyl-cytidine
  modified_base 56: mod_base = OTHER; note = 2'-O-Methyl-uridine
  modified_base 57: mod_base = OTHER; note = 2'-O-Methyl-adenosine
  modified_base 60: mod_base = OTHER; note = 2'-O-Methyl-cytidine
  modified_base 61: mod_base = OTHER; note = 2'-O-Methyl-cytidine
  modified_base 66: mod_base = OTHER; note = 2'-O-Methyl-uridine
  modified_base 67: mod_base = OTHER; note = 2'-O-Methyl-cytidine
  modified_base 70: mod_base = OTHER; note = 2'-O-Methyl-cytidine
  modified_base 71: mod_base = OTHER; note = 2'-O-Methyl-uridine
  modified_base 72: mod_base = OTHER; note = 2'-O-Methyl-uridine
  modified_base 73: mod_base = OTHER; note = 2'-O-Methyl-guanosine
  modified_base 74: mod_base = OTHER; note = 2'-O-Methyl-adenosine
  modified_base 75: mod_base = OTHER; note = 2'-O-Methyl-adenosine
  modified_base 76: mod_base = OTHER; note = 2'-O-Methyl-adenosine
  modified_base 77: mod_base = OTHER; note = 2'-O-Methyl-adenosine
  modified_base 78: mod_base = OTHER; note = 2'-O-Methyl-adenosine
  modified_base 79: mod_base = OTHER; note = 2'-O-Methyl-guanosine
  modified_base 80: mod_base = OTHER; note = 2'-O-Methyl-uridine
  modified_base 81: mod_base = OTHER; note = 2'-O-Methyl-guanosine
  modified_base 83: mod_base = OTHER; note = 2'-O-Methyl-cytidine
  modified_base 84: mod_base = OTHER; note = 2'-O-Methyl-adenosine
  modified_base 85: mod_base = OTHER; note = 2'-O-Methyl-cytidine
  modified_base 86: mod_base = OTHER; note = 2'-O-Methyl-cytidine
  modified_base 87: mod_base = OTHER; note = 2'-O-Methyl-guanosine
  modified_base 88: mod_base = OTHER; note = 2'-O-Methyl-adenosine
  modified_base 89: mod_base = OTHER; note = 2'-O-Methyl-guanosine
  modified_base 90: mod_base = OTHER; note = 2'-O-Methyl-uridine
  modified_base 91: mod_base = OTHER; note = 2'-O-Methyl-cytidine
  modified_base 92: mod_base = OTHER; note = 2'-O-Methyl-guanosine
  modified_base 93: mod_base = OTHER; note = 2'-O-Methyl-guanosine
  modified_base 94: mod_base = OTHER; note = 2'-O-Methyl-uridine
  modified_base 95: mod_base = OTHER; note = 2'-O-Methyl-guanosine
  modified_base 96: mod_base = OTHER; note = 2'-O-Methyl-cytidine
  modified_base 97: mod_base = OTHER; note = 2'-O-Methyl-uridine phosphorothioate
  modified_base 98: mod_base = OTHER; note = 2'-O-Methyl-uridine phosphorothioate
  modified_base 99: mod_base = OTHER; note = 2'-O-Methyl-uridine phosphorothioate
  modified_base 100: mod_base = OTHER; note = 2'-O-Methyl-uridine
  misc_feature 1..8: note = RNA
  misc_feature 9: note = DNA
  misc_feature 10..100: note = RNA

SEQ ID NO: 1996 - DNA, 100 bp, synthetic construct; identical to SEQ ID NO: 1943
  source 1..100: mol_type = other DNA; note = Description of Artificial Sequence: Synthetic oligonucleotide; note = Description of Combined DNA/RNA Molecule: Synthetic oligonucleotide
  modified_base 1: mod_base = OTHER; note = 2'-O-Methyl-cytidine phosphorothioate
  modified_base 2: mod_base = OTHER; note = 2'-O-Methyl-adenosine phosphorothioate
  modified_base 3: mod_base = OTHER; note = 2'-O-Methyl-guanosine
  modified_base 14: mod_base = OTHER; note = Nebularine - 2'-deoxynebularine
  modified_base 21: mod_base = OTHER; note = 2'-O-Methyl-guanosine
  modified_base 28: mod_base = OTHER; note = 2'-O-Methyl-adenosine
  modified_base 29: mod_base = OTHER; note = 2'-O-Methyl-guanosine
  modified_base 30: mod_base = OTHER; note = 2'-O-Methyl-cytidine
  modified_base 31: mod_base = OTHER; note = 2'-O-Methyl-uridine
  modified_base 32: mod_base = OTHER; note = 2'-O-Methyl-adenosine
  modified_base 33: mod_base = OTHER; note = 2'-O-Methyl-guanosine
  modified_base 34: mod_base = OTHER; note = 2'-O-Methyl-adenosine
  modified_base 35: mod_base = OTHER; note = 2'-O-Methyl-adenosine
  modified_base 36: mod_base = OTHER; note = 2'-O-Methyl-adenosine
  modified_base 37: mod_base = OTHER; note = 2'-O-Methyl-uridine
  modified_base 38: mod_base = OTHER; note = 2'-O-Methyl-adenosine
  modified_base 39: mod_base = OTHER; note = 2'-O-Methyl-guanosine
  modified_base 40: mod_base = OTHER; note = 2'-O-Methyl-cytidine
  modified_base 41: mod_base = OTHER; note = 2'-O-Methyl-adenosine
  modified_base 42: mod_base = OTHER; note = 2'-O-Methyl-adenosine
  modified_base 46: mod_base = OTHER; note = 2'-O-Methyl-adenosine
  modified_base 48: mod_base = OTHER; note = 2'-O-Methyl-adenosine
  modified_base 50: mod_base = OTHER; note = 2'-O-Methyl-uridine
  modified_base 52: mod_base = OTHER; note = 2'-O-Methyl-adenosine
  modified_base 53: mod_base = OTHER; note = 2'-O-Methyl-guanosine
  modified_base 54: mod_base = OTHER; note = 2'-O-Methyl-guanosine
  modified_base 55: mod_base = OTHER; note = 2'-O-Methyl-cytidine
  modified_base 56: mod_base = OTHER; note = 2'-O-Methyl-uridine
  modified_base 57: mod_base = OTHER; note = 2'-O-Methyl-adenosine
  modified_base 60: mod_base = OTHER; note = 2'-O-Methyl-cytidine
  modified_base 61: mod_base = OTHER; note = 2'-O-Methyl-cytidine
  modified_base 66: mod_base = OTHER; note = 2'-O-Methyl-uridine
  modified_base 67: mod_base = OTHER; note = 2'-O-Methyl-cytidine
  modified_base 70: mod_base = OTHER; note = 2'-O-Methyl-cytidine
  modified_base 71: mod_base = OTHER; note = 2'-O-Methyl-uridine
  modified_base 72: mod_base = OTHER; note = 2'-O-Methyl-uridine
  modified_base 73: mod_base = OTHER; note = 2'-O-Methyl-guanosine
  modified_base 74: mod_base = OTHER; note = 2'-O-Methyl-adenosine
  modified_base 75: mod_base = OTHER; note = 2'-O-Methyl-adenosine
  modified_base 76: mod_base = OTHER; note = 2'-O-Methyl-adenosine
  modified_base 77: mod_base = OTHER; note = 2'-O-Methyl-adenosine
  modified_base 78: mod_base = OTHER; note = 2'-O-Methyl-adenosine
  modified_base 79: mod_base = OTHER; note = 2'-O-Methyl-guanosine
  modified_base 80: mod_base = OTHER; note = 2'-O-Methyl-uridine
  modified_base 81: mod_base = OTHER; note = 2'-O-Methyl-guanosine
  modified_base 83: mod_base = OTHER; note = 2'-O-Methyl-cytidine
  modified_base 84: mod_base = OTHER; note = 2'-O-Methyl-adenosine
  modified_base 85: mod_base = OTHER; note = 2'-O-Methyl-cytidine
  modified_base 86: mod_base = OTHER; note = 2'-O-Methyl-cytidine
  modified_base 87: mod_base = OTHER; note = 2'-O-Methyl-guanosine
  modified_base 88: mod_base = OTHER; note = 2'-O-Methyl-adenosine
  modified_base 89: mod_base = OTHER; note = 2'-O-Methyl-guanosine
  modified_base 90: mod_base = OTHER; note = 2'-O-Methyl-uridine
  modified_base 91: mod_base = OTHER; note = 2'-O-Methyl-cytidine
  modified_base 92: mod_base = OTHER; note = 2'-O-Methyl-guanosine
  modified_base 93: mod_base = OTHER; note = 2'-O-Methyl-guanosine
  modified_base 94: mod_base = OTHER; note = 2'-O-Methyl-uridine
  modified_base 95: mod_base = OTHER; note = 2'-O-Methyl-guanosine
  modified_base 96: mod_base = OTHER; note = 2'-O-Methyl-cytidine
  modified_base 97: mod_base = OTHER; note = 2'-O-Methyl-uridine phosphorothioate
  modified_base 98: mod_base = OTHER; note = 2'-O-Methyl-uridine phosphorothioate
  modified_base 99: mod_base = OTHER; note = 2'-O-Methyl-uridine phosphorothioate
  modified_base 100: mod_base = OTHER; note = 2'-O-Methyl-uridine
  misc_feature 1..13: note = RNA
  misc_feature 14: note = DNA
  misc_feature 15..100: note = RNA

SEQ ID NO: 1997 - DNA, 100 bp, synthetic construct; identical to SEQ ID NO: 1944
  source 1..100: mol_type = other DNA; note = Description of Artificial Sequence: Synthetic oligonucleotide; note = Description of Combined DNA/RNA Molecule: Synthetic oligonucleotide
  modified_base 1: mod_base = OTHER; note = 2'-O-Methyl-cytidine phosphorothioate
  modified_base 2: mod_base = OTHER; note = 2'-O-Methyl-adenosine phosphorothioate
  modified_base 3: mod_base = OTHER; note = 2'-O-Methyl-guanosine
  modified_base 21: mod_base = OTHER; note = 2'-O-Methyl-guanosine
  modified_base 28: mod_base = OTHER; note = 2'-O-Methyl-adenosine
  modified_base 29: mod_base = OTHER; note = 2'-O-Methyl-guanosine
  modified_base 30: mod_base = OTHER; note = 2'-O-Methyl-cytidine
  modified_base 31: mod_base = OTHER; note = 2'-O-Methyl-uridine
  modified_base 32: mod_base = OTHER; note = 2'-O-Methyl-adenosine
  modified_base 33: mod_base = OTHER; note = 2'-O-Methyl-guanosine
  modified_base 34: mod_base = OTHER; note = Nebularine - 2'-deoxynebularine
  modified_base 35: mod_base = OTHER; note = 2'-O-Methyl-adenosine
  modified_base 36: mod_base = OTHER; note = 2'-O-Methyl-adenosine
  modified_base 37: mod_base = OTHER; note = 2'-O-Methyl-uridine
  modified_base 38: mod_base = OTHER; note = 2'-O-Methyl-adenosine
  modified_base 39: mod_base = OTHER; note = 2'-O-Methyl-guanosine
  modified_base 40: mod_base = OTHER; note = 2'-O-Methyl-cytidine
  modified_base 41: mod_base = OTHER; note = 2'-O-Methyl-adenosine
  modified_base 42: mod_base = OTHER; note = 2'-O-Methyl-adenosine
  modified_base 46: mod_base = OTHER; note = 2'-O-Methyl-adenosine
  modified_base 48: mod_base = OTHER; note = 2'-O-Methyl-adenosine
  modified_base 50: mod_base = OTHER; note = 2'-O-Methyl-uridine
  modified_base 52: mod_base = OTHER; note = 2'-O-Methyl-adenosine
  modified_base 53: mod_base = OTHER; note = 2'-O-Methyl-guanosine
  modified_base 54: mod_base = OTHER; note = 2'-O-Methyl-guanosine
  modified_base 55: mod_base = OTHER; note = 2'-O-Methyl-cytidine
  modified_base 56: mod_base = OTHER; note = 2'-O-Methyl-uridine
  modified_base 57: mod_base = OTHER; note = 2'-O-Methyl-adenosine
  modified_base 60: mod_base = OTHER; note = 2'-O-Methyl-cytidine
  modified_base 61: mod_base = OTHER; note = 2'-O-Methyl-cytidine
  modified_base 66: mod_base = OTHER; note = 2'-O-Methyl-uridine
  modified_base 67: mod_base = OTHER; note = 2'-O-Methyl-cytidine
  modified_base 70: mod_base = OTHER; note = 2'-O-Methyl-cytidine
  modified_base 71: mod_base = OTHER; note = 2'-O-Methyl-uridine
  modified_base 72: mod_base = OTHER; note = 2'-O-Methyl-uridine
  modified_base 73: mod_base = OTHER; note = 2'-O-Methyl-guanosine
  modified_base 74: mod_base = OTHER; note = 2'-O-Methyl-adenosine
  modified_base 75: mod_base = OTHER; note = 2'-O-Methyl-adenosine
  modified_base 76: mod_base = OTHER; note = 2'-O-Methyl-adenosine
  modified_base 77: mod_base = OTHER; note = 2'-O-Methyl-adenosine
  modified_base 78: mod_base = OTHER; note = 2'-O-Methyl-adenosine
  modified_base 79: mod_base = OTHER; note = 2'-O-Methyl-guanosine
  modified_base 80: mod_base = OTHER; note = 2'-O-Methyl-uridine
  modified_base 81: mod_base = OTHER; note = 2'-O-Methyl-guanosine
  modified_base 83: mod_base = OTHER; note = 2'-O-Methyl-cytidine
  modified_base 84: mod_base = OTHER; note = 2'-O-Methyl-adenosine
  modified_base 85: mod_base = OTHER; note = 2'-O-Methyl-cytidine
  modified_base 86: mod_base = OTHER; note = 2'-O-Methyl-cytidine
  modified_base 87: mod_base = OTHER; note = 2'-O-Methyl-guanosine
  modified_base 88: mod_base = OTHER; note = 2'-O-Methyl-adenosine
  modified_base 89: mod_base = OTHER; note = 2'-O-Methyl-guanosine
  modified_base 90: mod_base = OTHER; note = 2'-O-Methyl-uridine
  modified_base 91: mod_base = OTHER; note = 2'-O-Methyl-cytidine
  modified_base 92: mod_base = OTHER; note = 2'-O-Methyl-guanosine
  modified_base 93: mod_base = OTHER; note = 2'-O-Methyl-guanosine
  modified_base 94: mod_base = OTHER; note = 2'-O-Methyl-uridine
  modified_base 95: mod_base = OTHER; note = 2'-O-Methyl-guanosine
  modified_base 96: mod_base = OTHER; note = 2'-O-Methyl-cytidine
  modified_base 97: mod_base = OTHER; note = 2'-O-Methyl-uridine phosphorothioate
  modified_base 98: mod_base = OTHER; note = 2'-O-Methyl-uridine phosphorothioate
  modified_base 99: mod_base = OTHER; note = 2'-O-Methyl-uridine phosphorothioate
  modified_base 100: mod_base = OTHER; note = 2'-O-Methyl-uridine
  misc_feature 1..33: note = RNA
  misc_feature 34: note = DNA
  misc_feature 35..100: note = RNA

SEQ ID NO: 1998 - DNA, 100 bp, synthetic construct; identical to SEQ ID NO: 1945
  source 1..100: mol_type = other DNA; note = Description of Artificial Sequence: Synthetic oligonucleotide; note = Description of Combined DNA/RNA Molecule: Synthetic oligonucleotide
  modified_base 1: mod_base = OTHER; note = 2'-O-Methyl-cytidine phosphorothioate
  modified_base 2: mod_base = OTHER; note = 2'-O-Methyl-adenosine phosphorothioate
  modified_base 3: mod_base = OTHER; note = 2'-O-Methyl-guanosine
  modified_base 21: mod_base = OTHER; note = 2'-O-Methyl-guanosine
  modified_base 28: mod_base = OTHER; note = 2'-O-Methyl-adenosine
  modified_base 29: mod_base = OTHER; note = 2'-O-Methyl-guanosine
  modified_base 30: mod_base = OTHER; note = 2'-O-Methyl-cytidine
  modified_base 31: mod_base = OTHER; note = 2'-O-Methyl-uridine
  modified_base 32: mod_base = OTHER; note = 2'-O-Methyl-adenosine
  modified_base 33: mod_base = OTHER; note = 2'-O-Methyl-guanosine
  modified_base 34: mod_base = OTHER; note = Nebularine - 2'-deoxynebularine
  modified_base 35: mod_base = OTHER; note = 2'-O-Methyl-adenosine
  modified_base 36: mod_base = OTHER; note = 2'-O-Methyl-adenosine
  modified_base 37: mod_base = OTHER; note = 2'-O-Methyl-uridine
  modified_base 38: mod_base = OTHER; note = 2'-O-Methyl-adenosine
  modified_base 39: mod_base = OTHER; note = 2'-O-Methyl-guanosine
  modified_base 40: mod_base = OTHER; note = 2'-O-Methyl-cytidine
  modified_base 41: mod_base = OTHER; note = 2'-O-Methyl-adenosine
  modified_base 42: mod_base = OTHER; note = 2'-O-Methyl-adenosine
  modified_base 46: mod_base = OTHER; note = 2'-O-Methyl-adenosine
  modified_base 48: mod_base = OTHER; note = 2'-O-Methyl-adenosine
  modified_base 50: mod_base = OTHER; note = 2'-O-Methyl-uridine
  modified_base 52: mod_base = OTHER; note = 2'-O-Methyl-adenosine
  modified_base 53: mod_base = OTHER; note = 2'-O-Methyl-guanosine
  modified_base 54: mod_base = OTHER; note = 2'-O-Methyl-guanosine
  modified_base 55: mod_base = OTHER; note = 2'-O-Methyl-cytidine
  modified_base 56: mod_base = OTHER; note = 2'-O-Methyl-uridine
  modified_base 57: mod_base = OTHER; note = Nebularine - 2'-deoxynebularine
  modified_base 60: mod_base = OTHER; note = 2'-O-Methyl-cytidine
  modified_base 61: mod_base = OTHER; note = 2'-O-Methyl-cytidine
  modified_base 66: mod_base = OTHER; note = 2'-O-Methyl-uridine
  modified_base 67: mod_base = OTHER; note = 2'-O-Methyl-cytidine
  modified_base 70: mod_base = OTHER; note = 2'-O-Methyl-cytidine
  modified_base 71: mod_base = OTHER; note = 2'-O-Methyl-uridine
  modified_base 72: mod_base = OTHER; note = 2'-O-Methyl-uridine
  modified_base 73: mod_base = OTHER; note = 2'-O-Methyl-guanosine
  modified_base 74: mod_base = OTHER; note = 2'-O-Methyl-adenosine
  modified_base 75: mod_base = OTHER; note = 2'-O-Methyl-adenosine
  modified_base 76: mod_base = OTHER; note = 2'-O-Methyl-adenosine
  modified_base 77: mod_base = OTHER; note = 2'-O-Methyl-adenosine
  modified_base 78: mod_base = OTHER; note = 2'-O-Methyl-adenosine
  modified_base 79: mod_base = OTHER; note = 2'-O-Methyl-guanosine
  modified_base 80: mod_base = OTHER; note = 2'-O-Methyl-uridine
  modified_base 81: mod_base = OTHER; note = 2'-O-Methyl-guanosine
  modified_base 83: mod_base = OTHER; note = 2'-O-Methyl-cytidine
  modified_base 84: mod_base = OTHER; note = 2'-O-Methyl-adenosine
  modified_base 85: mod_base = OTHER; note = 2'-O-Methyl-cytidine
  modified_base 86: mod_base = OTHER; note = 2'-O-Methyl-cytidine
  modified_base 87: mod_base = OTHER; note = 2'-O-Methyl-guanosine
  modified_base 88: mod_base = OTHER; note = 2'-O-Methyl-adenosine
  modified_base 89: mod_base = OTHER; note = 2'-O-Methyl-guanosine
  modified_base 90: mod_base = OTHER; note = 2'-O-Methyl-uridine
  modified_base 91: mod_base = OTHER; note = 2'-O-Methyl-cytidine
  modified_base 92: mod_base = OTHER; note = 2'-O-Methyl-guanosine
  modified_base 93: mod_base = OTHER; note = 2'-O-Methyl-guanosine
  modified_base 94: mod_base = OTHER; note = 2'-O-Methyl-uridine
  modified_base 95: mod_base = OTHER; note = 2'-O-Methyl-guanosine
  modified_base 96: mod_base = OTHER; note = 2'-O-Methyl-cytidine
  modified_base 97: mod_base = OTHER; note = 2'-O-Methyl-uridine phosphorothioate
  modified_base 98: mod_base = OTHER; note = 2'-O-Methyl-uridine phosphorothioate
  modified_base 99: mod_base = OTHER; note = 2'-O-Methyl-uridine phosphorothioate
  modified_base 100: mod_base = OTHER; note = 2'-O-Methyl-uridine
  misc_feature 1..33: note = RNA
  misc_feature 34: note = DNA
  misc_feature 35..56: note = RNA
  misc_feature 57: note = DNA
  misc_feature 58..100: note = RNA

SEQ ID NO: 1999 - DNA, 100 bp, synthetic construct; identical to SEQ ID NO: 1946
  source 1..100: mol_type = other DNA; note = Description of Artificial Sequence: Synthetic oligonucleotide; note = Description of Combined DNA/RNA Molecule: Synthetic oligonucleotide
  modified_base 1: mod_base = OTHER; note = 2'-O-Methyl-cytidine phosphorothioate
  modified_base 2: mod_base = OTHER; note = 2'-O-Methyl-adenosine phosphorothioate
  modified_base 3: mod_base = OTHER; note = 2'-O-Methyl-guanosine
  modified_base 21: mod_base = OTHER; note = 2'-O-Methyl-guanosine
  modified_base 28: mod_base = OTHER; note = 2'-O-Methyl-adenosine
  modified_base 29: mod_base = OTHER; note = 2'-O-Methyl-guanosine
  modified_base 30: mod_base = OTHER; note = 2'-O-Methyl-cytidine
  modified_base 31: mod_base = OTHER; note = 2'-O-Methyl-uridine
  modified_base 32: mod_base = OTHER; note = 2'-O-Methyl-adenosine
  modified_base 33: mod_base = OTHER; note = 2'-O-Methyl-guanosine
  modified_base 34: mod_base = OTHER; note = 2'-O-Methyl-adenosine
  modified_base 35: mod_base = OTHER; note = 2'-O-Methyl-adenosine
  modified_base 36: mod_base = OTHER; note = 2'-O-Methyl-adenosine
  modified_base 37: mod_base = OTHER; note = 2'-O-Methyl-uridine
  modified_base 38: mod_base = OTHER; note = 2'-O-Methyl-adenosine
  modified_base 39: mod_base = OTHER; note = 2'-O-Methyl-guanosine
  modified_base 40: mod_base = OTHER; note = 2'-O-Methyl-cytidine
  modified_base 41: mod_base = OTHER; note = 2'-O-Methyl-adenosine
  modified_base 42: mod_base = OTHER; note = 2'-O-Methyl-adenosine
  modified_base 46: mod_base = OTHER; note = 2'-O-Methyl-adenosine
  modified_base 48: mod_base = OTHER; note = 2'-O-Methyl-adenosine
  modified_base 50: mod_base = OTHER; note = 2'-O-Methyl-uridine
  modified_base 52: mod_base = OTHER; note = 2'-O-Methyl-adenosine
  modified_base 53: mod_base = OTHER; note = 2'-O-Methyl-guanosine
  modified_base 54: mod_base = OTHER; note = 2'-O-Methyl-guanosine
  modified_base 55: mod_base = OTHER; note = 2'-O-Methyl-cytidine
  modified_base 56: mod_base = OTHER; note = 2'-O-Methyl-uridine
  modified_base 57: mod_base = OTHER; note = Nebularine - 2'-deoxynebularine
  modified_base 60: mod_base = OTHER; note = 2'-O-Methyl-cytidine
  modified_base 61: mod_base = OTHER; note = 2'-O-Methyl-cytidine
  modified_base 66: mod_base = OTHER; note = 2'-O-Methyl-uridine
  modified_base 67: mod_base = OTHER; note = 2'-O-Methyl-cytidine
  modified_base 70: mod_base = OTHER; note = 2'-O-Methyl-cytidine
  modified_base 71: mod_base = OTHER; note = 2'-O-Methyl-uridine
  modified_base 72: mod_base = OTHER; note = 2'-O-Methyl-uridine
  modified_base 73: mod_base = OTHER; note = 2'-O-Methyl-guanosine
  modified_base 74: mod_base = OTHER; note = 2'-O-Methyl-adenosine
  modified_base 75: mod_base = OTHER; note = 2'-O-Methyl-adenosine
  modified_base 76: mod_base = OTHER; note = 2'-O-Methyl-adenosine
  modified_base 77: mod_base = OTHER; note = 2'-O-Methyl-adenosine
  modified_base 78: mod_base = OTHER; note = 2'-O-Methyl-adenosine
  modified_base 79: mod_base = OTHER; note = 2'-O-Methyl-guanosine
  modified_base 80: mod_base = OTHER; note = 2'-O-Methyl-uridine
  modified_base 81: mod_base = OTHER; note = 2'-O-Methyl-guanosine
  modified_base 83: mod_base = OTHER; note = 2'-O-Methyl-cytidine
  modified_base 84: mod_base = OTHER; note = 2'-O-Methyl-adenosine
  modified_base 85: mod_base = OTHER; note = 2'-O-Methyl-cytidine
  modified_base 86: mod_base = OTHER; note = 2'-O-Methyl-cytidine
  modified_base 87: mod_base = OTHER; note = 2'-O-Methyl-guanosine
  modified_base 88: mod_base = OTHER; note = 2'-O-Methyl-adenosine
  modified_base 89: mod_base = OTHER; note = 2'-O-Methyl-guanosine
  modified_base 90: mod_base = OTHER; note = 2'-O-Methyl-uridine
  modified_base 91: mod_base = OTHER; note = 2'-O-Methyl-cytidine
  modified_base 92: mod_base = OTHER; note = 2'-O-Methyl-guanosine
  modified_base 93: mod_base = OTHER; note = 2'-O-Methyl-guanosine
  modified_base 94: mod_base = OTHER; note = 2'-O-Methyl-uridine
  modified_base 95: mod_base = OTHER; note = 2'-O-Methyl-guanosine
  modified_base 96: mod_base = OTHER; note = 2'-O-Methyl-cytidine
  modified_base 97: mod_base = OTHER; note = 2'-O-Methyl-uridine phosphorothioate
  modified_base 98: mod_base = OTHER; note = 2'-O-Methyl-uridine phosphorothioate
  modified_base 99: mod_base = OTHER; note = 2'-O-Methyl-uridine phosphorothioate
  modified_base 100: mod_base = OTHER; note = 2'-O-Methyl-uridine
  misc_feature 1..56: note = RNA
  misc_feature 57: note = DNA
  misc_feature 58..100: note = RNA

SEQ ID NO: 2000 - DNA, 100 bp, synthetic construct; identical to SEQ ID NO: 1947
  source 1..100: mol_type = other DNA; note = Description of Artificial Sequence: Synthetic oligonucleotide; note = Description of Combined DNA/RNA Molecule: Synthetic oligonucleotide
  modified_base 1: mod_base = OTHER; note = 2'-O-Methyl-cytidine phosphorothioate
  modified_base 2: mod_base = OTHER; note = 2'-O-Methyl-adenosine phosphorothioate
  modified_base 3: mod_base = OTHER; note = 2'-O-Methyl-guanosine
  modified_base 21: mod_base = OTHER; note = 2'-O-Methyl-guanosine
  modified_base 28: mod_base = OTHER; note = 2'-O-Methyl-adenosine
  modified_base 29: mod_base = OTHER; note = 2'-O-Methyl-guanosine
  modified_base 30: mod_base = OTHER; note = 2'-O-Methyl-cytidine
  modified_base 31: mod_base = OTHER; note = 2'-O-Methyl-uridine
  modified_base 32: mod_base = OTHER; note = 2'-O-Methyl-adenosine
  modified_base 33: mod_base = OTHER; note = 2'-O-Methyl-guanosine
  modified_base 34: mod_base = OTHER; note = 2'-O-Methyl-adenosine
  modified_base 35: mod_base = OTHER; note = 2'-O-Methyl-adenosine
  modified_base 36: mod_base = OTHER; note = 2'-O-Methyl-adenosine
  modified_base 37: mod_base = OTHER; note = 2'-O-Methyl-uridine
  modified_base 38: mod_base = OTHER; note = 2'-O-Methyl-adenosine
  modified_base 39: mod_base = OTHER; note = 2'-O-Methyl-guanosine
  modified_base 40: mod_base = OTHER; note = 2'-O-Methyl-cytidine
  modified_base 41: mod_base = OTHER; note = 2'-O-Methyl-adenosine
  modified_base 42: mod_base = OTHER; note = 2'-O-Methyl-adenosine
  modified_base 46: mod_base = OTHER; note = 2'-O-Methyl-adenosine
  modified_base 48: mod_base = OTHER; note = 2'-O-Methyl-adenosine
  modified_base 50: mod_base = OTHER; note = 2'-O-Methyl-uridine
  modified_base 52: mod_base = OTHER; note = 2'-O-Methyl-adenosine
  modified_base 53: mod_base = OTHER; note = 2'-O-Methyl-guanosine
  modified_base 54: mod_base = OTHER; note = 2'-O-Methyl-guanosine
  modified_base 55: mod_base = OTHER; note = 2'-O-Methyl-cytidine
  modified_base 56: mod_base = OTHER; note = 2'-O-Methyl-uridine
  modified_base 57: mod_base = OTHER; note = 2'-O-Methyl-adenosine
  modified_base 60: mod_base = OTHER; note = 2'-O-Methyl-cytidine
  modified_base 61: mod_base = OTHER; note = 2'-O-Methyl-cytidine
  modified_base 65: mod_base = OTHER; note = Nebularine - 2'-deoxynebularine
  modified_base 66: mod_base = OTHER; note = 2'-O-Methyl-uridine
  modified_base 67: mod_base = OTHER; note = 2'-O-Methyl-cytidine
  modified_base 70: mod_base = OTHER; note = 2'-O-Methyl-cytidine
  modified_base 71: mod_base = OTHER; note = 2'-O-Methyl-uridine
  modified_base 72: mod_base = OTHER; note = 2'-O-Methyl-uridine
  modified_base 73: mod_base = OTHER; note = 2'-O-Methyl-guanosine
  modified_base 74: mod_base = OTHER; note = 2'-O-Methyl-adenosine
  modified_base 75: mod_base = OTHER; note = 2'-O-Methyl-adenosine
  modified_base 76: mod_base = OTHER; note = 2'-O-Methyl-adenosine
  modified_base 77: mod_base = OTHER; note = 2'-O-Methyl-adenosine
  modified_base 78: mod_base = OTHER; note = 2'-O-Methyl-adenosine
  modified_base 79: mod_base = OTHER; note = 2'-O-Methyl-guanosine
  modified_base 80: mod_base = OTHER; note = 2'-O-Methyl-uridine
  modified_base 81: mod_base = OTHER; note = 2'-O-Methyl-guanosine
  modified_base 83: mod_base = OTHER; note = 2'-O-Methyl-cytidine
  modified_base 84: mod_base = OTHER; note = 2'-O-Methyl-adenosine
  modified_base 85: mod_base = OTHER; note = 2'-O-Methyl-cytidine
  modified_base 86: mod_base = OTHER; note = 2'-O-Methyl-cytidine
  modified_base 87: mod_base = OTHER; note = 2'-O-Methyl-guanosine
  modified_base 88: mod_base = OTHER; note = 2'-O-Methyl-adenosine
  modified_base 89: mod_base = OTHER; note = 2'-O-Methyl-guanosine
  modified_base 90: mod_base = OTHER; note = 2'-O-Methyl-uridine
  modified_base 91: mod_base = OTHER; note = 2'-O-Methyl-cytidine
  modified_base 92: mod_base = OTHER; note = 2'-O-Methyl-guanosine
  modified_base 93: mod_base = OTHER; note = 2'-O-Methyl-guanosine
  modified_base 94: mod_base = OTHER; note = 2'-O-Methyl-uridine
  modified_base 95: mod_base = OTHER; note = 2'-O-Methyl-guanosine
  modified_base 96: mod_base = OTHER; note = 2'-O-Methyl-cytidine
  modified_base 97: mod_base = OTHER; note = 2'-O-Methyl-uridine phosphorothioate
  modified_base 98: mod_base = OTHER; note = 2'-O-Methyl-uridine phosphorothioate
  modified_base 99: mod_base = OTHER; note = 2'-O-Methyl-uridine phosphorothioate
  modified_base 100: mod_base = OTHER; note = 2'-O-Methyl-uridine
  misc_feature 1..64: note = RNA
  misc_feature 65: note = DNA
  misc_feature 66..100: note = RNA

SEQ ID NO: 2001 - DNA, 100 bp, synthetic construct; identical to SEQ ID NO: 1948
  source 1..100: mol_type = other DNA; note = Description of Artificial Sequence: Synthetic oligonucleotide; note = Description of Combined DNA/RNA Molecule: Synthetic oligonucleotide
  modified_base 1: mod_base = OTHER; note = 2'-O-Methyl-cytidine phosphorothioate
  modified_base 2: mod_base = OTHER; note = 2'-O-Methyl-adenosine phosphorothioate
  modified_base 3: mod_base = OTHER; note = 2'-O-Methyl-guanosine
  modified_base 21: mod_base = OTHER; note = 2'-O-Methyl-guanosine
  modified_base 28: mod_base = OTHER; note = 2'-O-Methyl-adenosine
  modified_base 29: mod_base = OTHER; note = 2'-O-Methyl-guanosine
  modified_base 30: mod_base = OTHER; note = 2'-O-Methyl-cytidine
  modified_base 31: mod_base = OTHER; note = 2'-O-Methyl-uridine
  modified_base 32: mod_base = OTHER; note = 2'-O-Methyl-adenosine
  modified_base 33: mod_base = OTHER; note = 2'-O-Methyl-guanosine
  modified_base 34: mod_base = OTHER; note = Nebularine - 2'-deoxynebularine
  modified_base 35: mod_base = OTHER; note = 2'-O-Methyl-adenosine
  modified_base 36: mod_base = OTHER; note = 2'-O-Methyl-adenosine
  modified_base 37: mod_base = OTHER; note = 2'-O-Methyl-uridine
  modified_base 38: mod_base = OTHER; note = 2'-O-Methyl-adenosine
  modified_base 39: mod_base = OTHER; note = 2'-O-Methyl-guanosine
  modified_base 40: mod_base = OTHER; note = 2'-O-Methyl-cytidine
  modified_base 41: mod_base = OTHER; note = 2'-O-Methyl-adenosine
  modified_base 42: mod_base = OTHER; note = 2'-O-Methyl-adenosine
  modified_base 46: mod_base = OTHER; note = 2'-O-Methyl-adenosine
  modified_base 48: mod_base = OTHER; note = 2'-O-Methyl-adenosine
  modified_base 50: mod_base = OTHER; note = 2'-O-Methyl-uridine
  modified_base 52: mod_base = OTHER; note = 2'-O-Methyl-adenosine
  modified_base 53: mod_base = OTHER; note = 2'-O-Methyl-guanosine
  modified_base 54: mod_base = OTHER; note = 2'-O-Methyl-guanosine
  modified_base 55: mod_base = OTHER; note = 2'-O-Methyl-cytidine
  modified_base 56: mod_base = OTHER; note = 2'-O-Methyl-uridine
  modified_base 57: mod_base = OTHER; note = Nebularine - 2'-deoxynebularine
  modified_base 60: mod_base = OTHER; note = 2'-O-Methyl-cytidine
  modified_base 61: mod_base = OTHER; note = 2'-O-Methyl-cytidine
  modified_base 65: mod_base = OTHER; note = Nebularine - 2'-deoxynebularine
  modified_base 66: mod_base = OTHER; note = 2'-O-Methyl-uridine
  modified_base 67: mod_base = OTHER; note = 2'-O-Methyl-cytidine
  modified_base 70: mod_base = OTHER; note = 2'-O-Methyl-cytidine
  modified_base 71: mod_base = OTHER; note = 2'-O-Methyl-uridine
  modified_base 72: mod_base = OTHER; note = 2'-O-Methyl-uridine
  modified_base 73: mod_base = OTHER; note = 2'-O-Methyl-guanosine
  modified_base 74: mod_base = OTHER; note = 2'-O-Methyl-adenosine
  modified_base 75: mod_base = OTHER; note = 2'-O-Methyl-adenosine
  modified_base 76: mod_base = OTHER; note = 2'-O-Methyl-adenosine
  modified_base 77: mod_base = OTHER; note = 2'-O-Methyl-adenosine
  modified_base 78: mod_base = OTHER; note = 2'-O-Methyl-adenosine
  modified_base 79: mod_base = OTHER; note = 2'-O-Methyl-guanosine
  modified_base 80: mod_base = OTHER; note = 2'-O-Methyl-uridine
  modified_base 81: mod_base = OTHER; note = 2'-O-Methyl-guanosine
  modified_base 83: mod_base = OTHER; note = 2'-O-Methyl-cytidine
  modified_base 84: mod_base = OTHER; note = 2'-O-Methyl-adenosine
  modified_base 85: mod_base = OTHER; note = 2'-O-Methyl-cytidine
  modified_base 86: mod_base = OTHER; note = 2'-O-Methyl-cytidine
  modified_base 87: mod_base = OTHER; note = 2'-O-Methyl-guanosine
  modified_base 88: mod_base = OTHER; note = 2'-O-Methyl-adenosine
  modified_base 89: mod_base = OTHER; note = 2'-O-Methyl-guanosine
  modified_base 90: mod_base = OTHER; note = 2'-O-Methyl-uridine
  modified_base 91: mod_base = OTHER; note = 2'-O-Methyl-cytidine
  modified_base 92: mod_base = OTHER; note = 2'-O-Methyl-guanosine
  modified_base 93: mod_base = OTHER; note = 2'-O-Methyl-guanosine
  modified_base 94: mod_base = OTHER; note = 2'-O-Methyl-uridine
  modified_base 95: mod_base = OTHER; note = 2'-O-Methyl-guanosine
  modified_base 96: mod_base = OTHER; note = 2'-O-Methyl-cytidine
  modified_base 97: mod_base = OTHER; note = 2'-O-Methyl-uridine phosphorothioate
  modified_base 98: mod_base = OTHER; note = 2'-O-Methyl-uridine phosphorothioate
  modified_base 99: mod_base = OTHER; note = 2'-O-Methyl-uridine phosphorothioate
  modified_base 100: mod_base = OTHER; note = 2'-O-Methyl-uridine
  misc_feature 1..33: note = RNA
  misc_feature 34: note = DNA
  misc_feature 35..56: note = RNA
  misc_feature 57: note = DNA
  misc_feature 58..64: note = RNA
  misc_feature 65: note = DNA
  misc_feature 66..100: note = RNA

SEQ ID NO: 2002 - DNA, 100 bp, synthetic construct; identical to SEQ ID NO: 1949
  source 1..100: mol_type = other DNA; note = Description of Artificial Sequence: Synthetic oligonucleotide; note = Description of Combined DNA/RNA Molecule: Synthetic oligonucleotide
  modified_base 1: mod_base = OTHER; note = 2'-O-Methyl-cytidine phosphorothioate
  modified_base 2: mod_base = OTHER; note = 2'-O-Methyl-adenosine phosphorothioate
  modified_base 3: mod_base = OTHER; note = 2'-O-Methyl-guanosine
  modified_base 21: mod_base = OTHER; note = 2'-O-Methyl-guanosine
  modified_base 28: mod_base = OTHER; note = Nebularine - 2'-deoxynebularine
  modified_base 29: mod_base = OTHER; note = 2'-O-Methyl-guanosine
  modified_base 30: mod_base = OTHER; note = 2'-O-Methyl-cytidine
  modified_base 31: mod_base = OTHER; note = 2'-O-Methyl-uridine
  modified_base 32: mod_base = OTHER; note = 2'-O-Methyl-adenosine
  modified_base 33: mod_base = OTHER; note = 2'-O-Methyl-guanosine
  modified_base 34: mod_base = OTHER; note = Nebularine - 2'-deoxynebularine
  modified_base 35: mod_base = OTHER; note = 2'-O-Methyl-adenosine
  modified_base 36: mod_base = OTHER; note = 2'-O-Methyl-adenosine
  modified_base 37: mod_base = OTHER; note = 2'-O-Methyl-uridine
  modified_base 38: mod_base = OTHER; note = 2'-O-Methyl-adenosine
  modified_base 39: mod_base = OTHER; note = 2'-O-Methyl-guanosine
  modified_base 40: mod_base = OTHER; note = 2'-O-Methyl-cytidine
  modified_base 41: mod_base = OTHER; note = 2'-O-Methyl-adenosine
  modified_base 42: mod_base = OTHER; note = Nebularine - 2'-deoxynebularine
  modified_base 46: mod_base = OTHER; note = 2'-O-Methyl-adenosine
  modified_base 48: mod_base = OTHER; note = 2'-O-Methyl-adenosine
  modified_base 50: mod_base = OTHER; note = 2'-O-Methyl-uridine
  modified_base 52: mod_base = OTHER; note = 2'-O-Methyl-adenosine
  modified_base 53: mod_base = OTHER; note = 2'-O-Methyl-guanosine
  modified_base 54: mod_base = OTHER; note = 2'-O-Methyl-guanosine
  modified_base 55: mod_base = OTHER; note = 2'-O-Methyl-cytidine
  modified_base 56: mod_base = OTHER; note = 2'-O-Methyl-uridine
  modified_base 57: mod_base = OTHER; note = Nebularine - 2'-deoxynebularine
  modified_base 60: mod_base = OTHER; note = 2'-O-Methyl-cytidine
  modified_base 61: mod_base = OTHER; note = 2'-O-Methyl-cytidine
  modified_base 65: mod_base = OTHER; note = Nebularine - 2'-deoxynebularine
  modified_base 66: mod_base = OTHER; note = 2'-O-Methyl-uridine
  modified_base 67: mod_base = OTHER; note = 2'-O-Methyl-cytidine
  modified_base 70: mod_base = OTHER; note = 2'-O-Methyl-cytidine
  modified_base 71: mod_base = OTHER; note = 2'-O-Methyl-uridine
  modified_base 72: mod_base = OTHER; note = 2'-O-Methyl-uridine
  modified_base 73: mod_base = OTHER; note = 2'-O-Methyl-guanosine
  modified_base 74: mod_base = OTHER; note = 2'-O-Methyl-adenosine
  modified_base 75: mod_base = OTHER; note = 2'-O-Methyl-adenosine
  modified_base 76: mod_base = OTHER; note = 2'-O-Methyl-adenosine
  modified_base 77: mod_base = OTHER; note = 2'-O-Methyl-adenosine
  modified_base 78: mod_base = OTHER; note = 2'-O-Methyl-adenosine
  modified_base 79: mod_base = OTHER; note = 2'-O-Methyl-guanosine
  modified_base 80: mod_base = OTHER; note = 2'-O-Methyl-uridine
  modified_base 81: mod_base = OTHER; note = 2'-O-Methyl-guanosine
  modified_base 83: mod_base = OTHER; note = 2'-O-Methyl-cytidine
  modified_base 84: mod_base = OTHER; note = 2'-O-Methyl-adenosine
  modified_base 85: mod_base = OTHER; note = 2'-O-Methyl-cytidine
  modified_base 86: mod_base = OTHER; note = 2'-O-Methyl-cytidine
  modified_base 87: mod_base = OTHER; note = 2'-O-Methyl-guanosine
  modified_base 88: mod_base = OTHER; note = 2'-O-Methyl-adenosine
  modified_base 89: mod_base = OTHER; note = 2'-O-Methyl-guanosine
  modified_base 90: mod_base = OTHER; note = 2'-O-Methyl-uridine
  modified_base 91: mod_base = OTHER; note = 2'-O-Methyl-cytidine
  modified_base 92: mod_base = OTHER; note = 2'-O-Methyl-guanosine
  modified_base 93: mod_base = OTHER; note = 2'-O-Methyl-guanosine
  modified_base 94: mod_base = OTHER; note = 2'-O-Methyl-uridine
  modified_base 95: mod_base = OTHER; note = 2'-O-Methyl-guanosine
  modified_base 96: mod_base = OTHER; note = 2'-O-Methyl-cytidine
  modified_base 97: mod_base = OTHER; note = 2'-O-Methyl-uridine phosphorothioate
  modified_base 98: mod_base = OTHER; note = 2'-O-Methyl-uridine phosphorothioate
  modified_base 99: mod_base = OTHER; note = 2'-O-Methyl-uridine phosphorothioate
  modified_base 100: mod_base = OTHER; note = 2'-O-Methyl-uridine
  misc_feature 1..27: note = RNA
  misc_feature 28: note = DNA
  misc_feature 29..33: note = RNA
  misc_feature 34: note = DNA
  misc_feature 35..41: note = RNA
  misc_feature 42: note = DNA
  misc_feature 43..56: note = RNA
  misc_feature 57: note = DNA
  misc_feature 58..64: note = RNA
  misc_feature 65: note = DNA
  misc_feature 66..100: note = RNA

SEQ ID NO: 2003 - RNA, 100 nt, synthetic construct; identical to SEQ ID NO: 1896
  source 1..100: mol_type = other RNA; note = Description of Artificial Sequence: Synthetic polynucleotide
  modified_base 1: mod_base = OTHER; note = 2'-O-Methyl-cytidine phosphorothioate
  modified_base 2: mod_base = OTHER; note = 2'-O-Methyl-adenosine phosphorothioate
  modified_base 3: mod_base = OTHER; note = 2'-O-Methyl-guanosine phosphorothioate
  modified_base 9: mod_base = OTHER; note = Nebularine - ribonebularine
  modified_base 14: mod_base = OTHER; note = Nebularine - ribonebularine
  modified_base 21: mod_base = OTHER; note = 2'-O-Methyl-guanosine
  modified_base 28: mod_base = OTHER; note = 2'-O-Methyl-adenosine
  modified_base 29: mod_base = OTHER; note = 2'-O-Methyl-guanosine
  modified_base 30: mod_base = OTHER; note = 2'-O-Methyl-cytidine
  modified_base 31: mod_base = OTHER; note = 2'-O-Methyl-uridine
  modified_base 32: mod_base = OTHER; note = 2'-O-Methyl-adenosine
  modified_base 33: mod_base = OTHER; note = 2'-O-Methyl-guanosine
  modified_base 34: mod_base = OTHER; note = 2'-O-Methyl-adenosine
  modified_base 35: mod_base = OTHER; note = 2'-O-Methyl-adenosine
  modified_base 36: mod_base = OTHER; note = 2'-O-Methyl-adenosine
  modified_base 37: mod_base = OTHER; note = 2'-O-Methyl-uridine
  modified_base 38: mod_base = OTHER; note = 2'-O-Methyl-adenosine
  modified_base 39: mod_base = OTHER; note = 2'-O-Methyl-guanosine
  modified_base 40: mod_base = OTHER; note = 2'-O-Methyl-cytidine
  modified_base 41: mod_base = OTHER; note = 2'-O-Methyl-adenosine
  modified_base 42: mod_base = OTHER; note = 2'-O-Methyl-adenosine
  modified_base 46: mod_base = OTHER; note = 2'-O-Methyl-adenosine
  modified_base 48: mod_base = OTHER; note = 2'-O-Methyl-adenosine
  modified_base 50: mod_base = OTHER; note = 2'-O-Methyl-uridine
  modified_base 52: mod_base = OTHER; note = 2'-O-Methyl-adenosine
  modified_base 53: mod_base = OTHER; note = 2'-O-Methyl-guanosine
  modified_base 54: mod_base = OTHER; note = 2'-O-Methyl-guanosine
  modified_base 55: mod_base = OTHER; note = 2'-O-Methyl-cytidine
  modified_base 56: mod_base = OTHER; note = 2'-O-Methyl-uridine
  modified_base 57: mod_base = OTHER; note = 2'-O-Methyl-adenosine
  modified_base 60: mod_base = OTHER; note = 2'-O-Methyl-cytidine
  modified_base 61: mod_base = OTHER; note = 2'-O-Methyl-cytidine
  modified_base 66: mod_base = OTHER; note = 2'-O-Methyl-uridine
  modified_base 67: mod_base = OTHER; note = 2'-O-Methyl-cytidine
  modified_base 70: mod_base = OTHER; note = 2'-O-Methyl-cytidine
  modified_base 71: mod_base = OTHER; note = 2'-O-Methyl-uridine
  modified_base 72: mod_base = OTHER; note = 2'-O-Methyl-uridine
  modified_base 73: mod_base = OTHER; note = 2'-O-Methyl-guanosine
  modified_base 74: mod_base = OTHER; note = 2'-O-Methyl-adenosine
  modified_base 75: mod_base = OTHER; note = 2'-O-Methyl-adenosine
  modified_base 76: mod_base = OTHER; note = 2'-O-Methyl-adenosine
  modified_base 77: mod_base = OTHER; note = 2'-O-Methyl-adenosine
  modified_base 78: mod_base = OTHER; note = 2'-O-Methyl-adenosine
  modified_base 79: mod_base = OTHER; note = 2'-O-Methyl-guanosine
  modified_base 80: mod_base = OTHER; note = 2'-O-Methyl-uridine
  modified_base 81: mod_base = OTHER; note = 2'-O-Methyl-guanosine
  modified_base 83: mod_base = OTHER; note = 2'-O-Methyl-cytidine
  modified_base 84: mod_base = OTHER; note = 2'-O-Methyl-adenosine
  modified_base 85: mod_base = OTHER; note = 2'-O-Methyl-cytidine
  modified_base 86: mod_base = OTHER; note = 2'-O-Methyl-cytidine
  modified_base 87: mod_base = OTHER; note = 2'-O-Methyl-guanosine
  modified_base 88: mod_base = OTHER; note = 2'-O-Methyl-adenosine
  modified_base 89: mod_base = OTHER; note = 2'-O-Methyl-guanosine
  modified_base 90: mod_base = OTHER; note = 2'-O-Methyl-uridine
  modified_base 91: mod_base = OTHER; note = 2'-O-Methyl-cytidine
  modified_base 92: mod_base = OTHER; note = 2'-O-Methyl-guanosine
  modified_base 93: mod_base = OTHER; note = 2'-O-Methyl-guanosine
  modified_base 94: mod_base = OTHER; note = 2'-O-Methyl-uridine
  modified_base 95: mod_base = OTHER; note = 2'-O-Methyl-guanosine
  modified_base 96: mod_base = OTHER; note = 2'-O-Methyl-cytidine
  modified_base 97: mod_base = OTHER; note = 2'-O-Methyl-uridine
  modified_base 98: mod_base = OTHER; note = 2'-O-Methyl-uridine phosphorothioate
  modified_base 99: mod_base = OTHER; note = 2'-O-Methyl-uridine phosphorothioate
  modified_base 100: mod_base = OTHER; note = 2'-O-Methyl-uridine

SEQ ID NO: 2004 - RNA, 100 nt, synthetic construct; identical to SEQ ID NO: 1897
  source 1..100: mol_type = other RNA; note = Description of Artificial Sequence: Synthetic polynucleotide
  modified_base 1: mod_base = OTHER; note = 2'-O-Methyl-cytidine phosphorothioate
  modified_base 2: mod_base = OTHER; note = 2'-O-Methyl-adenosine phosphorothioate
  modified_base 3: mod_base = OTHER; note = 2'-O-Methyl-guanosine phosphorothioate
  modified_base 9: mod_base = OTHER; note = Nebularine - ribonebularine
  modified_base 21: mod_base = OTHER; note = 2'-O-Methyl-guanosine
  modified_base 28: mod_base = OTHER; note = 2'-O-Methyl-adenosine
  modified_base 29: mod_base = OTHER; note = 2'-O-Methyl-guanosine
  modified_base 30: mod_base = OTHER; note = 2'-O-Methyl-cytidine
  modified_base 31: mod_base = OTHER; note = 2'-O-Methyl-uridine
  modified_base 32: mod_base = OTHER; note = 2'-O-Methyl-adenosine
  modified_base 33: mod_base = OTHER; note = 2'-O-Methyl-guanosine
  modified_base 34: mod_base = OTHER; note = 2'-O-Methyl-adenosine
  modified_base 35: mod_base = OTHER; note = 2'-O-Methyl-adenosine
  modified_base 36: mod_base = OTHER; note = 2'-O-Methyl-adenosine
  modified_base 37: mod_base = OTHER; note = 2'-O-Methyl-uridine
  modified_base 38: mod_base = OTHER; note = 2'-O-Methyl-adenosine
  modified_base 39: mod_base = OTHER; note = 2'-O-Methyl-guanosine
  modified_base 40: mod_base = OTHER; note = 2'-O-Methyl-cytidine
  modified_base 41: mod_base = OTHER; note = 2'-O-Methyl-adenosine
  modified_base 42: mod_base = OTHER; note = 2'-O-Methyl-adenosine
  modified_base 46: mod_base = OTHER; note = 2'-O-Methyl-adenosine
  modified_base 48: mod_base = OTHER; note = 2'-O-Methyl-adenosine
  modified_base 50: mod_base = OTHER; note = 2'-O-Methyl-uridine
  modified_base 52: mod_base = OTHER; note = 2'-O-Methyl-adenosine
  modified_base 53: mod_base = OTHER; note = 2'-O-Methyl-guanosine
  modified_base 54: mod_base = OTHER; note = 2'-O-Methyl-guanosine
  modified_base 55: mod_base = OTHER; note = 2'-O-Methyl-cytidine
  modified_base 56: mod_base = OTHER; note = 2'-O-Methyl-uridine
  modified_base 57: mod_base = OTHER; note = 2'-O-Methyl-adenosine
  modified_base 60: mod_base = OTHER; note = 2'-O-Methyl-cytidine
  modified_base 61: mod_base = OTHER; note = 2'-O-Methyl-cytidine
  modified_base 66: mod_base = OTHER; note = 2'-O-Methyl-uridine
  modified_base 67: mod_base = OTHER; note = 2'-O-Methyl-cytidine
  modified_base 70: mod_base = OTHER; note = 2'-O-Methyl-cytidine
  modified_base 71: mod_base = OTHER; note = 2'-O-Methyl-uridine
  modified_base 72: mod_base = OTHER; note = 2'-O-Methyl-uridine
  modified_base 73: mod_base = OTHER; note = 2'-O-Methyl-guanosine
  modified_base 74: mod_base = OTHER; note = 2'-O-Methyl-adenosine
  modified_base 75: mod_base = OTHER; note = 2'-O-Methyl-adenosine
  modified_base 76: mod_base = OTHER; note = 2'-O-Methyl-adenosine
  modified_base 77: mod_base = OTHER; note = 2'-O-Methyl-adenosine
  modified_base 78: mod_base = OTHER; note = 2'-O-Methyl-adenosine
  modified_base 79: mod_base = OTHER; note = 2'-O-Methyl-guanosine
  modified_base 80: mod_base = OTHER; note = 2'-O-Methyl-uridine
  modified_base 81: mod_base = OTHER; note = 2'-O-Methyl-guanosine
  modified_base 83: mod_base = OTHER; note = 2'-O-Methyl-cytidine
  modified_base 84: mod_base = OTHER; note = 2'-O-Methyl-adenosine
  modified_base 85: mod_base = OTHER; note = 2'-O-Methyl-cytidine
  modified_base 86: mod_base = OTHER; note = 2'-O-Methyl-cytidine
  modified_base 87: mod_base = OTHER; note = 2'-O-Methyl-guanosine
  modified_base 88: mod_base = OTHER; note = 2'-O-Methyl-adenosine
  modified_base 89: mod_base = OTHER; note = 2'-O-Methyl-guanosine
  modified_base 90: mod_base = OTHER; note = 2'-O-Methyl-uridine
  modified_base 91: mod_base = OTHER; note = 2'-O-Methyl-cytidine
  modified_base 92: mod_base = OTHER; note = 2'-O-Methyl-guanosine
  modified_base 93: mod_base = OTHER; note = 2'-O-Methyl-guanosine
  modified_base 94: mod_base = OTHER; note = 2'-O-Methyl-uridine
  modified_base 95: mod_base = OTHER; note = 2'-O-Methyl-guanosine
  modified_base 96: mod_base = OTHER; note = 2'-O-Methyl-cytidine
  modified_base 97: mod_base = OTHER; note = 2'-O-Methyl-uridine
  modified_base 98: mod_base = OTHER; note = 2'-O-Methyl-uridine phosphorothioate
  modified_base 99: mod_base = OTHER; note = 2'-O-Methyl-uridine phosphorothioate
  modified_base 100: mod_base = OTHER; note = 2'-O-Methyl-uridine

SEQ ID NO: 2005 - RNA, 100 nt, synthetic construct; identical to SEQ ID NO: 1898
  source 1..100: mol_type = other RNA; note = Description of Artificial Sequence: Synthetic polynucleotide
  modified_base 1: mod_base = OTHER; note = 2'-O-Methyl-cytidine phosphorothioate
  modified_base 2: mod_base = OTHER; note = 2'-O-Methyl-adenosine phosphorothioate
  modified_base 3: mod_base = OTHER; note = 2'-O-Methyl-guanosine phosphorothioate
  modified_base 14: mod_base = OTHER; note = Nebularine - ribonebularine
  modified_base 21: mod_base = OTHER; note = 2'-O-Methyl-guanosine
  modified_base 28: mod_base = OTHER; note = 2'-O-Methyl-adenosine
  modified_base 29: mod_base = OTHER; note = 2'-O-Methyl-guanosine
  modified_base 30: mod_base = OTHER; note = 2'-O-Methyl-cytidine
  modified_base 31: mod_base = OTHER; note = 2'-O-Methyl-uridine
  modified_base 32: mod_base = OTHER; note = 2'-O-Methyl-adenosine
  modified_base 33: mod_base = OTHER; note = 2'-O-Methyl-guanosine
  modified_base 34: mod_base = OTHER; note = 2'-O-Methyl-adenosine
  modified_base 35: mod_base = OTHER; note = 2'-O-Methyl-adenosine
  modified_base 36: mod_base = OTHER; note = 2'-O-Methyl-adenosine
  modified_base 37: mod_base = OTHER; note = 2'-O-Methyl-uridine
  modified_base 38: mod_base = OTHER; note = 2'-O-Methyl-adenosine
  modified_base 39: mod_base = OTHER; note = 2'-O-Methyl-guanosine
  modified_base 40: mod_base = OTHER; note = 2'-O-Methyl-cytidine
  modified_base 41: mod_base = OTHER; note = 2'-O-Methyl-adenosine
  modified_base 42: mod_base = OTHER; note = 2'-O-Methyl-adenosine
  modified_base 46: mod_base = OTHER; note = 2'-O-Methyl-adenosine
  modified_base 48: mod_base = OTHER; note = 2'-O-Methyl-adenosine
  modified_base 50: mod_base = OTHER; note = 2'-O-Methyl-uridine
  modified_base 52: mod_base = OTHER; note = 2'-O-Methyl-adenosine
  modified_base 53: mod_base = OTHER; note = 2'-O-Methyl-guanosine
  modified_base 54: mod_base = OTHER; note = 2'-O-Methyl-guanosine
  modified_base 55: mod_base = OTHER; note = 2'-O-Methyl-cytidine
  modified_base 56: mod_base = OTHER; note = 2'-O-Methyl-uridine
  modified_base 57: mod_base = OTHER; note = 2'-O-Methyl-adenosine
  modified_base 60: mod_base = OTHER; note = 2'-O-Methyl-cytidine
  modified_base 61: mod_base = OTHER; note = 2'-O-Methyl-cytidine
  modified_base 66: mod_base = OTHER; note = 2'-O-Methyl-uridine
  modified_base 67: mod_base = OTHER; note = 2'-O-Methyl-cytidine
  modified_base 70: mod_base = OTHER; note = 2'-O-Methyl-cytidine
  modified_base 71: mod_base = OTHER; note = 2'-O-Methyl-uridine
  modified_base 72: mod_base = OTHER; note = 2'-O-Methyl-uridine
  modified_base 73: mod_base = OTHER; note = 2'-O-Methyl-guanosine
  modified_base 74: mod_base = OTHER; note = 2'-O-Methyl-adenosine
  modified_base 75: mod_base = OTHER; note = 2'-O-Methyl-adenosine
  modified_base 76: mod_base = OTHER; note = 2'-O-Methyl-adenosine
  modified_base 77: mod_base = OTHER; note = 2'-O-Methyl-adenosine
  modified_base 78: mod_base = OTHER; note = 2'-O-Methyl-adenosine
  modified_base 79: mod_base = OTHER; note = 2'-O-Methyl-guanosine
  modified_base 80: mod_base = OTHER; note = 2'-O-Methyl-uridine
  modified_base 81: mod_base = OTHER; note = 2'-O-Methyl-guanosine
  modified_base 83: mod_base = OTHER; note = 2'-O-Methyl-cytidine
  modified_base 84: mod_base = OTHER; note = 2'-O-Methyl-adenosine
  modified_base 85: mod_base = OTHER; note = 2'-O-Methyl-cytidine
  modified_base 86: mod_base = OTHER; note = 2'-O-Methyl-cytidine
  modified_base 87: mod_base = OTHER; note = 2'-O-Methyl-guanosine
  modified_base 88: mod_base = OTHER; note = 2'-O-Methyl-adenosine
  modified_base 89: mod_base = OTHER; note = 2'-O-Methyl-guanosine
  modified_base 90: mod_base = OTHER; note = 2'-O-Methyl-uridine
  modified_base 91: mod_base = OTHER; note = 2'-O-Methyl-cytidine
  modified_base 92: mod_base = OTHER; note = 2'-O-Methyl-guanosine
  modified_base 93: mod_base = OTHER; note = 2'-O-Methyl-guanosine
  modified_base 94: mod_base = OTHER; note = 2'-O-Methyl-uridine
  modified_base 95: mod_base = OTHER; note = 2'-O-Methyl-guanosine
  modified_base 96: mod_base = OTHER; note = 2'-O-Methyl-cytidine
  modified_base 97: mod_base = OTHER; note = 2'-O-Methyl-uridine
  modified_base 98: mod_base = OTHER; note = 2'-O-Methyl-uridine phosphorothioate
  modified_base 99: mod_base = OTHER; note = 2'-O-Methyl-uridine phosphorothioate
  modified_base 100: mod_base = OTHER; note = 2'-O-Methyl-uridine

SEQ ID NO: 2006 - RNA, 100 nt, synthetic construct; identical to SEQ ID NO: 1899
  source 1..100: mol_type = other RNA; note = Description of Artificial Sequence: Synthetic polynucleotide
  modified_base 1: mod_base = OTHER; note = 2'-O-Methyl-cytidine phosphorothioate
  modified_base 2: mod_base = OTHER; note = 2'-O-Methyl-adenosine phosphorothioate
  modified_base 3: mod_base = OTHER; note = 2'-O-Methyl-guanosine phosphorothioate
  modified_base 21: mod_base = OTHER; note = 2'-O-Methyl-guanosine
  modified_base 28: mod_base = OTHER; note = 2'-O-Methyl-adenosine
  modified_base 29: mod_base = OTHER; note = 2'-O-Methyl-guanosine
  modified_base 30: mod_base = OTHER; note = 2'-O-Methyl-cytidine
  modified_base 31: mod_base = OTHER; note = 2'-O-Methyl-uridine
  modified_base 32: mod_base = OTHER; note = 2'-O-Methyl-adenosine
  modified_base 33: mod_base = OTHER; note = 2'-O-Methyl-guanosine
  modified_base 34: mod_base = OTHER; note = Nebularine - ribonebularine
  modified_base 35: mod_base = OTHER; note = 2'-O-Methyl-adenosine
  modified_base 36: mod_base = OTHER; note = 2'-O-Methyl-adenosine
  modified_base 37: mod_base = OTHER; note = 2'-O-Methyl-uridine
  modified_base 38: mod_base = OTHER; note = 2'-O-Methyl-adenosine
  modified_base 39: mod_base = OTHER; note = 2'-O-Methyl-guanosine
  modified_base 40: mod_base = OTHER; note = 2'-O-Methyl-cytidine
  modified_base 41: mod_base = OTHER; note = 2'-O-Methyl-adenosine
  modified_base 42: mod_base = OTHER; note = 2'-O-Methyl-adenosine
  modified_base 46: mod_base = OTHER; note = 2'-O-Methyl-adenosine
  modified_base 48: mod_base = OTHER; note = 2'-O-Methyl-adenosine
  modified_base 50: mod_base = OTHER; note = 2'-O-Methyl-uridine
  modified_base 52: mod_base = OTHER; note = 2'-O-Methyl-adenosine
  modified_base 53: mod_base = OTHER; note = 2'-O-Methyl-guanosine
  modified_base 54: mod_base = OTHER; note = 2'-O-Methyl-guanosine
  modified_base 55: mod_base = OTHER; note = 2'-O-Methyl-cytidine
  modified_base 56: mod_base = OTHER; note = 2'-O-Methyl-uridine
  modified_base 57: mod_base = OTHER; note = 2'-O-Methyl-adenosine
  modified_base 60: mod_base = OTHER; note = 2'-O-Methyl-cytidine
  modified_base 61: mod_base = OTHER; note = 2'-O-Methyl-cytidine
  modified_base 66: mod_base = OTHER; note = 2'-O-Methyl-uridine
  modified_base 67: mod_base = OTHER; note = 2'-O-Methyl-cytidine
  modified_base 70: mod_base = OTHER; note = 2'-O-Methyl-cytidine
  modified_base 71: mod_base = OTHER; note = 2'-O-Methyl-uridine
  modified_base 72: mod_base = OTHER; note = 2'-O-Methyl-uridine
  modified_base 73: mod_base = OTHER; note = 2'-O-Methyl-guanosine
  modified_base 74: mod_base = OTHER; note = 2'-O-Methyl-adenosine
  modified_base 75: mod_base = OTHER; note = 2'-O-Methyl-adenosine
  modified_base 76: mod_base = OTHER; note = 2'-O-Methyl-adenosine
  modified_base 77: mod_base = OTHER; note = 2'-O-Methyl-adenosine
  modified_base 78: mod_base = OTHER; note = 2'-O-Methyl-adenosine
  modified_base 79: mod_base = OTHER; note = 2'-O-Methyl-guanosine
  modified_base 80: mod_base = OTHER; note = 2'-O-Methyl-uridine
  modified_base 81: mod_base = OTHER; note = 2'-O-Methyl-guanosine
  modified_base 83: mod_base = OTHER; note = 2'-O-Methyl-cytidine
  modified_base 84: mod_base = OTHER; note = 2'-O-Methyl-adenosine
  modified_base 85: mod_base = OTHER; note = 2'-O-Methyl-cytidine
  modified_base 86: mod_base = OTHER; note = 2'-O-Methyl-cytidine
  modified_base 87: mod_base = OTHER; note = 2'-O-Methyl-guanosine
  modified_base 88: mod_base = OTHER; note = 2'-O-Methyl-adenosine
  modified_base 89: mod_base = OTHER; note = 2'-O-Methyl-guanosine
  modified_base 90: mod_base = OTHER; note = 2'-O-Methyl-uridine
  modified_base 91: mod_base = OTHER; note = 2'-O-Methyl-cytidine
  modified_base 92: mod_base = OTHER; note = 2'-O-Methyl-guanosine
  modified_base 93: mod_base = OTHER; note = 2'-O-Methyl-guanosine
  modified_base 94: mod_base = OTHER; note = 2'-O-Methyl-uridine
  modified_base 95: mod_base = OTHER; note = 2'-O-Methyl-guanosine
  modified_base 96: mod_base = OTHER; note = 2'-O-Methyl-cytidine
  modified_base 97: mod_base = OTHER; note = 2'-O-Methyl-uridine
  modified_base 98: mod_base = OTHER; note = 2'-O-Methyl-uridine phosphorothioate
  modified_base 99: mod_base = OTHER; note = 2'-O-Methyl-uridine phosphorothioate
  modified_base 100: mod_base = OTHER; note = 2'-O-Methyl-uridine

SEQ ID NO: 2007 - RNA, 100 nt, synthetic construct; identical to SEQ ID NO: 1900
  source 1..100: mol_type = other RNA; note = Description of Artificial Sequence: Synthetic polynucleotide
  modified_base 1: mod_base = OTHER; note = 2'-O-Methyl-cytidine phosphorothioate
  modified_base 2: mod_base = OTHER; note = 2'-O-Methyl-adenosine phosphorothioate
  modified_base 3: mod_base = OTHER; note = 2'-O-Methyl-guanosine phosphorothioate
  modified_base 21: mod_base = OTHER; note = 2'-O-Methyl-guanosine
  modified_base 28: mod_base = OTHER; note = 2'-O-Methyl-adenosine
  modified_base 29: mod_base = OTHER; note = 2'-O-Methyl-guanosine
  modified_base 30: mod_base = OTHER; note = 2'-O-Methyl-cytidine
  modified_base 31: mod_base = OTHER; note = 2'-O-Methyl-uridine
  modified_base 32: mod_base = OTHER; note = 2'-O-Methyl-adenosine
  modified_base 33: mod_base = OTHER; note = 2'-O-Methyl-guanosine
  modified_base 34: mod_base = OTHER; note = Nebularine - ribonebularine
  modified_base 35: mod_base = OTHER; note = 2'-O-Methyl-adenosine
  modified_base 36: mod_base = OTHER; note = 2'-O-Methyl-adenosine
  modified_base 37: mod_base = OTHER; note = 2'-O-Methyl-uridine
  modified_base 38: mod_base = OTHER; note = 2'-O-Methyl-adenosine
  modified_base 39: mod_base = OTHER; note = 2'-O-Methyl-guanosine
  modified_base 40: mod_base = OTHER; note = 2'-O-Methyl-cytidine
  modified_base 41: mod_base = OTHER; note = 2'-O-Methyl-adenosine
  modified_base 42: mod_base = OTHER; note = 2'-O-Methyl-adenosine
  modified_base 46: mod_base = OTHER; note = 2'-O-Methyl-adenosine
  modified_base 48: mod_base = OTHER; note = 2'-O-Methyl-adenosine
  modified_base 50: mod_base = OTHER; note = 2'-O-Methyl-uridine
  modified_base 52: mod_base = OTHER; note = 2'-O-Methyl-adenosine
  modified_base 53: mod_base = OTHER; note = 2'-O-Methyl-guanosine
  modified_base 54: mod_base = OTHER; note = 2'-O-Methyl-guanosine
  modified_base 55: mod_base = OTHER; note = 2'-O-Methyl-cytidine
  modified_base 56: mod_base = OTHER; note = 2'-O-Methyl-uridine
  modified_base 57: mod_base = OTHER; note = Nebularine - ribonebularine
  modified_base 60: mod_base = OTHER; note = 2'-O-Methyl-cytidine
  modified_base 61: mod_base = OTHER; note = 2'-O-Methyl-cytidine
  modified_base 66: mod_base = OTHER; note = 2'-O-Methyl-uridine
  modified_base 67: mod_base = OTHER; note = 2'-O-Methyl-cytidine
  modified_base 70: mod_base = OTHER; note = 2'-O-Methyl-cytidine
  modified_base 71: mod_base = OTHER; note = 2'-O-Methyl-uridine
  modified_base 72: mod_base = OTHER; note = 2'-O-Methyl-uridine
  modified_base 73: mod_base = OTHER; note = 2'-O-Methyl-guanosine
  modified_base 74: mod_base = OTHER; note = 2'-O-Methyl-adenosine
  modified_base 75: mod_base = OTHER; note = 2'-O-Methyl-adenosine
  modified_base 76: mod_base = OTHER; note = 2'-O-Methyl-adenosine
  modified_base 77: mod_base = OTHER; note = 2'-O-Methyl-adenosine
  modified_base 78: mod_base = OTHER; note = 2'-O-Methyl-adenosine
  modified_base 79: mod_base = OTHER; note = 2'-O-Methyl-guanosine
  modified_base 80: mod_base = OTHER; note = 2'-O-Methyl-uridine
  modified_base 81: mod_base = OTHER; note = 2'-O-Methyl-guanosine
  modified_base 83: mod_base = OTHER; note = 2'-O-Methyl-cytidine
  modified_base 84: mod_base = OTHER; note = 2'-O-Methyl-adenosine
  modified_base 85: mod_base = OTHER; note = 2'-O-Methyl-cytidine
  modified_base 86: mod_base = OTHER; note = 2'-O-Methyl-cytidine
  modified_base 87: mod_base = OTHER; note = 2'-O-Methyl-guanosine
  modified_base 88: mod_base = OTHER; note = 2'-O-Methyl-adenosine
  modified_base 89: mod_base = OTHER; note = 2'-O-Methyl-guanosine
  modified_base 90: mod_base = OTHER; note = 2'-O-Methyl-uridine
  modified_base 91: mod_base = OTHER; note = 2'-O-Methyl-cytidine
  modified_base 92: mod_base = OTHER; note = 2'-O-Methyl-guanosine
  modified_base 93: mod_base = OTHER; note = 2'-O-Methyl-guanosine
  modified_base 94: mod_base = OTHER; note = 2'-O-Methyl-uridine
  modified_base 95: mod_base = OTHER; note = 2'-O-Methyl-guanosine
  modified_base 96: mod_base = OTHER; note = 2'-O-Methyl-cytidine
  modified_base 97: mod_base = OTHER; note = 2'-O-Methyl-uridine
  modified_base 98: mod_base = OTHER; note = 2'-O-Methyl-uridine phosphorothioate
  modified_base 99: mod_base = OTHER; note = 2'-O-Methyl-uridine phosphorothioate
  modified_base 100: mod_base = OTHER; note = 2'-O-Methyl-uridine

SEQ ID NO: 2008 - RNA, 100 nt, synthetic construct; identical to SEQ ID NO: 1901
  source 1..100: mol_type = other RNA; note = Description of Artificial Sequence: Synthetic polynucleotide
  modified_base 1: mod_base = OTHER; note = 2'-O-Methyl-cytidine phosphorothioate
  modified_base 2: mod_base = OTHER; note = 2'-O-Methyl-adenosine phosphorothioate
  modified_base 3: mod_base = OTHER; note = 2'-O-Methyl-guanosine phosphorothioate
  modified_base 21: mod_base = OTHER; note = 2'-O-Methyl-guanosine
  modified_base 28: mod_base = OTHER; note = 2'-O-Methyl-adenosine
  modified_base 29: mod_base = OTHER; note = 2'-O-Methyl-guanosine
  modified_base 30: mod_base = OTHER; note = 2'-O-Methyl-cytidine
  modified_base 31: mod_base = OTHER; note = 2'-O-Methyl-uridine
  modified_base 32: mod_base = OTHER; note = 2'-O-Methyl-adenosine
  modified_base 33: mod_base = OTHER; note = 2'-O-Methyl-guanosine
  modified_base 34: mod_base = OTHER; note = 2'-O-Methyl-adenosine
  modified_base 35: mod_base = OTHER; note = 2'-O-Methyl-adenosine
  modified_base 36: mod_base = OTHER; note = 2'-O-Methyl-adenosine
  modified_base 37: mod_base = OTHER; note = 2'-O-Methyl-uridine
  modified_base 38: mod_base = OTHER; note = 2'-O-Methyl-adenosine
  modified_base 39: mod_base = OTHER; note = 2'-O-Methyl-guanosine
  modified_base 40: mod_base = OTHER; note = 2'-O-Methyl-cytidine
  modified_base 41: mod_base = OTHER; note = 2'-O-Methyl-adenosine
  modified_base 42: mod_base = OTHER; note = 2'-O-Methyl-adenosine
  modified_base 46: mod_base = OTHER; note = 2'-O-Methyl-adenosine
  modified_base 48: mod_base = OTHER; note = 2'-O-Methyl-adenosine
  modified_base 50: mod_base = OTHER; note = 2'-O-Methyl-uridine
  modified_base 52: mod_base = OTHER; note = 2'-O-Methyl-adenosine
  modified_base 53: mod_base = OTHER; note = 2'-O-Methyl-guanosine
  modified_base 54: mod_base = OTHER; note = 2'-O-Methyl-guanosine
  modified_base 55: mod_base = OTHER; note = 2'-O-Methyl-cytidine
  modified_base 56: mod_base = OTHER; note = 2'-O-Methyl-uridine
  modified_base 57: mod_base = OTHER; note = Nebularine - ribonebularine
  modified_base 60: mod_base = OTHER; note = 2'-O-Methyl-cytidine
  modified_base 61: mod_base = OTHER; note = 2'-O-Methyl-cytidine
  modified_base 66: mod_base = OTHER; note = 2'-O-Methyl-uridine
  modified_base 67: mod_base = OTHER; note = 2'-O-Methyl-cytidine
  modified_base 70: mod_base = OTHER; note = 2'-O-Methyl-cytidine
  modified_base 71: mod_base = OTHER; note = 2'-O-Methyl-uridine
  modified_base 72: mod_base = OTHER; note = 2'-O-Methyl-uridine
  modified_base 73: mod_base = OTHER; note = 2'-O-Methyl-guanosine
  modified_base 74: mod_base = OTHER; note = 2'-O-Methyl-adenosine
  modified_base 75: mod_base = OTHER; note = 2'-O-Methyl-adenosine
  modified_base 76: mod_base = OTHER; note = 2'-O-Methyl-adenosine
  modified_base 77: mod_base = OTHER; note = 2'-O-Methyl-adenosine
  modified_base 78: mod_base = OTHER; note = 2'-O-Methyl-adenosine
  modified_base 79: mod_base = OTHER; note = 2'-O-Methyl-guanosine
  modified_base 80: mod_base = OTHER; note = 2'-O-Methyl-uridine
  modified_base 81: mod_base = OTHER; note = 2'-O-Methyl-guanosine
  modified_base 83: mod_base = OTHER; note = 2'-O-Methyl-cytidine
  modified_base 84: mod_base = OTHER; note = 2'-O-Methyl-adenosine
  modified_base 85: mod_base = OTHER; note = 2'-O-Methyl-cytidine
  modified_base 86: mod_base = OTHER; note = 2'-O-Methyl-cytidine
  modified_base 87: mod_base = OTHER; note = 2'-O-Methyl-guanosine
  modified_base 88: mod_base = OTHER; note = 2'-O-Methyl-adenosine
  modified_base 89: mod_base = OTHER; note = 2'-O-Methyl-guanosine
  modified_base 90: mod_base = OTHER; note = 2'-O-Methyl-uridine
  modified_base 91: mod_base = OTHER; note = 2'-O-Methyl-cytidine
  modified_base 92: mod_base = OTHER; note = 2'-O-Methyl-guanosine
  modified_base 93: mod_base = OTHER; note = 2'-O-Methyl-guanosine
  modified_base 94: mod_base = OTHER; note = 2'-O-Methyl-uridine
  modified_base 95: mod_base = OTHER; note = 2'-O-Methyl-guanosine
  modified_base 96: mod_base = OTHER; note = 2'-O-Methyl-cytidine
  modified_base 97: mod_base = OTHER; note = 2'-O-Methyl-uridine
  modified_base 98: mod_base = OTHER; note = 2'-O-Methyl-uridine phosphorothioate
  modified_base 99: mod_base = OTHER; note = 2'-O-Methyl-uridine phosphorothioate
  modified_base 100: mod_base = OTHER; note = 2'-O-Methyl-uridine

SEQ ID NO: 2009 - RNA, 100 nt, synthetic construct; identical to SEQ ID NO: 1902
  source 1..100: mol_type = other RNA; note = Description of Artificial Sequence: Synthetic polynucleotide
  modified_base 1: mod_base = OTHER; note = 2'-O-Methyl-cytidine phosphorothioate
  modified_base 2: mod_base = OTHER; note = 2'-O-Methyl-adenosine phosphorothioate
  modified_base 3: mod_base = OTHER; note = 2'-O-Methyl-guanosine phosphorothioate
  modified_base 21: mod_base = OTHER; note = 2'-O-Methyl-guanosine
  modified_base 28: mod_base = OTHER; note = 2'-O-Methyl-adenosine
  modified_base 29: mod_base = OTHER; note = 2'-O-Methyl-guanosine
  modified_base 30: mod_base = OTHER; note = 2'-O-Methyl-cytidine
  modified_base 31: mod_base = OTHER; note = 2'-O-Methyl-uridine
  modified_base 32: mod_base = OTHER; note = 2'-O-Methyl-adenosine
  modified_base 33: mod_base = OTHER; note = 2'-O-Methyl-guanosine
  modified_base 34: mod_base = OTHER; note = 2'-O-Methyl-adenosine
  modified_base 35: mod_base = OTHER; note = 2'-O-Methyl-adenosine
  modified_base 36: mod_base = OTHER; note = 2'-O-Methyl-adenosine
  modified_base 37: mod_base = OTHER; note = 2'-O-Methyl-uridine
  modified_base 38: mod_base = OTHER; note = 2'-O-Methyl-adenosine
  modified_base 39: mod_base = OTHER; note = 2'-O-Methyl-guanosine
  modified_base 40: mod_base = OTHER; note = 2'-O-Methyl-cytidine
  modified_base 41: mod_base = OTHER; note = 2'-O-Methyl-adenosine
  modified_base 42: mod_base = OTHER; note = 2'-O-Methyl-adenosine
  modified_base 46: mod_base = OTHER; note = 2'-O-Methyl-adenosine
  modified_base 48: mod_base = OTHER; note = 2'-O-Methyl-adenosine
  modified_base 50: mod_base = OTHER; note = 2'-O-Methyl-uridine
  modified_base 52: mod_base = OTHER; note = 2'-O-Methyl-adenosine
  modified_base 53: mod_base = OTHER; note = 2'-O-Methyl-guanosine
  modified_base 54: mod_base = OTHER; note = 2'-O-Methyl-guanosine
  modified_base 55: mod_base = OTHER; note = 2'-O-Methyl-cytidine
  modified_base 56: mod_base = OTHER; note = 2'-O-Methyl-uridine
  modified_base 57: mod_base = OTHER; note = 2'-O-Methyl-adenosine
  modified_base 60: mod_base = OTHER; note = 2'-O-Methyl-cytidine
  modified_base 61: mod_base = OTHER; note = 2'-O-Methyl-cytidine
  modified_base 65: mod_base = OTHER; note = Nebularine - ribonebularine
  modified_base 66: mod_base = OTHER; note = 2'-O-Methyl-uridine
  modified_base 67: mod_base = OTHER; note = 2'-O-Methyl-cytidine
  modified_base 70: mod_base = OTHER; note = 2'-O-Methyl-cytidine
  modified_base 71: mod_base = OTHER; note = 2'-O-Methyl-uridine
  modified_base 72: mod_base = OTHER; note = 2'-O-Methyl-uridine
  modified_base 73: mod_base = OTHER; note = 2'-O-Methyl-guanosine
  modified_base 74: mod_base = OTHER; note = 2'-O-Methyl-adenosine
  modified_base 75: mod_base = OTHER; note = 2'-O-Methyl-adenosine
  modified_base 76: mod_base = OTHER; note = 2'-O-Methyl-adenosine
  modified_base 77: mod_base = OTHER; note = 2'-O-Methyl-adenosine
  modified_base 78: mod_base = OTHER; note = 2'-O-Methyl-adenosine
  modified_base 79: mod_base = OTHER; note = 2'-O-Methyl-guanosine
  modified_base 80: mod_base = OTHER; note = 2'-O-Methyl-uridine
  modified_base 81: mod_base = OTHER; note = 2'-O-Methyl-guanosine
  modified_base 83: mod_base = OTHER; note = 2'-O-Methyl-cytidine
  modified_base 84: mod_base = OTHER; note = 2'-O-Methyl-adenosine
  modified_base 85: mod_base = OTHER; note = 2'-O-Methyl-cytidine
  modified_base 86: mod_base = OTHER; note = 2'-O-Methyl-cytidine
  modified_base 87: mod_base = OTHER; note = 2'-O-Methyl-guanosine
  modified_base 88: mod_base = OTHER; note = 2'-O-Methyl-adenosine
  modified_base 89: mod_base = OTHER; note = 2'-O-Methyl-guanosine
  modified_base 90: mod_base = OTHER; note = 2'-O-Methyl-uridine
  modified_base 91: mod_base = OTHER; note = 2'-O-Methyl-cytidine
  modified_base 92: mod_base = OTHER; note = 2'-O-Methyl-guanosine
  modified_base 93: mod_base = OTHER; note = 2'-O-Methyl-guanosine
  modified_base 94: mod_base = OTHER; note = 2'-O-Methyl-uridine
  modified_base 95: mod_base = OTHER; note = 2'-O-Methyl-guanosine
  modified_base 96: mod_base = OTHER; note = 2'-O-Methyl-cytidine
  modified_base 97: mod_base = OTHER; note = 2'-O-Methyl-uridine
  modified_base 98: mod_base = OTHER; note = 2'-O-Methyl-uridine phosphorothioate
  modified_base 99: mod_base = OTHER; note = 2'-O-Methyl-uridine phosphorothioate
  modified_base 100: mod_base = OTHER; note = 2'-O-Methyl-uridine

SEQ ID NO: 2010 - RNA, 100 nt, synthetic construct; identical to SEQ ID NO: 1903
  source 1..100: mol_type = other RNA; note = Description of Artificial Sequence: Synthetic polynucleotide
  modified_base 1: mod_base = OTHER; note = 2'-O-Methyl-cytidine phosphorothioate
  modified_base 2: mod_base = OTHER; note = 2'-O-Methyl-adenosine phosphorothioate
  modified_base 3: mod_base = OTHER; note = 2'-O-Methyl-guanosine phosphorothioate
  modified_base 21: mod_base = OTHER; note = 2'-O-Methyl-guanosine
  modified_base 28: mod_base = OTHER; note = 2'-O-Methyl-adenosine
  modified_base 29: mod_base = OTHER; note = 2'-O-Methyl-guanosine
  modified_base 30: mod_base = OTHER; note = 2'-O-Methyl-cytidine
  modified_base 31: mod_base = OTHER; note = 2'-O-Methyl-uridine
  modified_base 32: mod_base = OTHER; note = 2'-O-Methyl-adenosine
  modified_base 33: mod_base = OTHER; note = 2'-O-Methyl-guanosine
  modified_base 34: mod_base = OTHER; note = Nebularine - ribonebularine
  modified_base 35: mod_base = OTHER; note = 2'-O-Methyl-adenosine
  modified_base 36: mod_base = OTHER; note = 2'-O-Methyl-adenosine
  modified_base 37: mod_base = OTHER; note = 2'-O-Methyl-uridine
  modified_base 38: mod_base = OTHER; note = 2'-O-Methyl-adenosine
  modified_base 39: mod_base = OTHER; note = 2'-O-Methyl-guanosine
  modified_base 40: mod_base = OTHER; note = 2'-O-Methyl-cytidine
  modified_base 41: mod_base = OTHER; note = 2'-O-Methyl-adenosine
  modified_base 42: mod_base = OTHER; note = 2'-O-Methyl-adenosine
  modified_base 46: mod_base = OTHER; note = 2'-O-Methyl-adenosine
  modified_base 48: mod_base = OTHER; note = 2'-O-Methyl-adenosine
  modified_base 50: mod_base = OTHER; note = 2'-O-Methyl-uridine
  modified_base 52: mod_base = OTHER; note = 2'-O-Methyl-adenosine
  modified_base 53: mod_base = OTHER; note = 2'-O-Methyl-guanosine
  modified_base 54: mod_base = OTHER; note = 2'-O-Methyl-guanosine
  modified_base 55: mod_base = OTHER; note = 2'-O-Methyl-cytidine
  modified_base 56: mod_base = OTHER; note = 2'-O-Methyl-uridine
  modified_base 57: mod_base = OTHER; note = Nebularine - ribonebularine
  modified_base 60: mod_base = OTHER; note = 2'-O-Methyl-cytidine
  modified_base 61: mod_base = OTHER; note = 2'-O-Methyl-cytidine
  modified_base 65: mod_base = OTHER; note = Nebularine - ribonebularine
  modified_base 66: mod_base = OTHER; note = 2'-O-Methyl-uridine
  modified_base 67: mod_base = OTHER; note = 2'-O-Methyl-cytidine
  modified_base 70: mod_base = OTHER; note = 2'-O-Methyl-cytidine
  modified_base 71: mod_base = OTHER; note = 2'-O-Methyl-uridine
  modified_base 72: mod_base = OTHER; note = 2'-O-Methyl-uridine
  modified_base 73: mod_base = OTHER; note = 2'-O-Methyl-guanosine
  modified_base 74: mod_base = OTHER; note = 2'-O-Methyl-adenosine
  modified_base 75: mod_base = OTHER; note = 2'-O-Methyl-adenosine
  modified_base 76: mod_base = OTHER; note = 2'-O-Methyl-adenosine
  modified_base 77: mod_base = OTHER; note = 2'-O-Methyl-adenosine
  modified_base 78: mod_base = OTHER; note = 2'-O-Methyl-adenosine
  modified_base 79: mod_base = OTHER; note = 2'-O-Methyl-guanosine
  modified_base 80: mod_base = OTHER; note = 2'-O-Methyl-uridine
  modified_base 81: mod_base = OTHER; note = 2'-O-Methyl-guanosine
  modified_base 83: mod_base = OTHER; note = 2'-O-Methyl-cytidine
  modified_base 84: mod_base = OTHER; note = 2'-O-Methyl-adenosine
  modified_base 85: mod_base = OTHER; note = 2'-O-Methyl-cytidine
  modified_base 86: mod_base = OTHER; note = 2'-O-Methyl-cytidine
  modified_base 87: mod_base = OTHER; note = 2'-O-Methyl-guanosine
  modified_base 88: mod_base = OTHER; note = 2'-O-Methyl-adenosine
  modified_base 89: mod_base = OTHER; note = 2'-O-Methyl-guanosine
  modified_base 90: mod_base = OTHER; note = 2'-O-Methyl-uridine
  modified_base 91: mod_base = OTHER; note = 2'-O-Methyl-cytidine
  modified_base 92: mod_base = OTHER; note = 2'-O-Methyl-guanosine
  modified_base 93: mod_base = OTHER; note = 2'-O-Methyl-guanosine
  modified_base 94: mod_base = OTHER; note = 2'-O-Methyl-uridine
  modified_base 95: mod_base = OTHER; note = 2'-O-Methyl-guanosine
  modified_base 96: mod_base = OTHER; note = 2'-O-Methyl-cytidine
  modified_base 97: mod_base = OTHER; note = 2'-O-Methyl-uridine
  modified_base 98: mod_base = OTHER; note = 2'-O-Methyl-uridine phosphorothioate
  modified_base 99: mod_base = OTHER; note = 2'-O-Methyl-uridine phosphorothioate
  modified_base 100: mod_base = OTHER; note = 2'-O-Methyl-uridine

SEQ ID NO: 2011 - RNA, 100 nt, synthetic construct; identical to SEQ ID NO: 1904
  source 1..100: mol_type = other RNA; note = Description of Artificial Sequence: Synthetic polynucleotide
  modified_base 1: mod_base = OTHER; note = 2'-O-Methyl-cytidine phosphorothioate
  modified_base 2: mod_base = OTHER; note = 2'-O-Methyl-adenosine phosphorothioate
  modified_base 3: mod_base = OTHER; note = 2'-O-Methyl-guanosine phosphorothioate
  modified_base 21: mod_base = OTHER; note = 2'-O-Methyl-guanosine
  modified_base 28: mod_base = OTHER; note = Nebularine - ribonebularine
  modified_base 29: mod_base = OTHER; note = 2'-O-Methyl-guanosine
  modified_base 30: mod_base = OTHER; note = 2'-O-Methyl-cytidine
  modified_base 31: mod_base = OTHER; note = 2'-O-Methyl-uridine
  modified_base 32: mod_base = OTHER; note = 2'-O-Methyl-adenosine
  modified_base 33: mod_base = OTHER; note = 2'-O-Methyl-guanosine
  modified_base 34: mod_base = OTHER; note = Nebularine - ribonebularine
  modified_base 35: mod_base = OTHER; note = 2'-O-Methyl-adenosine
  modified_base 36: mod_base = OTHER; note = 2'-O-Methyl-adenosine
  modified_base 37: mod_base = OTHER; note = 2'-O-Methyl-uridine
  modified_base 38: mod_base = OTHER; note = 2'-O-Methyl-adenosine
  modified_base 39: mod_base = OTHER; note = 2'-O-Methyl-guanosine
  modified_base 40: mod_base = OTHER; note = 2'-O-Methyl-cytidine
  modified_base 41: mod_base = OTHER; note = 2'-O-Methyl-adenosine
  modified_base 42: mod_base = OTHER; note = Nebularine - ribonebularine
  modified_base 46: mod_base = OTHER; note = 2'-O-Methyl-adenosine
  modified_base 48: mod_base = OTHER; note = 2'-O-Methyl-adenosine
  modified_base 50: mod_base = OTHER; note = 2'-O-Methyl-uridine
  modified_base 52: mod_base = OTHER; note = 2'-O-Methyl-adenosine
  modified_base 53: mod_base = OTHER; note = 2'-O-Methyl-guanosine
  modified_base 54: mod_base = OTHER; note = 2'-O-Methyl-guanosine
  modified_base 55: mod_base = OTHER; note = 2'-O-Methyl-cytidine
  modified_base 56: mod_base = OTHER; note = 2'-O-Methyl-uridine
  modified_base 57: mod_base = OTHER; note = Nebularine - ribonebularine
  modified_base 60: mod_base = OTHER; note = 2'-O-Methyl-cytidine
  modified_base 61: mod_base = OTHER; note = 2'-O-Methyl-cytidine
  modified_base 65: mod_base = OTHER; note = Nebularine - ribonebularine
  modified_base 66: mod_base = OTHER; note = 2'-O-Methyl-uridine
  modified_base 67: mod_base = OTHER; note = 2'-O-Methyl-cytidine
  modified_base 70: mod_base = OTHER; note = 2'-O-Methyl-cytidine
  modified_base 71: mod_base = OTHER; note = 2'-O-Methyl-uridine
  modified_base 72: mod_base = OTHER; note = 2'-O-Methyl-uridine
  modified_base 73: mod_base = OTHER; note = 2'-O-Methyl-guanosine
  modified_base 74: mod_base = OTHER; note = 2'-O-Methyl-adenosine
  modified_base 75: mod_base = OTHER; note = 2'-O-Methyl-adenosine
  modified_base 76: mod_base = OTHER; note = 2'-O-Methyl-adenosine
  modified_base 77: mod_base = OTHER; note = 2'-O-Methyl-adenosine
  modified_base 78: mod_base = OTHER; note = 2'-O-Methyl-adenosine
  modified_base 79: mod_base = OTHER; note = 2'-O-Methyl-guanosine
  modified_base 80: mod_base = OTHER; note = 2'-O-Methyl-uridine
  modified_base 81: mod_base = OTHER; note = 2'-O-Methyl-guanosine
  modified_base 83: mod_base = OTHER; note = 2'-O-Methyl-cytidine
  modified_base 84: mod_base = OTHER; note = 2'-O-Methyl-adenosine
  modified_base 85: mod_base = OTHER; note = 2'-O-Methyl-cytidine
  modified_base 86: mod_base = OTHER; note = 2'-O-Methyl-cytidine
  modified_base 87: mod_base = OTHER; note = 2'-O-Methyl-guanosine
  modified_base 88: mod_base = OTHER; note = 2'-O-Methyl-adenosine
  modified_base 89: mod_base = OTHER; note = 2'-O-Methyl-guanosine
  modified_base 90: mod_base = OTHER; note = 2'-O-Methyl-uridine
  modified_base 91: mod_base = OTHER; note = 2'-O-Methyl-cytidine
  modified_base 92: mod_base = OTHER; note = 2'-O-Methyl-guanosine
  modified_base 93: mod_base = OTHER; note = 2'-O-Methyl-guanosine
  modified_base 94: mod_base = OTHER; note = 2'-O-Methyl-uridine
  modified_base 95: mod_base = OTHER; note = 2'-O-Methyl-guanosine
  modified_base 96: mod_base = OTHER; note = 2'-O-Methyl-cytidine
  modified_base 97: mod_base = OTHER; note = 2'-O-Methyl-uridine
  modified_base 98: mod_base = OTHER; note = 2'-O-Methyl-uridine phosphorothioate
  modified_base 99: mod_base = OTHER; note = 2'-O-Methyl-uridine phosphorothioate
  modified_base 100: mod_base = OTHER; note = 2'-O-Methyl-uridine

SEQ ID NO: 2012 - RNA, 100 nt, synthetic construct; identical to SEQ ID NO: 1905
  source 1..100: mol_type = other RNA; note = Description of Artificial Sequence: Synthetic polynucleotide
  modified_base 1: mod_base = OTHER; note = 2'-O-Methyl-cytidine phosphorothioate
  modified_base 2: mod_base = OTHER; note = 2'-O-Methyl-adenosine phosphorothioate
  modified_base 3: mod_base = OTHER; note = 2'-O-Methyl-guanosine phosphorothioate
  modified_base 9: mod_base = OTHER; note = Nebularine - ribonebularine
  modified_base 14: mod_base = OTHER; note = Nebularine - ribonebularine
  modified_base 21: mod_base = OTHER; note = 2'-O-Methyl-guanosine
  modified_base 28: mod_base = OTHER; note = 2'-O-Methyl-adenosine
  modified_base 29: mod_base = OTHER; note = 2'-O-Methyl-guanosine
  modified_base 30: mod_base = OTHER; note = 2'-O-Methyl-cytidine
  modified_base 31: mod_base = OTHER; note = 2'-O-Methyl-uridine
  modified_base 32: mod_base = OTHER; note = 2'-O-Methyl-adenosine
  modified_base 33: mod_base = OTHER; note = 2'-O-Methyl-guanosine
  modified_base 34: mod_base = OTHER; note = Nebularine - ribonebularine
  modified_base 35: mod_base = OTHER; note = 2'-O-Methyl-adenosine
  modified_base 36: mod_base = OTHER; note = 2'-O-Methyl-adenosine
  modified_base 37: mod_base = OTHER; note = 2'-O-Methyl-uridine
  modified_base 38: mod_base = OTHER; note = 2'-O-Methyl-adenosine
  modified_base 39: mod_base = OTHER; note = 2'-O-Methyl-guanosine
  modified_base 40: mod_base = OTHER; note = 2'-O-Methyl-cytidine
  modified_base 41: mod_base = OTHER; note = 2'-O-Methyl-adenosine
  modified_base 42: mod_base = OTHER; note = 2'-O-Methyl-adenosine
  modified_base 46: mod_base = OTHER; note = 2'-O-Methyl-adenosine
  modified_base 48: mod_base = OTHER; note = 2'-O-Methyl-adenosine
  modified_base 50: mod_base = OTHER; note = 2'-O-Methyl-uridine
  modified_base 52: mod_base = OTHER; note = 2'-O-Methyl-adenosine
  modified_base 53: mod_base = OTHER; note = 2'-O-Methyl-guanosine
  modified_base 54: mod_base = OTHER; note = 2'-O-Methyl-guanosine
  modified_base 55: mod_base = OTHER; note = 2'-O-Methyl-cytidine
  modified_base 56: mod_base = OTHER; note = 2'-O-Methyl-uridine
  modified_base 57: mod_base = OTHER; note = 2'-O-Methyl-adenosine
  modified_base 60: mod_base = OTHER; note = 2'-O-Methyl-cytidine
  modified_base 61: mod_base = OTHER; note = 2'-O-Methyl-cytidine
  modified_base 66: mod_base = OTHER; note = 2'-O-Methyl-uridine
  modified_base 67: mod_base = OTHER; note = 2'-O-Methyl-cytidine
  modified_base 70: mod_base = OTHER; note = 2'-O-Methyl-cytidine
  modified_base 71: mod_base = OTHER; note = 2'-O-Methyl-uridine
  modified_base 72: mod_base = OTHER; note = 2'-O-Methyl-uridine
  modified_base 73: mod_base = OTHER; note = 2'-O-Methyl-guanosine
  modified_base 74: mod_base = OTHER; note = 2'-O-Methyl-adenosine
  modified_base 75: mod_base = OTHER; note = 2'-O-Methyl-adenosine
  modified_base 76: mod_base = OTHER; note = 2'-O-Methyl-adenosine
  modified_base 77: mod_base = OTHER; note = 2'-O-Methyl-adenosine
  modified_base 78: mod_base = OTHER; note = 2'-O-Methyl-adenosine
  modified_base 79: mod_base = OTHER; note = 2'-O-Methyl-guanosine
  modified_base 80: mod_base = OTHER; note = 2'-O-Methyl-uridine
  modified_base 81: mod_base = OTHER; note = 2'-O-Methyl-guanosine
  modified_base 83: mod_base = OTHER; note = 2'-O-Methyl-cytidine
  modified_base 84: mod_base = OTHER; note = 2'-O-Methyl-adenosine
  modified_base 85: mod_base = OTHER; note = 2'-O-Methyl-cytidine
  modified_base 86: mod_base = OTHER; note = 2'-O-Methyl-cytidine
  modified_base 87: mod_base = OTHER; note = 2'-O-Methyl-guanosine
  modified_base 88: mod_base = OTHER; note = 2'-O-Methyl-adenosine
  modified_base 89: mod_base = OTHER; note = 2'-O-Methyl-guanosine
  modified_base 90: mod_base = OTHER; note = 2'-O-Methyl-uridine
  modified_base 91: mod_base = OTHER; note = 2'-O-Methyl-cytidine
  modified_base 92: mod_base = OTHER; note = 2'-O-Methyl-guanosine
  modified_base 93: mod_base = OTHER; note = 2'-O-Methyl-guanosine
  modified_base 94: mod_base = OTHER; note = 2'-O-Methyl-uridine
  modified_base 95: mod_base = OTHER; note = 2'-O-Methyl-guanosine
  modified_base 96: mod_base = OTHER; note = 2'-O-Methyl-cytidine
  modified_base 97: mod_base = OTHER; note = 2'-O-Methyl-uridine
  modified_base 98: mod_base = OTHER; note = 2'-O-Methyl-uridine phosphorothioate
  modified_base 99: mod_base = OTHER; note = 2'-O-Methyl-uridine phosphorothioate
  modified_base 100: mod_base = OTHER; note = 2'-O-Methyl-uridine

SEQ ID NO: 2013 - RNA, 100 nt, synthetic construct; identical to SEQ ID NO: 1906
  source 1..100: mol_type = other RNA; note = Description of Artificial Sequence: Synthetic polynucleotide
  modified_base 1: mod_base = OTHER; note = 2'-O-Methyl-cytidine phosphorothioate
  modified_base 2: mod_base = OTHER; note = 2'-O-Methyl-adenosine phosphorothioate
  modified_base 3: mod_base = OTHER; note = 2'-O-Methyl-guanosine phosphorothioate
  modified_base 9: mod_base = OTHER; note = Nebularine - ribonebularine
  modified_base 14: mod_base = OTHER; note = Nebularine - ribonebularine
  modified_base 21: mod_base = OTHER; note = 2'-O-Methyl-guanosine
  modified_base 28: mod_base = OTHER; note = 2'-O-Methyl-adenosine
  modified_base 29: mod_base = OTHER; note = 2'-O-Methyl-guanosine
  modified_base 30: mod_base = OTHER; note = 2'-O-Methyl-cytidine
  modified_base 31: mod_base = OTHER; note = 2'-O-Methyl-uridine
  modified_base 32: mod_base = OTHER; note = 2'-O-Methyl-adenosine
  modified_base 33: mod_base = OTHER; note = 2'-O-Methyl-guanosine
  modified_base 34: mod_base = OTHER; note = Nebularine - ribonebularine
  modified_base 35: mod_base = OTHER; note = 2'-O-Methyl-adenosine
  modified_base 36: mod_base = OTHER; note = 2'-O-Methyl-adenosine
  modified_base 37: mod_base = OTHER; note = 2'-O-Methyl-uridine
  modified_base 38: mod_base = OTHER; note = 2'-O-Methyl-adenosine
  modified_base 39: mod_base = OTHER; note = 2'-O-Methyl-guanosine
  modified_base 40: mod_base = OTHER; note = 2'-O-Methyl-cytidine
  modified_base 41: mod_base = OTHER; note = 2'-O-Methyl-adenosine
  modified_base 42: mod_base = OTHER; note = 2'-O-Methyl-adenosine
  modified_base 46: mod_base = OTHER; note = 2'-O-Methyl-adenosine
  modified_base 48: mod_base = OTHER; note = 2'-O-Methyl-adenosine
  modified_base 50: mod_base = OTHER; note = 2'-O-Methyl-uridine
  modified_base 52: mod_base = OTHER; note = 2'-O-Methyl-adenosine
  modified_base 53: mod_base = OTHER; note = 2'-O-Methyl-guanosine
  modified_base 54: mod_base = OTHER; note = 2'-O-Methyl-guanosine
  modified_base 55: mod_base = OTHER; note = 2'-O-Methyl-cytidine
  modified_base 56: mod_base = OTHER; note = 2'-O-Methyl-uridine
  modified_base 57: mod_base = OTHER; note = Nebularine - ribonebularine
  modified_base 60: mod_base = OTHER; note = 2'-O-Methyl-cytidine
  modified_base 61: mod_base = OTHER; note = 2'-O-Methyl-cytidine
  modified_base 66: mod_base = OTHER; note = 2'-O-Methyl-uridine
  modified_base 67: mod_base = OTHER; note = 2'-O-Methyl-cytidine
  modified_base 70: mod_base = OTHER; note = 2'-O-Methyl-cytidine
  modified_base 71: mod_base = OTHER; note = 2'-O-Methyl-uridine
  modified_base 72: mod_base = OTHER; note = 2'-O-Methyl-uridine
  modified_base 73: mod_base = OTHER; note = 2'-O-Methyl-guanosine
  modified_base 74: mod_base = OTHER; note = 2'-O-Methyl-adenosine
  modified_base 75: mod_base = OTHER; note = 2'-O-Methyl-adenosine
  modified_base 76: mod_base = OTHER; note = 2'-O-Methyl-adenosine
  modified_base 77: mod_base = OTHER; note = 2'-O-Methyl-adenosine
  modified_base 78: mod_base = OTHER; note = 2'-O-Methyl-adenosine
  modified_base 79: mod_base = OTHER; note = 2'-O-Methyl-guanosine
  modified_base 80: mod_base = OTHER; note = 2'-O-Methyl-uridine
  modified_base 81: mod_base = OTHER; note = 2'-O-Methyl-guanosine
  modified_base 83: mod_base = OTHER; note = 2'-O-Methyl-cytidine
  modified_base 84: mod_base = OTHER; note = 2'-O-Methyl-adenosine
  modified_base 85: mod_base = OTHER; note = 2'-O-Methyl-cytidine
  modified_base 86: mod_base = OTHER; note = 2'-O-Methyl-cytidine
  modified_base 87: mod_base = OTHER; note = 2'-O-Methyl-guanosine
  modified_base 88: mod_base = OTHER; note = 2'-O-Methyl-adenosine
  modified_base 89: mod_base = OTHER; note = 2'-O-Methyl-guanosine
  modified_base 90: mod_base = OTHER; note = 2'-O-Methyl-uridine
  modified_base 91: mod_base = OTHER; note = 2'-O-Methyl-cytidine
  modified_base 92: mod_base = OTHER; note = 2'-O-Methyl-guanosine
  modified_base 93: mod_base = OTHER; note = 2'-O-Methyl-guanosine
  modified_base 94: mod_base = OTHER; note = 2'-O-Methyl-uridine
  modified_base 95: mod_base = OTHER; note = 2'-O-Methyl-guanosine
  modified_base 96: mod_base = OTHER; note = 2'-O-Methyl-cytidine
  modified_base 97: mod_base = OTHER; note = 2'-O-Methyl-uridine
  modified_base 98: mod_base = OTHER; note = 2'-O-Methyl-uridine phosphorothioate
  modified_base 99: mod_base = OTHER; note = 2'-O-Methyl-uridine phosphorothioate
  modified_base 100: mod_base = OTHER; note = 2'-O-Methyl-uridine

SEQ ID NO: 2014 - RNA, 100 nt, synthetic construct; identical to SEQ ID NO: 1907
  source 1..100: mol_type = other RNA; note = Description of Artificial Sequence: Synthetic polynucleotide
  modified_base 1: mod_base = OTHER; note = 2'-O-Methyl-cytidine phosphorothioate
  modified_base 2: mod_base = OTHER; note = 2'-O-Methyl-adenosine phosphorothioate
  modified_base 3: mod_base = OTHER; note = 2'-O-Methyl-guanosine phosphorothioate
  modified_base 9: mod_base = OTHER; note = Nebularine - ribonebularine
  modified_base 14: mod_base = OTHER; note = Nebularine - ribonebularine
  modified_base 21: mod_base = OTHER; note = 2'-O-Methyl-guanosine
  modified_base 28: mod_base = OTHER; note = 2'-O-Methyl-adenosine
  modified_base 29: mod_base = OTHER; note = 2'-O-Methyl-guanosine
  modified_base 30: mod_base = OTHER; note = 2'-O-Methyl-cytidine
  modified_base 31: mod_base = OTHER; note = 2'-O-Methyl-uridine
  modified_base 32: mod_base = OTHER; note = 2'-O-Methyl-adenosine
  modified_base 33: mod_base = OTHER; note = 2'-O-Methyl-guanosine
  modified_base 34: mod_base = OTHER; note = 2'-O-Methyl-adenosine
  modified_base 35: mod_base = OTHER; note = 2'-O-Methyl-adenosine
  modified_base 36: mod_base = OTHER; note = 2'-O-Methyl-adenosine
  modified_base 37: mod_base = OTHER; note = 2'-O-Methyl-uridine
  modified_base 38: mod_base = OTHER; note = 2'-O-Methyl-adenosine
  modified_base 39: mod_base = OTHER; note = 2'-O-Methyl-guanosine
  modified_base 40: mod_base = OTHER; note = 2'-O-Methyl-cytidine
  modified_base 41: mod_base = OTHER; note = 2'-O-Methyl-adenosine
  modified_base 42: mod_base = OTHER; note = 2'-O-Methyl-adenosine
  modified_base 46: mod_base = OTHER; note = 2'-O-Methyl-adenosine
  modified_base 48: mod_base = OTHER; note = 2'-O-Methyl-adenosine
  modified_base 50: mod_base = OTHER; note = 2'-O-Methyl-uridine
  modified_base 52: mod_base = OTHER; note = 2'-O-Methyl-adenosine
  modified_base 53: mod_base = OTHER; note = 2'-O-Methyl-guanosine
  modified_base 54: mod_base = OTHER; note = 2'-O-Methyl-guanosine
  modified_base 55: mod_base = OTHER; note = 2'-O-Methyl-cytidine
  modified_base 56: mod_base = OTHER; note = 2'-O-Methyl-uridine
  modified_base 57: mod_base = OTHER; note = 2'-O-Methyl-adenosine
  modified_base 60: mod_base = OTHER; note = 2'-O-Methyl-cytidine
  modified_base 61: mod_base = OTHER; note = 2'-O-Methyl-cytidine
  modified_base 65: mod_base = OTHER; note = Nebularine - ribonebularine
  modified_base 66: mod_base = OTHER; note = 2'-O-Methyl-uridine
  modified_base 67: mod_base = OTHER; note = 2'-O-Methyl-cytidine
  modified_base 70: mod_base = OTHER; note = 2'-O-Methyl-cytidine
  modified_base 71: mod_base = OTHER; note = 2'-O-Methyl-uridine
  modified_base 72: mod_base = OTHER; note = 2'-O-Methyl-uridine
  modified_base 73: mod_base = OTHER; note = 2'-O-Methyl-guanosine
  modified_base 74: mod_base = OTHER; note = 2'-O-Methyl-adenosine
  modified_base 75: mod_base = OTHER; note = 2'-O-Methyl-adenosine
  modified_base 76: mod_base = OTHER; note = 2'-O-Methyl-adenosine
  modified_base 77: mod_base = OTHER; note = 2'-O-Methyl-adenosine
  modified_base 78: mod_base = OTHER; note = 2'-O-Methyl-adenosine
  modified_base 79: mod_base = OTHER; note = 2'-O-Methyl-guanosine
  modified_base 80: mod_base = OTHER; note = 2'-O-Methyl-uridine
  modified_base 81: mod_base = OTHER; note = 2'-O-Methyl-guanosine
  modified_base 83: mod_base = OTHER; note = 2'-O-Methyl-cytidine
  modified_base 84: mod_base = OTHER; note = 2'-O-Methyl-adenosine
  modified_base 85: mod_base = OTHER; note = 2'-O-Methyl-cytidine
  modified_base 86: mod_base = OTHER; note = 2'-O-Methyl-cytidine
  modified_base 87: mod_base = OTHER; note = 2'-O-Methyl-guanosine
  modified_base 88: mod_base = OTHER; note = 2'-O-Methyl-adenosine
  modified_base 89: mod_base = OTHER; note = 2'-O-Methyl-guanosine
  modified_base 90: mod_base = OTHER; note = 2'-O-Methyl-uridine
  modified_base 91: mod_base = OTHER; note = 2'-O-Methyl-cytidine
  modified_base 92: mod_base = OTHER; note = 2'-O-Methyl-guanosine
  modified_base 93: mod_base = OTHER; note = 2'-O-Methyl-guanosine
  modified_base 94: mod_base = OTHER; note = 2'-O-Methyl-uridine
  modified_base 95: mod_base = OTHER; note = 2'-O-Methyl-guanosine
  modified_base 96: mod_base = OTHER; note = 2'-O-Methyl-cytidine
  modified_base 97: mod_base = OTHER; note = 2'-O-Methyl-uridine
  modified_base 98: mod_base = OTHER; note = 2'-O-Methyl-uridine phosphorothioate
  modified_base 99: mod_base = OTHER; note = 2'-O-Methyl-uridine phosphorothioate
  modified_base 100: mod_base = OTHER; note = 2'-O-Methyl-uridine

SEQ ID NO: 2015 - RNA, 100 nt, synthetic construct; identical to SEQ ID NO: 1908
  source 1..100: mol_type = other RNA; note = Description of Artificial Sequence: Synthetic polynucleotide
  modified_base 1: mod_base = OTHER; note = 2'-O-Methyl-cytidine phosphorothioate
  modified_base 2: mod_base = OTHER; note = 2'-O-Methyl-adenosine phosphorothioate
  modified_base 3: mod_base = OTHER; note = 2'-O-Methyl-guanosine phosphorothioate
  modified_base 9: mod_base = OTHER; note = Nebularine - ribonebularine
  modified_base 14: mod_base = OTHER; note = Nebularine - ribonebularine
  modified_base 21: mod_base = OTHER; note = 2'-O-Methyl-guanosine
  modified_base 28: mod_base = OTHER; note = 2'-O-Methyl-adenosine
  modified_base 29: mod_base = OTHER; note = 2'-O-Methyl-guanosine
  modified_base 30: mod_base = OTHER; note = 2'-O-Methyl-cytidine
  modified_base 31: mod_base = OTHER; note = 2'-O-Methyl-uridine
  modified_base 32: mod_base = OTHER; note = 2'-O-Methyl-adenosine
  modified_base 33: mod_base = OTHER; note = 2'-O-Methyl-guanosine
  modified_base 34: mod_base = OTHER; note = Nebularine - ribonebularine
  modified_base 35: mod_base = OTHER; note = 2'-O-Methyl-adenosine
  modified_base 36: mod_base = OTHER; note = 2'-O-Methyl-adenosine
  modified_base 37: mod_base = OTHER; note = 2'-O-Methyl-uridine
  modified_base 38: mod_base = OTHER; note = 2'-O-Methyl-adenosine
  modified_base 39: mod_base = OTHER; note = 2'-O-Methyl-guanosine
  modified_base 40: mod_base = OTHER; note = 2'-O-Methyl-cytidine
  modified_base 41: mod_base = OTHER; note = 2'-O-Methyl-adenosine
  modified_base 42: mod_base = OTHER; note = 2'-O-Methyl-adenosine
  modified_base 46: mod_base = OTHER; note = 2'-O-Methyl-adenosine
  modified_base 48: mod_base = OTHER; note = 2'-O-Methyl-adenosine
  modified_base 50: mod_base = OTHER; note = 2'-O-Methyl-uridine
  modified_base 52: mod_base = OTHER; note = 2'-O-Methyl-adenosine
  modified_base 53: mod_base = OTHER; note = 2'-O-Methyl-guanosine
  modified_base 54: mod_base = OTHER; note = 2'-O-Methyl-guanosine
  modified_base 55: mod_base = OTHER; note = 2'-O-Methyl-cytidine
  modified_base 56: mod_base = OTHER; note = 2'-O-Methyl-uridine
  modified_base 57: mod_base = OTHER; note = Nebularine - ribonebularine
  modified_base 60: mod_base = OTHER; note = 2'-O-Methyl-cytidine
  modified_base 61: mod_base = OTHER; note = 2'-O-Methyl-cytidine
  modified_base 65: mod_base = OTHER; note = Nebularine - ribonebularine
  modified_base 66: mod_base = OTHER; note = 2'-O-Methyl-uridine
  modified_base 67: mod_base = OTHER; note = 2'-O-Methyl-cytidine
  modified_base 70: mod_base = OTHER; note = 2'-O-Methyl-cytidine
  modified_base 71: mod_base = OTHER; note = 2'-O-Methyl-uridine
  modified_base 72: mod_base = OTHER; note = 2'-O-Methyl-uridine
  modified_base 73: mod_base = OTHER; note = 2'-O-Methyl-guanosine
  modified_base 74: mod_base = OTHER; note = 2'-O-Methyl-adenosine
  modified_base 75: mod_base = OTHER; note = 2'-O-Methyl-adenosine
  modified_base 76: mod_base = OTHER; note = 2'-O-Methyl-adenosine
  modified_base 77: mod_base = OTHER; note = 2'-O-Methyl-adenosine
  modified_base 78: mod_base = OTHER; note = 2'-O-Methyl-adenosine
  modified_base 79: mod_base = OTHER; note = 2'-O-Methyl-guanosine
  modified_base 80: mod_base = OTHER; note = 2'-O-Methyl-uridine
  modified_base 81: mod_base = OTHER; note = 2'-O-Methyl-guanosine
  modified_base 83: mod_base = OTHER; note = 2'-O-Methyl-cytidine
  modified_base 84: mod_base = OTHER; note = 2'-O-Methyl-adenosine
  modified_base 85: mod_base = OTHER; note = 2'-O-Methyl-cytidine
  modified_base 86: mod_base = OTHER; note = 2'-O-Methyl-cytidine
  modified_base 87: mod_base = OTHER; note = 2'-O-Methyl-guanosine
  modified_base 88: mod_base = OTHER; note = 2'-O-Methyl-adenosine
  modified_base 89: mod_base = OTHER; note = 2'-O-Methyl-guanosine
  modified_base 90: mod_base = OTHER; note = 2'-O-Methyl-uridine
  modified_base 91: mod_base = OTHER; note = 2'-O-Methyl-cytidine
  modified_base 92: mod_base = OTHER; note = 2'-O-Methyl-guanosine
  modified_base 93: mod_base = OTHER; note = 2'-O-Methyl-guanosine
  modified_base 94: mod_base = OTHER; note = 2'-O-Methyl-uridine
  modified_base 95: mod_base = OTHER; note = 2'-O-Methyl-guanosine
  modified_base 96: mod_base = OTHER; note = 2'-O-Methyl-cytidine
  modified_base 97: mod_base = OTHER; note = 2'-O-Methyl-uridine
  modified_base 98: mod_base = OTHER; note = 2'-O-Methyl-uridine phosphorothioate
  modified_base 99: mod_base = OTHER; note = 2'-O-Methyl-uridine phosphorothioate
  modified_base 100: mod_base = OTHER; note = 2'-O-Methyl-uridine

SEQ ID NO: 2016 - RNA, 100 nt, synthetic construct; identical to SEQ ID NO: 1909
  source 1..100: mol_type = other RNA; note = Description of Artificial Sequence: Synthetic polynucleotide
  modified_base 1: mod_base = OTHER; note = 2'-O-Methyl-cytidine phosphorothioate
  modified_base 2: mod_base = OTHER; note = 2'-O-Methyl-adenosine phosphorothioate
  modified_base 3: mod_base = OTHER; note = 2'-O-Methyl-guanosine phosphorothioate
  modified_base 9: mod_base = OTHER; note = Nebularine - ribonebularine
  modified_base 14: mod_base = OTHER; note = Nebularine - ribonebularine
  modified_base 21: mod_base = OTHER; note = 2'-O-Methyl-guanosine
  modified_base 28: mod_base = OTHER; note = Nebularine - ribonebularine
  modified_base 29: mod_base = OTHER; note = 2'-O-Methyl-guanosine
  modified_base 30: mod_base = OTHER; note = 2'-O-Methyl-cytidine
  modified_base 31: mod_base = OTHER; note = 2'-O-Methyl-uridine
  modified_base 32: mod_base = OTHER; note = 2'-O-Methyl-adenosine
  modified_base 33: mod_base = OTHER; note = 2'-O-Methyl-guanosine
  modified_base 34: mod_base = OTHER; note = Nebularine - ribonebularine
  modified_base 35: mod_base = OTHER; note = 2'-O-Methyl-adenosine
  modified_base 36: mod_base = OTHER; note = 2'-O-Methyl-adenosine
  modified_base 37: mod_base = OTHER; note = 2'-O-Methyl-uridine
  modified_base 38: mod_base = OTHER; note = 2'-O-Methyl-adenosine
  modified_base 39: mod_base = OTHER; note = 2'-O-Methyl-guanosine
  modified_base 40: mod_base = OTHER; note = 2'-O-Methyl-cytidine
  modified_base 41: mod_base = OTHER; note = 2'-O-Methyl-adenosine
  modified_base 42: mod_base = OTHER; note = Nebularine - ribonebularine
  modified_base 46: mod_base = OTHER; note = 2'-O-Methyl-adenosine
  modified_base 48: mod_base = OTHER; note = 2'-O-Methyl-adenosine
  modified_base 50: mod_base = OTHER; note = 2'-O-Methyl-uridine
  modified_base 52: mod_base = OTHER; note = 2'-O-Methyl-adenosine
  modified_base 53: mod_base = OTHER; note = 2'-O-Methyl-guanosine
  modified_base 54: mod_base = OTHER; note = 2'-O-Methyl-guanosine
  modified_base 55: mod_base = OTHER; note = 2'-O-Methyl-cytidine
  modified_base 56: mod_base = OTHER; note = 2'-O-Methyl-uridine
  modified_base 57: mod_base = OTHER; note = Nebularine - ribonebularine
  modified_base 60: mod_base = OTHER; note = 2'-O-Methyl-cytidine
  modified_base 61: mod_base = OTHER; note = 2'-O-Methyl-cytidine
  modified_base 65: mod_base = OTHER; note = Nebularine - ribonebularine
  modified_base 66: mod_base = OTHER; note = 2'-O-Methyl-uridine
  modified_base 67: mod_base = OTHER; note = 2'-O-Methyl-cytidine
  modified_base 70: mod_base = OTHER; note = 2'-O-Methyl-cytidine
  modified_base 71: mod_base = OTHER; note = 2'-O-Methyl-uridine
  modified_base 72: mod_base = OTHER; note = 2'-O-Methyl-uridine
  modified_base 73: mod_base = OTHER; note = 2'-O-Methyl-guanosine
  modified_base 74: mod_base = OTHER; note = 2'-O-Methyl-adenosine
  modified_base 75: mod_base = OTHER; note = 2'-O-Methyl-adenosine
  modified_base 76: mod_base = OTHER; note = 2'-O-Methyl-adenosine
  modified_base 77: mod_base = OTHER; note = 2'-O-Methyl-adenosine
  modified_base 78: mod_base = OTHER; note = 2'-O-Methyl-adenosine
  modified_base 79: mod_base = OTHER; note = 2'-O-Methyl-guanosine
  modified_base 80: mod_base = OTHER; note = 2'-O-Methyl-uridine
  modified_base 81: mod_base = OTHER; note = 2'-O-Methyl-guanosine
  modified_base 83: mod_base = OTHER; note = 2'-O-Methyl-cytidine
  modified_base 84: mod_base = OTHER; note = 2'-O-Methyl-adenosine
  modified_base 85: mod_base = OTHER; note = 2'-O-Methyl-cytidine
  modified_base 86: mod_base = OTHER; note = 2'-O-Methyl-cytidine
  modified_base 87: mod_base = OTHER; note = 2'-O-Methyl-guanosine
  modified_base 88: mod_base = OTHER; note = 2'-O-Methyl-adenosine
  modified_base 89: mod_base = OTHER; note = 2'-O-Methyl-guanosine
  modified_base 90: mod_base = OTHER; note = 2'-O-Methyl-uridine
  modified_base 91: mod_base = OTHER; note = 2'-O-Methyl-cytidine
  modified_base 92: mod_base = OTHER; note = 2'-O-Methyl-guanosine
  modified_base 93: mod_base = OTHER; note = 2'-O-Methyl-guanosine
  modified_base 94: mod_base = OTHER; note = 2'-O-Methyl-uridine
  modified_base 95: mod_base = OTHER; note = 2'-O-Methyl-guanosine
  modified_base 96: mod_base = OTHER; note = 2'-O-Methyl-cytidine
  modified_base 97: mod_base = OTHER; note = 2'-O-Methyl-uridine
  modified_base 98: mod_base = OTHER; note = 2'-O-Methyl-uridine phosphorothioate
  modified_base 99: mod_base = OTHER; note = 2'-O-Methyl-uridine phosphorothioate
  modified_base 100: mod_base = OTHER; note = 2'-O-Methyl-uridine

SEQ ID NO: 2017 - RNA, 100 nt, synthetic construct; identical to SEQ ID NO: 1910
  source 1..100: mol_type = other RNA; note = Description of Artificial Sequence: Synthetic polynucleotide
  modified_base 1: mod_base = OTHER; note = 2'-O-Methyl-cytidine phosphorothioate
  modified_base 2: mod_base = OTHER; note = 2'-O-Methyl-adenosine phosphorothioate
  modified_base 3: mod_base = OTHER; note = 2'-O-Methyl-guanosine phosphorothioate
  modified_base 9: mod_base = OTHER; note = Nebularine - ribonebularine
  modified_base 21: mod_base = OTHER; note = 2'-O-Methyl-guanosine
  modified_base 28: mod_base = OTHER; note = 2'-O-Methyl-adenosine
  modified_base 29: mod_base = OTHER; note = 2'-O-Methyl-guanosine
  modified_base 30: mod_base = OTHER; note = 2'-O-Methyl-cytidine
  modified_base 31: mod_base = OTHER; note = 2'-O-Methyl-uridine
  modified_base 32: mod_base = OTHER; note = 2'-O-Methyl-adenosine
  modified_base 33: mod_base = OTHER; note = 2'-O-Methyl-guanosine
  modified_base 34: mod_base = OTHER; note = Nebularine - ribonebularine
  modified_base 35: mod_base = OTHER; note = 2'-O-Methyl-adenosine
  modified_base 36: mod_base = OTHER; note = 2'-O-Methyl-adenosine
  modified_base 37: mod_base = OTHER; note = 2'-O-Methyl-uridine
  modified_base 38: mod_base = OTHER; note = 2'-O-Methyl-adenosine
  modified_base 39: mod_base = OTHER; note = 2'-O-Methyl-guanosine
  modified_base 40: mod_base = OTHER; note = 2'-O-Methyl-cytidine
  modified_base 41: mod_base = OTHER; note = 2'-O-Methyl-adenosine
  modified_base 42: mod_base = OTHER; note = 2'-O-Methyl-adenosine
  modified_base 46: mod_base = OTHER; note = 2'-O-Methyl-adenosine
  modified_base 48: mod_base = OTHER; note = 2'-O-Methyl-adenosine
  modified_base 50: mod_base = OTHER; note = 2'-O-Methyl-uridine
  modified_base 52: mod_base = OTHER; note = 2'-O-Methyl-adenosine
  modified_base 53: mod_base = OTHER; note = 2'-O-Methyl-guanosine
  modified_base 54: mod_base = OTHER; note = 2'-O-Methyl-guanosine
  modified_base 55: mod_base = OTHER; note = 2'-O-Methyl-cytidine
  modified_base 56: mod_base = OTHER; note = 2'-O-Methyl-uridine
  modified_base 57: mod_base = OTHER; note = Nebularine - ribonebularine
  modified_base 60: mod_base = OTHER; note = 2'-O-Methyl-cytidine
  modified_base 61: mod_base = OTHER; note = 2'-O-Methyl-cytidine
  modified_base 66: mod_base = OTHER; note = 2'-O-Methyl-uridine
  modified_base 67: mod_base = OTHER; note = 2'-O-Methyl-cytidine
  modified_base 70: mod_base = OTHER; note = 2'-O-Methyl-cytidine
  modified_base 71: mod_base = OTHER; note = 2'-O-Methyl-uridine
  modified_base 72: mod_base = OTHER; note = 2'-O-Methyl-uridine
  modified_base 73: mod_base = OTHER; note = 2'-O-Methyl-guanosine
  modified_base 74: mod_base = OTHER; note = 2'-O-Methyl-adenosine
  modified_base 75: mod_base = OTHER; note = 2'-O-Methyl-adenosine
  modified_base 76: mod_base = OTHER; note = 2'-O-Methyl-adenosine
  modified_base 77: mod_base = OTHER; note = 2'-O-Methyl-adenosine
  modified_base 78: mod_base = OTHER; note = 2'-O-Methyl-adenosine
  modified_base 79: mod_base = OTHER; note = 2'-O-Methyl-guanosine
  modified_base 80: mod_base = OTHER; note = 2'-O-Methyl-uridine
  modified_base 81: mod_base = OTHER; note = 2'-O-Methyl-guanosine
  modified_base 83: mod_base = OTHER; note = 2'-O-Methyl-cytidine
  modified_base 84: mod_base = OTHER; note = 2'-O-Methyl-adenosine
  modified_base 85: mod_base = OTHER; note = 2'-O-Methyl-cytidine
  modified_base 86: mod_base = OTHER; note = 2'-O-Methyl-cytidine
  modified_base 87: mod_base = OTHER; note = 2'-O-Methyl-guanosine
  modified_base 88: mod_base = OTHER; note = 2'-O-Methyl-adenosine
  modified_base 89: mod_base = OTHER; note = 2'-O-Methyl-guanosine
  modified_base 90: mod_base = OTHER; note = 2'-O-Methyl-uridine
  modified_base 91: mod_base = OTHER; note = 2'-O-Methyl-cytidine
  modified_base 92: mod_base = OTHER; note = 2'-O-Methyl-guanosine
  modified_base 93: mod_base = OTHER; note = 2'-O-Methyl-guanosine
  modified_base 94: mod_base = OTHER; note = 2'-O-Methyl-uridine
  modified_base 95: mod_base = OTHER; note = 2'-O-Methyl-guanosine
  modified_base 96: mod_base = OTHER; note = 2'-O-Methyl-cytidine
  modified_base 97: mod_base = OTHER; note = 2'-O-Methyl-uridine
  modified_base 98: mod_base = OTHER; note = 2'-O-Methyl-uridine phosphorothioate
  modified_base 99: mod_base = OTHER; note = 2'-O-Methyl-uridine phosphorothioate
  modified_base 100: mod_base = OTHER; note = 2'-O-Methyl-uridine

SEQ ID NO: 2018 - RNA, 100 nt, synthetic construct; identical to SEQ ID NO: 1911
  source 1..100: mol_type = other RNA; note = Description of Artificial Sequence: Synthetic polynucleotide
  modified_base 1: mod_base = OTHER; note = 2'-O-Methyl-cytidine phosphorothioate
  modified_base 2: mod_base = OTHER; note = 2'-O-Methyl-adenosine phosphorothioate
  modified_base 3: mod_base = OTHER; note = 2'-O-Methyl-guanosine phosphorothioate
  modified_base 9: mod_base = OTHER; note = Nebularine - ribonebularine
  modified_base 21: mod_base = OTHER; note = 2'-O-Methyl-guanosine
  modified_base 28: mod_base = OTHER; note = 2'-O-Methyl-adenosine
  modified_base 29: mod_base = OTHER; note = 2'-O-Methyl-guanosine
  modified_base 30: mod_base = OTHER; note = 2'-O-Methyl-cytidine
  modified_base 31: mod_base = OTHER; note = 2'-O-Methyl-uridine
  modified_base 32: mod_base = OTHER; note = 2'-O-Methyl-adenosine
  modified_base 33: mod_base = OTHER; note = 2'-O-Methyl-guanosine
  modified_base 34: mod_base = OTHER; note = 2'-O-Methyl-adenosine
  modified_base 35: mod_base = OTHER; note = 2'-O-Methyl-adenosine
  modified_base 36: mod_base = OTHER; note = 2'-O-Methyl-adenosine
  modified_base 37: mod_base = OTHER; note = 2'-O-Methyl-uridine
  modified_base 38: mod_base = OTHER; note = 2'-O-Methyl-adenosine
  modified_base 39: mod_base = OTHER; note = 2'-O-Methyl-guanosine
  modified_base 40: mod_base = OTHER; note = 2'-O-Methyl-cytidine
  modified_base 41: mod_base = OTHER; note = 2'-O-Methyl-adenosine
  modified_base 42: mod_base = OTHER; note = 2'-O-Methyl-adenosine
  modified_base 46: mod_base = OTHER; note = 2'-O-Methyl-adenosine
  modified_base 48: mod_base = OTHER; note = 2'-O-Methyl-adenosine
  modified_base 50: mod_base = OTHER; note = 2'-O-Methyl-uridine
  modified_base 52: mod_base = OTHER; note = 2'-O-Methyl-adenosine
  modified_base 53: mod_base = OTHER; note = 2'-O-Methyl-guanosine
  modified_base 54: mod_base = OTHER; note = 2'-O-Methyl-guanosine
  modified_base 55: mod_base = OTHER; note = 2'-O-Methyl-cytidine
  modified_base 56: mod_base = OTHER; note = 2'-O-Methyl-uridine
  modified_base 57: mod_base = OTHER; note = Nebularine - ribonebularine
  modified_base 60: mod_base = OTHER; note = 2'-O-Methyl-cytidine
  modified_base 61: mod_base = OTHER; note = 2'-O-Methyl-cytidine
  modified_base 66: mod_base = OTHER; note = 2'-O-Methyl-uridine
  modified_base 67: mod_base = OTHER; note = 2'-O-Methyl-cytidine
  modified_base 70: mod_base = OTHER; note = 2'-O-Methyl-cytidine
  modified_base 71: mod_base = OTHER; note = 2'-O-Methyl-uridine
  modified_base 72: mod_base = OTHER; note = 2'-O-Methyl-uridine
  modified_base 73: mod_base = OTHER; note = 2'-O-Methyl-guanosine
  modified_base 74: mod_base = OTHER; note = 2'-O-Methyl-adenosine
  modified_base 75: mod_base = OTHER; note = 2'-O-Methyl-adenosine
  modified_base 76: mod_base = OTHER; note = 2'-O-Methyl-adenosine
  modified_base 77: mod_base = OTHER; note = 2'-O-Methyl-adenosine
  modified_base 78: mod_base = OTHER; note = 2'-O-Methyl-adenosine
  modified_base 79: mod_base = OTHER; note = 2'-O-Methyl-guanosine
  modified_base 80: mod_base = OTHER; note = 2'-O-Methyl-uridine
  modified_base 81: mod_base = OTHER; note = 2'-O-Methyl-guanosine
  modified_base 83: mod_base = OTHER; note = 2'-O-Methyl-cytidine
  modified_base 84: mod_base = OTHER; note = 2'-O-Methyl-adenosine
  modified_base 85: mod_base = OTHER; note = 2'-O-Methyl-cytidine
  modified_base 86: mod_base = OTHER; note = 2'-O-Methyl-cytidine
  modified_base 87: mod_base = OTHER; note = 2'-O-Methyl-guanosine
  modified_base 88: mod_base = OTHER; note = 2'-O-Methyl-adenosine
  modified_base 89: mod_base = OTHER; note = 2'-O-Methyl-guanosine
  modified_base 90: mod_base = OTHER; note = 2'-O-Methyl-uridine
  modified_base 91: mod_base = OTHER; note = 2'-O-Methyl-cytidine
  modified_base 92: mod_base = OTHER; note = 2'-O-Methyl-guanosine
  modified_base 93: mod_base = OTHER; note = 2'-O-Methyl-guanosine
  modified_base 94: mod_base = OTHER; note = 2'-O-Methyl-uridine
  modified_base 95: mod_base = OTHER; note = 2'-O-Methyl-guanosine
  modified_base 96: mod_base = OTHER; note = 2'-O-Methyl-cytidine
  modified_base 97: mod_base = OTHER; note = 2'-O-Methyl-uridine
  modified_base 98: mod_base = OTHER; note = 2'-O-Methyl-uridine phosphorothioate
  modified_base 99: mod_base = OTHER; note = 2'-O-Methyl-uridine phosphorothioate
  modified_base 100: mod_base = OTHER; note = 2'-O-Methyl-uridine

SEQ ID NO: 2019 - RNA, 100 nt, synthetic construct; identical to SEQ ID NO: 1912
  source 1..100: mol_type = other RNA; note = Description of Artificial Sequence: Synthetic polynucleotide
  modified_base 1: mod_base = OTHER; note = 2'-O-Methyl-cytidine phosphorothioate
  modified_base 2: mod_base = OTHER; note = 2'-O-Methyl-adenosine phosphorothioate
  modified_base 3: mod_base = OTHER; note = 2'-O-Methyl-guanosine phosphorothioate
  modified_base 9: mod_base = OTHER; note = Nebularine - ribonebularine
  modified_base 21: mod_base = OTHER; note = 2'-O-Methyl-guanosine
  modified_base 28: mod_base = OTHER; note = 2'-O-Methyl-adenosine
  modified_base 29: mod_base = OTHER; note = 2'-O-Methyl-guanosine
  modified_base 30: mod_base = OTHER; note = 2'-O-Methyl-cytidine
  modified_base 31: mod_base = OTHER; note = 2'-O-Methyl-uridine
  modified_base 32: mod_base = OTHER; note = 2'-O-Methyl-adenosine
  modified_base 33: mod_base = OTHER; note = 2'-O-Methyl-guanosine
  modified_base 34: mod_base = OTHER; note = 2'-O-Methyl-adenosine
  modified_base 35: mod_base = OTHER; note = 2'-O-Methyl-adenosine
  modified_base 36: mod_base = OTHER; note = 2'-O-Methyl-adenosine
  modified_base 37: mod_base = OTHER; note = 2'-O-Methyl-uridine
  modified_base 38: mod_base = OTHER; note = 2'-O-Methyl-adenosine
  modified_base 39: mod_base = OTHER; note = 2'-O-Methyl-guanosine
  modified_base 40: mod_base = OTHER; note = 2'-O-Methyl-cytidine
  modified_base 41: mod_base = OTHER; note = 2'-O-Methyl-adenosine
  modified_base 42: mod_base = OTHER; note = 2'-O-Methyl-adenosine
  modified_base 46: mod_base = OTHER; note = 2'-O-Methyl-adenosine
  modified_base 48: mod_base = OTHER; note = 2'-O-Methyl-adenosine
  modified_base 50: mod_base = OTHER; note = 2'-O-Methyl-uridine
  modified_base 52: mod_base = OTHER; note = 2'-O-Methyl-adenosine
  modified_base 53: mod_base = OTHER; note = 2'-O-Methyl-guanosine
  modified_base 54: mod_base = OTHER; note = 2'-O-Methyl-guanosine
  modified_base 55: mod_base = OTHER; note = 2'-O-Methyl-cytidine
  modified_base 56: mod_base = OTHER; note = 2'-O-Methyl-uridine
  modified_base 57: mod_base = OTHER; note = 2'-O-Methyl-adenosine
  modified_base 60: mod_base = OTHER; note = 2'-O-Methyl-cytidine
  modified_base 61: mod_base = OTHER; note = 2'-O-Methyl-cytidine
  modified_base 65: mod_base = OTHER; note = Nebularine - ribonebularine
  modified_base 66: mod_base = OTHER; note = 2'-O-Methyl-uridine
  modified_base 67: mod_base = OTHER; note = 2'-O-Methyl-cytidine
  modified_base 70: mod_base = OTHER; note = 2'-O-Methyl-cytidine
  modified_base 71: mod_base = OTHER; note = 2'-O-Methyl-uridine
  modified_base 72: mod_base = OTHER; note = 2'-O-Methyl-uridine
  modified_base 73: mod_base = OTHER; note = 2'-O-Methyl-guanosine
  modified_base 74: mod_base = OTHER; note = 2'-O-Methyl-adenosine
  modified_base 75: mod_base = OTHER; note = 2'-O-Methyl-adenosine
  modified_base 76: mod_base = OTHER; note = 2'-O-Methyl-adenosine
  modified_base 77: mod_base = OTHER; note = 2'-O-Methyl-adenosine
  modified_base 78: mod_base = OTHER; note = 2'-O-Methyl-adenosine
  modified_base 79: mod_base = OTHER; note = 2'-O-Methyl-guanosine
  modified_base 80: mod_base = OTHER; note = 2'-O-Methyl-uridine
  modified_base 81: mod_base = OTHER; note = 2'-O-Methyl-guanosine
  modified_base 83: mod_base = OTHER; note = 2'-O-Methyl-cytidine
  modified_base 84: mod_base = OTHER; note = 2'-O-Methyl-adenosine
  modified_base 85: mod_base = OTHER; note = 2'-O-Methyl-cytidine
  modified_base 86: mod_base = OTHER; note = 2'-O-Methyl-cytidine
  modified_base 87: mod_base = OTHER; note = 2'-O-Methyl-guanosine
  modified_base 88: mod_base = OTHER; note = 2'-O-Methyl-adenosine
  modified_base 89: mod_base = OTHER; note = 2'-O-Methyl-guanosine
  modified_base 90: mod_base = OTHER; note = 2'-O-Methyl-uridine
  modified_base 91: mod_base = OTHER; note = 2'-O-Methyl-cytidine
  modified_base 92: mod_base = OTHER; note = 2'-O-Methyl-guanosine
  modified_base 93: mod_base = OTHER; note = 2'-O-Methyl-guanosine
  modified_base 94: mod_base = OTHER; note = 2'-O-Methyl-uridine
  modified_base 95: mod_base = OTHER; note = 2'-O-Methyl-guanosine
  modified_base 96: mod_base = OTHER; note = 2'-O-Methyl-cytidine
  modified_base 97: mod_base = OTHER; note = 2'-O-Methyl-uridine
  modified_base 98: mod_base = OTHER; note = 2'-O-Methyl-uridine phosphorothioate
  modified_base 99: mod_base = OTHER; note = 2'-O-Methyl-uridine phosphorothioate
  modified_base 100: mod_base = OTHER; note = 2'-O-Methyl-uridine

SEQ ID NO: 2020 - RNA, 100 nt, synthetic construct; identical to SEQ ID NO: 1913
  source 1..100: mol_type = other RNA; note = Description of Artificial Sequence: Synthetic polynucleotide
  modified_base 1: mod_base = OTHER; note = 2'-O-Methyl-cytidine phosphorothioate
  modified_base 2: mod_base = OTHER; note = 2'-O-Methyl-adenosine phosphorothioate
  modified_base 3: mod_base = OTHER; note = 2'-O-Methyl-guanosine phosphorothioate
  modified_base 9: mod_base = OTHER; note = Nebularine - ribonebularine
  modified_base 21: mod_base = OTHER; note = 2'-O-Methyl-guanosine
  modified_base 28: mod_base = OTHER; note = 2'-O-Methyl-adenosine
  modified_base 29: mod_base = OTHER; note = 2'-O-Methyl-guanosine
  modified_base 30: mod_base = OTHER; note = 2'-O-Methyl-cytidine
  modified_base 31: mod_base = OTHER; note = 2'-O-Methyl-uridine
  modified_base 32: mod_base = OTHER; note = 2'-O-Methyl-adenosine
  modified_base 33: mod_base = OTHER; note = 2'-O-Methyl-guanosine
  modified_base 34: mod_base = OTHER; note = Nebularine - ribonebularine
  modified_base 35: mod_base = OTHER; note = 2'-O-Methyl-adenosine
  modified_base 36: mod_base = OTHER; note = 2'-O-Methyl-adenosine
  modified_base 37: mod_base = OTHER; note = 2'-O-Methyl-uridine
  modified_base 38: mod_base = OTHER; note = 2'-O-Methyl-adenosine
  modified_base 39: mod_base = OTHER; note = 2'-O-Methyl-guanosine
  modified_base 40: mod_base = OTHER; note = 2'-O-Methyl-cytidine
  modified_base 41: mod_base = OTHER; note = 2'-O-Methyl-adenosine
  modified_base 42: mod_base = OTHER; note = 2'-O-Methyl-adenosine
  modified_base 46: mod_base = OTHER; note = 2'-O-Methyl-adenosine
  modified_base 48: mod_base = OTHER; note = 2'-O-Methyl-adenosine
  modified_base 50: mod_base = OTHER; note = 2'-O-Methyl-uridine
  modified_base 52: mod_base = OTHER; note = 2'-O-Methyl-adenosine
  modified_base 53: mod_base = OTHER; note = 2'-O-Methyl-guanosine
  modified_base 54: mod_base = OTHER; note = 2'-O-Methyl-guanosine
  modified_base 55: mod_base = OTHER; note = 2'-O-Methyl-cytidine
  modified_base 56: mod_base = OTHER; note = 2'-O-Methyl-uridine
  modified_base 57: mod_base = OTHER; note = Nebularine - ribonebularine
  modified_base 60: mod_base = OTHER; note = 2'-O-Methyl-cytidine
  modified_base 61: mod_base = OTHER; note = 2'-O-Methyl-cytidine
  modified_base 65: mod_base = OTHER; note = Nebularine - ribonebularine
  modified_base 66: mod_base = OTHER; note = 2'-O-Methyl-uridine
  modified_base 67: mod_base = OTHER; note = 2'-O-Methyl-cytidine
  modified_base 70: mod_base = OTHER; note = 2'-O-Methyl-cytidine
  modified_base 71: mod_base = OTHER; note = 2'-O-Methyl-uridine
  modified_base 72: mod_base = OTHER; note = 2'-O-Methyl-uridine
  modified_base 73: mod_base = OTHER; note = 2'-O-Methyl-guanosine
  modified_base 74: mod_base = OTHER; note = 2'-O-Methyl-adenosine
  modified_base 75: mod_base = OTHER; note = 2'-O-Methyl-adenosine
  modified_base 76: mod_base = OTHER; note = 2'-O-Methyl-adenosine
  modified_base 77: mod_base = OTHER; note = 2'-O-Methyl-adenosine
  modified_base 78: mod_base = OTHER; note = 2'-O-Methyl-adenosine
  modified_base 79: mod_base = OTHER; note = 2'-O-Methyl-guanosine
  modified_base 80: mod_base = OTHER; note = 2'-O-Methyl-uridine
  modified_base 81: mod_base = OTHER; note = 2'-O-Methyl-guanosine
  modified_base 83: mod_base = OTHER; note = 2'-O-Methyl-cytidine
  modified_base 84: mod_base = OTHER; note = 2'-O-Methyl-adenosine
  modified_base 85: mod_base = OTHER; note = 2'-O-Methyl-cytidine
  modified_base 86: mod_base = OTHER; note = 2'-O-Methyl-cytidine
  modified_base 87: mod_base = OTHER; note = 2'-O-Methyl-guanosine
  modified_base 88: mod_base = OTHER; note = 2'-O-Methyl-adenosine
  modified_base 89: mod_base = OTHER; note = 2'-O-Methyl-guanosine
  modified_base 90: mod_base = OTHER; note = 2'-O-Methyl-uridine
  modified_base 91: mod_base = OTHER; note = 2'-O-Methyl-cytidine
  modified_base 92: mod_base = OTHER; note = 2'-O-Methyl-guanosine
  modified_base 93: mod_base = OTHER; note = 2'-O-Methyl-guanosine
  modified_base 94: mod_base = OTHER; note = 2'-O-Methyl-uridine
  modified_base 95: mod_base = OTHER; note = 2'-O-Methyl-guanosine
  modified_base 96: mod_base = OTHER; note = 2'-O-Methyl-cytidine
  modified_base 97: mod_base = OTHER; note = 2'-O-Methyl-uridine
  modified_base 98: mod_base = OTHER; note = 2'-O-Methyl-uridine phosphorothioate
  modified_base 99: mod_base = OTHER; note = 2'-O-Methyl-uridine phosphorothioate
  modified_base 100: mod_base = OTHER; note = 2'-O-Methyl-uridine

SEQ ID NO: 2021 - RNA, 100 nt, synthetic construct; identical to SEQ ID NO: 1914
  source 1..100: mol_type = other RNA; note = Description of Artificial Sequence: Synthetic polynucleotide
  modified_base 1: mod_base = OTHER; note = 2'-O-Methyl-cytidine phosphorothioate
  modified_base 2: mod_base = OTHER; note = 2'-O-Methyl-adenosine phosphorothioate
  modified_base 3: mod_base = OTHER; note = 2'-O-Methyl-guanosine phosphorothioate
  modified_base 9: mod_base = OTHER; note = Nebularine - ribonebularine
  modified_base 21: mod_base = OTHER; note = 2'-O-Methyl-guanosine
  modified_base 28: mod_base = OTHER; note = Nebularine - ribonebularine
  modified_base 29: mod_base = OTHER; note = 2'-O-Methyl-guanosine
  modified_base 30: mod_base = OTHER; note = 2'-O-Methyl-cytidine
  modified_base 31: mod_base = OTHER; note = 2'-O-Methyl-uridine
  modified_base 32: mod_base = OTHER; note = 2'-O-Methyl-adenosine
  modified_base 33: mod_base = OTHER; note = 2'-O-Methyl-guanosine
  modified_base 34: mod_base = OTHER; note = Nebularine - ribonebularine
  modified_base 35: mod_base = OTHER; note = 2'-O-Methyl-adenosine
  modified_base 36: mod_base = OTHER; note = 2'-O-Methyl-adenosine
  modified_base 37: mod_base = OTHER; note = 2'-O-Methyl-uridine
  modified_base 38: mod_base = OTHER; note = 2'-O-Methyl-adenosine
  modified_base 39: mod_base = OTHER; note = 2'-O-Methyl-guanosine
  modified_base 40: mod_base = OTHER; note = 2'-O-Methyl-cytidine
  modified_base 41: mod_base = OTHER; note = 2'-O-Methyl-adenosine
  modified_base 42: mod_base = OTHER; note = Nebularine - ribonebularine
  modified_base 46: mod_base = OTHER; note = 2'-O-Methyl-adenosine
  modified_base 48: mod_base = OTHER; note = 2'-O-Methyl-adenosine
  modified_base 50: mod_base = OTHER; note = 2'-O-Methyl-uridine
  modified_base 52: mod_base = OTHER; note = 2'-O-Methyl-adenosine
  modified_base 53: mod_base = OTHER; note = 2'-O-Methyl-guanosine
  modified_base 54: mod_base = OTHER; note = 2'-O-Methyl-guanosine
  modified_base 55: mod_base = OTHER; note = 2'-O-Methyl-cytidine
  modified_base 56: mod_base = OTHER; note = 2'-O-Methyl-uridine
  modified_base 57: mod_base = OTHER; note = Nebularine - ribonebularine
  modified_base 60: mod_base = OTHER; note = 2'-O-Methyl-cytidine
  modified_base 61: mod_base = OTHER; note = 2'-O-Methyl-cytidine
  modified_base 65: mod_base = OTHER; note = Nebularine - ribonebularine
  modified_base 66: mod_base = OTHER; note = 2'-O-Methyl-uridine
  modified_base 67: mod_base = OTHER; note = 2'-O-Methyl-cytidine
  modified_base 70: mod_base = OTHER; note = 2'-O-Methyl-cytidine
  modified_base 71: mod_base = OTHER; note = 2'-O-Methyl-uridine
  modified_base 72: mod_base = OTHER; note = 2'-O-Methyl-uridine
  modified_base 73: mod_base = OTHER; note = 2'-O-Methyl-guanosine
  modified_base 74: mod_base = OTHER; note = 2'-O-Methyl-adenosine
  modified_base 75: mod_base = OTHER; note = 2'-O-Methyl-adenosine
  modified_base 76: mod_base = OTHER; note = 2'-O-Methyl-adenosine
  modified_base 77: mod_base = OTHER; note = 2'-O-Methyl-adenosine
  modified_base 78: mod_base = OTHER; note = 2'-O-Methyl-adenosine
  modified_base 79: mod_base = OTHER; note = 2'-O-Methyl-guanosine
  modified_base 80: mod_base = OTHER; note = 2'-O-Methyl-uridine
  modified_base 81: mod_base = OTHER; note = 2'-O-Methyl-guanosine
  modified_base 83: mod_base = OTHER; note = 2'-O-Methyl-cytidine
  modified_base 84: mod_base = OTHER; note = 2'-O-Methyl-adenosine
  modified_base 85: mod_base = OTHER; note = 2'-O-Methyl-cytidine
  modified_base 86: mod_base = OTHER; note = 2'-O-Methyl-cytidine
  modified_base 87: mod_base = OTHER; note = 2'-O-Methyl-guanosine
  modified_base 88: mod_base = OTHER; note = 2'-O-Methyl-adenosine
  modified_base 89: mod_base = OTHER; note = 2'-O-Methyl-guanosine
  modified_base 90: mod_base = OTHER; note = 2'-O-Methyl-uridine
  modified_base 91: mod_base = OTHER; note = 2'-O-Methyl-cytidine
  modified_base 92: mod_base = OTHER; note = 2'-O-Methyl-guanosine
  modified_base 93: mod_base = OTHER; note = 2'-O-Methyl-guanosine
  modified_base 94: mod_base = OTHER; note = 2'-O-Methyl-uridine
  modified_base 95: mod_base = OTHER; note = 2'-O-Methyl-guanosine
  modified_base 96: mod_base = OTHER; note = 2'-O-Methyl-cytidine
  modified_base 97: mod_base = OTHER; note = 2'-O-Methyl-uridine
  modified_base 98: mod_base = OTHER; note = 2'-O-Methyl-uridine phosphorothioate
  modified_base 99: mod_base = OTHER; note = 2'-O-Methyl-uridine phosphorothioate
  modified_base 100: mod_base = OTHER; note = 2'-O-Methyl-uridine

SEQ ID NO: 2022 - RNA, 100 nt, synthetic construct; identical to SEQ ID NO: 1915
  source 1..100: mol_type = other RNA; note = Description of Artificial Sequence: Synthetic polynucleotide
  modified_base 1: mod_base = OTHER; note = 2'-O-Methyl-cytidine phosphorothioate
  modified_base 2: mod_base = OTHER; note = 2'-O-Methyl-adenosine phosphorothioate
  modified_base 3: mod_base = OTHER; note = 2'-O-Methyl-guanosine phosphorothioate
  modified_base 14: mod_base = OTHER; note = Nebularine - ribonebularine
  modified_base 21: mod_base = OTHER; note = 2'-O-Methyl-guanosine
  modified_base 28: mod_base = OTHER; note = 2'-O-Methyl-adenosine
  modified_base 29: mod_base = OTHER; note = 2'-O-Methyl-guanosine
  modified_base 30: mod_base = OTHER; note = 2'-O-Methyl-cytidine
  modified_base 31: mod_base = OTHER; note = 2'-O-Methyl-uridine
  modified_base 32: mod_base = OTHER; note = 2'-O-Methyl-adenosine
  modified_base 33: mod_base = OTHER; note = 2'-O-Methyl-guanosine
  modified_base 34: mod_base = OTHER; note = Nebularine - ribonebularine
  modified_base 35: mod_base = OTHER; note = 2'-O-Methyl-adenosine
  modified_base 36: mod_base = OTHER; note = 2'-O-Methyl-adenosine
  modified_base 37: mod_base = OTHER; note = 2'-O-Methyl-uridine
  modified_base 38: mod_base = OTHER; note = 2'-O-Methyl-adenosine
  modified_base 39: mod_base = OTHER; note = 2'-O-Methyl-guanosine
  modified_base 40: mod_base = OTHER; note = 2'-O-Methyl-cytidine
  modified_base 41: mod_base = OTHER; note = 2'-O-Methyl-adenosine
  modified_base 42: mod_base = OTHER; note = 2'-O-Methyl-adenosine
  modified_base 46: mod_base = OTHER; note = 2'-O-Methyl-adenosine
  modified_base 48: mod_base = OTHER; note = 2'-O-Methyl-adenosine
  modified_base 50: mod_base = OTHER; note = 2'-O-Methyl-uridine
  modified_base 52: mod_base = OTHER; note = 2'-O-Methyl-adenosine
  modified_base 53: mod_base = OTHER; note = 2'-O-Methyl-guanosine
  modified_base 54: mod_base = OTHER; note = 2'-O-Methyl-guanosine
  modified_base 55: mod_base = OTHER; note = 2'-O-Methyl-cytidine
  modified_base 56: mod_base = OTHER; note = 2'-O-Methyl-uridine
  modified_base 57: mod_base = OTHER; note = 2'-O-Methyl-adenosine
  modified_base 60: mod_base = OTHER; note = 2'-O-Methyl-cytidine
  modified_base 61: mod_base = OTHER; note = 2'-O-Methyl-cytidine
  modified_base 66: mod_base = OTHER; note = 2'-O-Methyl-uridine
  modified_base 67: mod_base = OTHER; note = 2'-O-Methyl-cytidine
  modified_base 70: mod_base = OTHER; note = 2'-O-Methyl-cytidine
  modified_base 71: mod_base = OTHER; note = 2'-O-Methyl-uridine
  modified_base 72: mod_base = OTHER; note = 2'-O-Methyl-uridine
  modified_base 73: mod_base = OTHER; note = 2'-O-Methyl-guanosine
  modified_base 74: mod_base = OTHER; note = 2'-O-Methyl-adenosine
  modified_base 75: mod_base = OTHER; note = 2'-O-Methyl-adenosine
  modified_base 76: mod_base = OTHER; note = 2'-O-Methyl-adenosine
  modified_base 77: mod_base = OTHER; note = 2'-O-Methyl-adenosine
  modified_base 78: mod_base = OTHER; note = 2'-O-Methyl-adenosine
  modified_base 79: mod_base = OTHER; note = 2'-O-Methyl-guanosine
  modified_base 80: mod_base = OTHER; note = 2'-O-Methyl-uridine
  modified_base 81: mod_base = OTHER; note = 2'-O-Methyl-guanosine
  modified_base 83: mod_base = OTHER; note = 2'-O-Methyl-cytidine
  modified_base 84: mod_base = OTHER; note = 2'-O-Methyl-adenosine
  modified_base 85: mod_base = OTHER; note = 2'-O-Methyl-cytidine
  modified_base 86: mod_base = OTHER; note = 2'-O-Methyl-cytidine
  modified_base 87: mod_base = OTHER; note = 2'-O-Methyl-guanosine
  modified_base 88: mod_base = OTHER; note = 2'-O-Methyl-adenosine
  modified_base 89: mod_base = OTHER; note = 2'-O-Methyl-guanosine
  modified_base 90: mod_base = OTHER; note = 2'-O-Methyl-uridine
  modified_base 91: mod_base = OTHER; note = 2'-O-Methyl-cytidine
  modified_base 92: mod_base = OTHER; note = 2'-O-Methyl-guanosine
  modified_base 93: mod_base = OTHER; note = 2'-O-Methyl-guanosine
  modified_base 94: mod_base = OTHER; note = 2'-O-Methyl-uridine
  modified_base 95: mod_base = OTHER; note = 2'-O-Methyl-guanosine
  modified_base 96: mod_base = OTHER; note = 2'-O-Methyl-cytidine
  modified_base 97: mod_base = OTHER; note = 2'-O-Methyl-uridine
  modified_base 98: mod_base = OTHER; note = 2'-O-Methyl-uridine phosphorothioate
  modified_base 99: mod_base = OTHER; note = 2'-O-Methyl-uridine phosphorothioate
  modified_base 100: mod_base = OTHER; note = 2'-O-Methyl-uridine

SEQ ID NO: 2023 - RNA, 100 nt, synthetic construct; identical to SEQ ID NO: 1916
  source 1..100: mol_type = other RNA; note = Description of Artificial Sequence: Synthetic polynucleotide
  modified_base 1: mod_base = OTHER; note = 2'-O-Methyl-cytidine phosphorothioate
  modified_base 2: mod_base = OTHER; note = 2'-O-Methyl-adenosine phosphorothioate
  modified_base 3: mod_base = OTHER; note = 2'-O-Methyl-guanosine phosphorothioate
  modified_base 14: mod_base = OTHER; note = Nebularine - ribonebularine
  modified_base 21: mod_base = OTHER; note = 2'-O-Methyl-guanosine
  modified_base 28: mod_base = OTHER; note = 2'-O-Methyl-adenosine
  modified_base 29: mod_base = OTHER; note = 2'-O-Methyl-guanosine
  modified_base 30: mod_base = OTHER; note = 2'-O-Methyl-cytidine
  modified_base 31: mod_base = OTHER; note = 2'-O-Methyl-uridine
  modified_base 32: mod_base = OTHER; note = 2'-O-Methyl-adenosine
  modified_base 33: mod_base = OTHER; note = 2'-O-Methyl-guanosine
  modified_base 34: mod_base = OTHER; note = Nebularine - ribonebularine
  modified_base 35: mod_base = OTHER; note = 2'-O-Methyl-adenosine
  modified_base 36: mod_base = OTHER; note = 2'-O-Methyl-adenosine
  modified_base 37: mod_base = OTHER; note = 2'-O-Methyl-uridine
  modified_base 38: mod_base = OTHER; note = 2'-O-Methyl-adenosine
  modified_base 39: mod_base = OTHER; note = 2'-O-Methyl-guanosine
  modified_base 40: mod_base = OTHER; note = 2'-O-Methyl-cytidine
  modified_base 41: mod_base = OTHER; note = 2'-O-Methyl-adenosine
  modified_base 42: mod_base = OTHER; note = 2'-O-Methyl-adenosine
  modified_base 46: mod_base = OTHER; note = 2'-O-Methyl-adenosine
  modified_base 48: mod_base = OTHER; note = 2'-O-Methyl-adenosine
  modified_base 50: mod_base = OTHER; note = 2'-O-Methyl-uridine
  modified_base 52: mod_base = OTHER; note = 2'-O-Methyl-adenosine
  modified_base 53: mod_base = OTHER; note = 2'-O-Methyl-guanosine
  modified_base 54: mod_base = OTHER; note = 2'-O-Methyl-guanosine
  modified_base 55: mod_base = OTHER; note = 2'-O-Methyl-cytidine
  modified_base 56: mod_base = OTHER; note = 2'-O-Methyl-uridine
  modified_base 57: mod_base = OTHER; note = Nebularine - ribonebularine
  modified_base 60: mod_base = OTHER; note = 2'-O-Methyl-cytidine
  modified_base 61: mod_base = OTHER; note = 2'-O-Methyl-cytidine
  modified_base 66: mod_base = OTHER; note = 2'-O-Methyl-uridine
  modified_base 67: mod_base = OTHER; note = 2'-O-Methyl-cytidine
  modified_base 70: mod_base = OTHER; note = 2'-O-Methyl-cytidine
  modified_base 71: mod_base = OTHER; note = 2'-O-Methyl-uridine
  modified_base 72: mod_base = OTHER; note = 2'-O-Methyl-uridine
  modified_base 73: mod_base = OTHER; note = 2'-O-Methyl-guanosine
  modified_base 74: mod_base = OTHER; note = 2'-O-Methyl-adenosine
  modified_base 75: mod_base = OTHER; note = 2'-O-Methyl-adenosine
  modified_base 76: mod_base = OTHER; note = 2'-O-Methyl-adenosine
  modified_base 77: mod_base = OTHER; note = 2'-O-Methyl-adenosine
  modified_base 78: mod_base = OTHER; note = 2'-O-Methyl-adenosine
  modified_base 79: mod_base = OTHER; note = 2'-O-Methyl-guanosine
  modified_base 80: mod_base = OTHER; note = 2'-O-Methyl-uridine
  modified_base 81: mod_base = OTHER; note = 2'-O-Methyl-guanosine
  modified_base 83: mod_base = OTHER; note = 2'-O-Methyl-cytidine
  modified_base 84: mod_base = OTHER; note = 2'-O-Methyl-adenosine
  modified_base 85: mod_base = OTHER; note = 2'-O-Methyl-cytidine
  modified_base 86: mod_base = OTHER; note = 2'-O-Methyl-cytidine
  modified_base 87: mod_base = OTHER; note = 2'-O-Methyl-guanosine
  modified_base 88: mod_base = OTHER; note = 2'-O-Methyl-adenosine
  modified_base 89: mod_base = OTHER; note = 2'-O-Methyl-guanosine
  modified_base 90: mod_base = OTHER; note = 2'-O-Methyl-uridine
  modified_base 91: mod_base = OTHER; note = 2'-O-Methyl-cytidine
  modified_base 92: mod_base = OTHER; note = 2'-O-Methyl-guanosine
  modified_base 93: mod_base = OTHER; note = 2'-O-Methyl-guanosine
  modified_base 94: mod_base = OTHER; note = 2'-O-Methyl-uridine
  modified_base 95: mod_base = OTHER; note = 2'-O-Methyl-guanosine
  modified_base 96: mod_base = OTHER; note = 2'-O-Methyl-cytidine
  modified_base 97: mod_base = OTHER; note = 2'-O-Methyl-uridine
  modified_base 98: mod_base = OTHER; note = 2'-O-Methyl-uridine phosphorothioate
  modified_base 99: mod_base = OTHER; note = 2'-O-Methyl-uridine phosphorothioate
  modified_base 100: mod_base = OTHER; note = 2'-O-Methyl-uridine

SEQ ID NO: 2024 - RNA, 100 nt, synthetic construct; identical to SEQ ID NO: 1917
  source 1..100: mol_type = other RNA; note = Description of Artificial Sequence: Synthetic polynucleotide
  modified_base 1: mod_base = OTHER; note = 2'-O-Methyl-cytidine phosphorothioate
  modified_base 2: mod_base = OTHER; note = 2'-O-Methyl-adenosine phosphorothioate
  modified_base 3: mod_base = OTHER; note = 2'-O-Methyl-guanosine phosphorothioate
  modified_base 14: mod_base = OTHER; note = Nebularine - ribonebularine
  modified_base 21: mod_base = OTHER; note = 2'-O-Methyl-guanosine
  modified_base 28: mod_base = OTHER; note = 2'-O-Methyl-adenosine
  modified_base 29: mod_base = OTHER; note = 2'-O-Methyl-guanosine
  modified_base 30: mod_base = OTHER; note = 2'-O-Methyl-cytidine
  modified_base 31: mod_base = OTHER; note = 2'-O-Methyl-uridine
  modified_base 32: mod_base = OTHER; note = 2'-O-Methyl-adenosine
  modified_base 33: mod_base = OTHER; note = 2'-O-Methyl-guanosine
  modified_base 34: mod_base = OTHER; note = 2'-O-Methyl-adenosine
  modified_base 35: mod_base = OTHER; note = 2'-O-Methyl-adenosine
  modified_base 36: mod_base = OTHER; note = 2'-O-Methyl-adenosine
  modified_base 37: mod_base = OTHER; note = 2'-O-Methyl-uridine
  modified_base 38: mod_base = OTHER; note = 2'-O-Methyl-adenosine
  modified_base 39: mod_base = OTHER; note = 2'-O-Methyl-guanosine
  modified_base 40: mod_base = OTHER; note = 2'-O-Methyl-cytidine
  modified_base 41: mod_base = OTHER; note = 2'-O-Methyl-adenosine
  modified_base 42: mod_base = OTHER; note = 2'-O-Methyl-adenosine
  modified_base 46: mod_base = OTHER; note = 2'-O-Methyl-adenosine
  modified_base 48: mod_base = OTHER; note = 2'-O-Methyl-adenosine
  modified_base 50: mod_base = OTHER; note = 2'-O-Methyl-uridine
  modified_base 52: mod_base = OTHER; note = 2'-O-Methyl-adenosine
  modified_base 53: mod_base = OTHER; note = 2'-O-Methyl-guanosine
  modified_base 54: mod_base = OTHER; note = 2'-O-Methyl-guanosine
  modified_base 55: mod_base = OTHER; note = 2'-O-Methyl-cytidine
  modified_base 56: mod_base = OTHER; note = 2'-O-Methyl-uridine
  modified_base 57: mod_base = OTHER; note = Nebularine - ribonebularine
  modified_base 60: mod_base = OTHER; note = 2'-O-Methyl-cytidine
  modified_base 61: mod_base = OTHER; note = 2'-O-Methyl-cytidine
  modified_base 66: mod_base = OTHER; note = 2'-O-Methyl-uridine
  modified_base 67: mod_base = OTHER; note = 2'-O-Methyl-cytidine
  modified_base 70: mod_base = OTHER; note = 2'-O-Methyl-cytidine
  modified_base 71: mod_base = OTHER; note = 2'-O-Methyl-uridine
  modified_base 72: mod_base = OTHER; note = 2'-O-Methyl-uridine
  modified_base 73: mod_base = OTHER; note = 2'-O-Methyl-guanosine
  modified_base 74: mod_base = OTHER; note = 2'-O-Methyl-adenosine
  modified_base 75: mod_base = OTHER; note = 2'-O-Methyl-adenosine
  modified_base 76: mod_base = OTHER; note = 2'-O-Methyl-adenosine
  modified_base 77: mod_base = OTHER; note = 2'-O-Methyl-adenosine
  modified_base 78: mod_base = OTHER; note = 2'-O-Methyl-adenosine
  modified_base 79: mod_base = OTHER; note = 2'-O-Methyl-guanosine
  modified_base 80: mod_base = OTHER; note = 2'-O-Methyl-uridine
  modified_base 81: mod_base = OTHER; note = 2'-O-Methyl-guanosine
  modified_base 83: mod_base = OTHER; note = 2'-O-Methyl-cytidine
  modified_base 84: mod_base = OTHER; note = 2'-O-Methyl-adenosine
  modified_base 85: mod_base = OTHER; note = 2'-O-Methyl-cytidine
  modified_base 86: mod_base = OTHER; note = 2'-O-Methyl-cytidine
  modified_base 87: mod_base = OTHER; note = 2'-O-Methyl-guanosine
  modified_base 88: mod_base = OTHER; note = 2'-O-Methyl-adenosine
  modified_base 89: mod_base = OTHER; note = 2'-O-Methyl-guanosine
  modified_base 90: mod_base = OTHER; note = 2'-O-Methyl-uridine
  modified_base 91: mod_base = OTHER; note = 2'-O-Methyl-cytidine
  modified_base 92: mod_base = OTHER; note = 2'-O-Methyl-guanosine
  modified_base 93: mod_base = OTHER; note = 2'-O-Methyl-guanosine
  modified_base 94: mod_base = OTHER; note = 2'-O-Methyl-uridine
  modified_base 95: mod_base = OTHER; note = 2'-O-Methyl-guanosine
  modified_base 96: mod_base = OTHER; note = 2'-O-Methyl-cytidine
  modified_base 97: mod_base = OTHER; note = 2'-O-Methyl-uridine
  modified_base 98: mod_base = OTHER; note = 2'-O-Methyl-uridine phosphorothioate
  modified_base 99: mod_base = OTHER; note = 2'-O-Methyl-uridine phosphorothioate
  modified_base 100: mod_base = OTHER; note = 2'-O-Methyl-uridine

SEQ ID NO: 2025 - RNA, 100 nt, synthetic construct; identical to SEQ ID NO: 1918
  source 1..100: mol_type = other RNA; note = Description of Artificial Sequence: Synthetic polynucleotide
  modified_base 1: mod_base = OTHER; note = 2'-O-Methyl-cytidine phosphorothioate
  modified_base 2: mod_base = OTHER; note = 2'-O-Methyl-adenosine phosphorothioate
  modified_base 3: mod_base = OTHER; note = 2'-O-Methyl-guanosine phosphorothioate
  modified_base 14: mod_base = OTHER; note = Nebularine - ribonebularine
  modified_base 21: mod_base = OTHER; note = 2'-O-Methyl-guanosine
  modified_base 28: mod_base = OTHER; note = 2'-O-Methyl-adenosine
  modified_base 29: mod_base = OTHER; note = 2'-O-Methyl-guanosine
  modified_base 30: mod_base = OTHER; note = 2'-O-Methyl-cytidine
  modified_base 31: mod_base = OTHER; note = 2'-O-Methyl-uridine
  modified_base 32: mod_base = OTHER; note = 2'-O-Methyl-adenosine
  modified_base 33: mod_base = OTHER; note = 2'-O-Methyl-guanosine
  modified_base 34: mod_base = OTHER; note = 2'-O-Methyl-adenosine
  modified_base 35: mod_base = OTHER; note = 2'-O-Methyl-adenosine
  modified_base 36: mod_base = OTHER; note = 2'-O-Methyl-adenosine
  modified_base 37: mod_base = OTHER; note = 2'-O-Methyl-uridine
  modified_base 38: mod_base = OTHER; note = 2'-O-Methyl-adenosine
  modified_base 39: mod_base = OTHER; note = 2'-O-Methyl-guanosine
  modified_base 40: mod_base = OTHER; note = 2'-O-Methyl-cytidine
  modified_base 41: mod_base = OTHER; note = 2'-O-Methyl-adenosine
  modified_base 42: mod_base = OTHER; note = 2'-O-Methyl-adenosine
  modified_base 46: mod_base = OTHER; note = 2'-O-Methyl-adenosine
  modified_base 48: mod_base = OTHER; note = 2'-O-Methyl-adenosine
  modified_base 50: mod_base = OTHER; note = 2'-O-Methyl-uridine
  modified_base 52: mod_base = OTHER; note = 2'-O-Methyl-adenosine
  modified_base 53: mod_base = OTHER; note = 2'-O-Methyl-guanosine
  modified_base 54: mod_base = OTHER; note = 2'-O-Methyl-guanosine
  modified_base 55: mod_base = OTHER; note = 2'-O-Methyl-cytidine
  modified_base 56: mod_base = OTHER; note = 2'-O-Methyl-uridine
  modified_base 57: mod_base = OTHER; note = 2'-O-Methyl-adenosine
  modified_base 60: mod_base = OTHER; note = 2'-O-Methyl-cytidine
  modified_base 61: mod_base = OTHER; note = 2'-O-Methyl-cytidine
  modified_base 65: mod_base = OTHER; note = Nebularine - ribonebularine
  modified_base 66: mod_base = OTHER; note = 2'-O-Methyl-uridine
  modified_base 67: mod_base = OTHER; note = 2'-O-Methyl-cytidine
  modified_base 70: mod_base = OTHER; note = 2'-O-Methyl-cytidine
  modified_base 71: mod_base = OTHER; note = 2'-O-Methyl-uridine
  modified_base 72: mod_base = OTHER; note = 2'-O-Methyl-uridine
  modified_base 73: mod_base = OTHER; note = 2'-O-Methyl-guanosine
  modified_base 74: mod_base = OTHER; note = 2'-O-Methyl-adenosine
  modified_base 75: mod_base = OTHER; note = 2'-O-Methyl-adenosine
  modified_base 76: mod_base = OTHER; note = 2'-O-Methyl-adenosine
  modified_base 77: mod_base = OTHER; note = 2'-O-Methyl-adenosine
  modified_base 78: mod_base = OTHER; note = 2'-O-Methyl-adenosine
  modified_base 79: mod_base = OTHER; note = 2'-O-Methyl-guanosine
  modified_base 80: mod_base = OTHER; note = 2'-O-Methyl-uridine
  modified_base 81: mod_base = OTHER; note = 2'-O-Methyl-guanosine
  modified_base 83: mod_base = OTHER; note = 2'-O-Methyl-cytidine
  modified_base 84: mod_base = OTHER; note = 2'-O-Methyl-adenosine
  modified_base 85: mod_base = OTHER; note = 2'-O-Methyl-cytidine
  modified_base 86: mod_base = OTHER; note = 2'-O-Methyl-cytidine
  modified_base 87: mod_base = OTHER; note = 2'-O-Methyl-guanosine
  modified_base 88: mod_base = OTHER; note = 2'-O-Methyl-adenosine
  modified_base 89: mod_base = OTHER; note = 2'-O-Methyl-guanosine
  modified_base 90: mod_base = OTHER; note = 2'-O-Methyl-uridine
  modified_base 91: mod_base = OTHER; note = 2'-O-Methyl-cytidine
  modified_base 92: mod_base = OTHER; note = 2'-O-Methyl-guanosine
  modified_base 93: mod_base = OTHER; note = 2'-O-Methyl-guanosine
  modified_base 94: mod_base = OTHER; note = 2'-O-Methyl-uridine
  modified_base 95: mod_base = OTHER; note = 2'-O-Methyl-guanosine
  modified_base 96: mod_base = OTHER; note = 2'-O-Methyl-cytidine
  modified_base 97: mod_base = OTHER; note = 2'-O-Methyl-uridine
  modified_base 98: mod_base = OTHER; note = 2'-O-Methyl-uridine phosphorothioate
  modified_base 99: mod_base = OTHER; note = 2'-O-Methyl-uridine phosphorothioate
  modified_base 100: mod_base = OTHER; note = 2'-O-Methyl-uridine

SEQ ID NO: 2026 - RNA, 100 nt, synthetic construct; identical to SEQ ID NO: 1919
  source 1..100: mol_type = other RNA; note = Description of Artificial Sequence: Synthetic polynucleotide
  modified_base 1: mod_base = OTHER; note = 2'-O-Methyl-cytidine phosphorothioate
  modified_base 2: mod_base = OTHER; note = 2'-O-Methyl-adenosine phosphorothioate
  modified_base 3: mod_base = OTHER; note = 2'-O-Methyl-guanosine phosphorothioate
  modified_base 14: mod_base = OTHER; note = Nebularine - ribonebularine
  modified_base 21: mod_base = OTHER; note = 2'-O-Methyl-guanosine
  modified_base 28: mod_base = OTHER; note = 2'-O-Methyl-adenosine
  modified_base 29: mod_base = OTHER; note = 2'-O-Methyl-guanosine
  modified_base 30: mod_base = OTHER; note = 2'-O-Methyl-cytidine
  modified_base 31: mod_base = OTHER; note = 2'-O-Methyl-uridine
  modified_base 32: mod_base = OTHER; note = 2'-O-Methyl-adenosine
  modified_base 33: mod_base = OTHER; note = 2'-O-Methyl-guanosine
  modified_base 34: mod_base = OTHER; note = Nebularine - ribonebularine
  modified_base 35: mod_base = OTHER; note = 2'-O-Methyl-adenosine
  modified_base 36: mod_base = OTHER; note = 2'-O-Methyl-adenosine
  modified_base 37: mod_base = OTHER; note = 2'-O-Methyl-uridine
  modified_base 38: mod_base = OTHER; note = 2'-O-Methyl-adenosine
  modified_base 39: mod_base = OTHER; note = 2'-O-Methyl-guanosine
  modified_base 40: mod_base = OTHER; note = 2'-O-Methyl-cytidine
  modified_base 41: mod_base = OTHER; note = 2'-O-Methyl-adenosine
  modified_base 42: mod_base = OTHER; note = 2'-O-Methyl-adenosine
  modified_base 46: mod_base = OTHER; note = 2'-O-Methyl-adenosine
  modified_base 48: mod_base = OTHER; note = 2'-O-Methyl-adenosine
  modified_base 50: mod_base = OTHER; note = 2'-O-Methyl-uridine
  modified_base 52: mod_base = OTHER; note = 2'-O-Methyl-adenosine
  modified_base 53: mod_base = OTHER; note = 2'-O-Methyl-guanosine
  modified_base 54: mod_base = OTHER; note = 2'-O-Methyl-guanosine
  modified_base 55: mod_base = OTHER; note = 2'-O-Methyl-cytidine
  modified_base 56: mod_base = OTHER; note = 2'-O-Methyl-uridine
  modified_base 57: mod_base = OTHER; note = Nebularine - ribonebularine
  modified_base 60: mod_base = OTHER; note = 2'-O-Methyl-cytidine
  modified_base 61: mod_base = OTHER; note = 2'-O-Methyl-cytidine
  modified_base 65: mod_base = OTHER; note = Nebularine - ribonebularine
  modified_base 66: mod_base = OTHER; note = 2'-O-Methyl-uridine
  modified_base 67: mod_base = OTHER; note = 2'-O-Methyl-cytidine
  modified_base 70: mod_base = OTHER; note = 2'-O-Methyl-cytidine
  modified_base 71: mod_base = OTHER; note = 2'-O-Methyl-uridine
  modified_base 72: mod_base = OTHER; note = 2'-O-Methyl-uridine
  modified_base 73: mod_base = OTHER; note = 2'-O-Methyl-guanosine
  modified_base 74: mod_base = OTHER; note = 2'-O-Methyl-adenosine
  modified_base 75: mod_base = OTHER; note = 2'-O-Methyl-adenosine
  modified_base 76: mod_base = OTHER; note = 2'-O-Methyl-adenosine
  modified_base 77: mod_base = OTHER; note = 2'-O-Methyl-adenosine
  modified_base 78: mod_base = OTHER; note = 2'-O-Methyl-adenosine
  modified_base 79: mod_base = OTHER; note = 2'-O-Methyl-guanosine
  modified_base 80: mod_base = OTHER; note = 2'-O-Methyl-uridine
  modified_base 81: mod_base = OTHER; note = 2'-O-Methyl-guanosine
  modified_base 83: mod_base = OTHER; note = 2'-O-Methyl-cytidine
  modified_base 84: mod_base = OTHER; note = 2'-O-Methyl-adenosine
  modified_base 85: mod_base = OTHER; note = 2'-O-Methyl-cytidine
  modified_base 86: mod_base = OTHER; note = 2'-O-Methyl-cytidine
  modified_base 87: mod_base = OTHER; note = 2'-O-Methyl-guanosine
  modified_base 88: mod_base = OTHER; note = 2'-O-Methyl-adenosine
  modified_base 89: mod_base = OTHER; note = 2'-O-Methyl-guanosine
  modified_base 90: mod_base = OTHER; note = 2'-O-Methyl-uridine
  modified_base 91: mod_base = OTHER; note = 2'-O-Methyl-cytidine
  modified_base 92: mod_base = OTHER; note = 2'-O-Methyl-guanosine
  modified_base 93: mod_base = OTHER; note = 2'-O-Methyl-guanosine
  modified_base 94: mod_base = OTHER; note = 2'-O-Methyl-uridine
  modified_base 95: mod_base = OTHER; note = 2'-O-Methyl-guanosine
  modified_base 96: mod_base = OTHER; note = 2'-O-Methyl-cytidine
  modified_base 97: mod_base = OTHER; note = 2'-O-Methyl-uridine
  modified_base 98: mod_base = OTHER; note = 2'-O-Methyl-uridine phosphorothioate
  modified_base 99: mod_base = OTHER; note = 2'-O-Methyl-uridine phosphorothioate
  modified_base 100: mod_base = OTHER; note = 2'-O-Methyl-uridine

SEQ ID NO: 2027 - RNA, 100 nt, synthetic construct; identical to SEQ ID NO: 1920
  source 1..100: mol_type = other RNA; note = Description of Artificial Sequence: Synthetic polynucleotide
  modified_base 1: mod_base = OTHER; note = 2'-O-Methyl-cytidine phosphorothioate
  modified_base 2: mod_base = OTHER; note = 2'-O-Methyl-adenosine phosphorothioate
  modified_base 3: mod_base = OTHER; note = 2'-O-Methyl-guanosine phosphorothioate
  modified_base 14: mod_base = OTHER; note = Nebularine - ribonebularine
  modified_base 21: mod_base = OTHER; note = 2'-O-Methyl-guanosine
  modified_base 28: mod_base = OTHER; note = Nebularine - ribonebularine
  modified_base 29: mod_base = OTHER; note = 2'-O-Methyl-guanosine
  modified_base 30: mod_base = OTHER; note = 2'-O-Methyl-cytidine
  modified_base 31: mod_base = OTHER; note = 2'-O-Methyl-uridine
  modified_base 32: mod_base = OTHER; note = 2'-O-Methyl-adenosine
  modified_base 33: mod_base = OTHER; note = 2'-O-Methyl-guanosine
  modified_base 34: mod_base = OTHER; note = Nebularine - ribonebularine
  modified_base 35: mod_base = OTHER; note = 2'-O-Methyl-adenosine
  modified_base 36: mod_base = OTHER; note = 2'-O-Methyl-adenosine
  modified_base 37: mod_base = OTHER; note = 2'-O-Methyl-uridine
  modified_base 38: mod_base = OTHER; note = 2'-O-Methyl-adenosine
  modified_base 39: mod_base = OTHER; note = 2'-O-Methyl-guanosine
  modified_base 40: mod_base = OTHER; note = 2'-O-Methyl-cytidine
  modified_base 41: mod_base = OTHER; note = 2'-O-Methyl-adenosine
  modified_base 42: mod_base = OTHER; note = Nebularine - ribonebularine
  modified_base 46: mod_base = OTHER; note = 2'-O-Methyl-adenosine
  modified_base 48: mod_base = OTHER; note = 2'-O-Methyl-adenosine
  modified_base 50: mod_base = OTHER; note = 2'-O-Methyl-uridine
  modified_base 52: mod_base = OTHER; note = 2'-O-Methyl-adenosine
  modified_base 53: mod_base = OTHER; note = 2'-O-Methyl-guanosine
  modified_base 54: mod_base = OTHER; note = 2'-O-Methyl-guanosine
  modified_base 55: mod_base = OTHER; note = 2'-O-Methyl-cytidine
  modified_base 56: mod_base = OTHER; note = 2'-O-Methyl-uridine
  modified_base 57: mod_base = OTHER; note = Nebularine - ribonebularine
  modified_base 60: mod_base = OTHER; note = 2'-O-Methyl-cytidine
  modified_base 61: mod_base = OTHER; note = 2'-O-Methyl-cytidine
  modified_base 65: mod_base = OTHER; note = Nebularine - ribonebularine
  modified_base 66: mod_base = OTHER; note = 2'-O-Methyl-uridine
  modified_base 67: mod_base = OTHER; note = 2'-O-Methyl-cytidine
  modified_base 70: mod_base = OTHER; note = 2'-O-Methyl-cytidine
  modified_base 71: mod_base = OTHER; note = 2'-O-Methyl-uridine
  modified_base 72: mod_base = OTHER; note = 2'-O-Methyl-uridine
  modified_base 73: mod_base = OTHER; note = 2'-O-Methyl-guanosine
  modified_base 74: mod_base = OTHER; note = 2'-O-Methyl-adenosine
  modified_base 75: mod_base = OTHER; note = 2'-O-Methyl-adenosine
  modified_base 76: mod_base = OTHER; note = 2'-O-Methyl-adenosine
  modified_base 77: mod_base = OTHER; note = 2'-O-Methyl-adenosine
  modified_base 78: mod_base = OTHER; note = 2'-O-Methyl-adenosine
  modified_base 79: mod_base = OTHER; note = 2'-O-Methyl-guanosine
  modified_base 80: mod_base = OTHER; note = 2'-O-Methyl-uridine
  modified_base 81: mod_base = OTHER; note = 2'-O-Methyl-guanosine
  modified_base 83: mod_base = OTHER; note = 2'-O-Methyl-cytidine
  modified_base 84: mod_base = OTHER; note = 2'-O-Methyl-adenosine
  modified_base 85: mod_base = OTHER; note = 2'-O-Methyl-cytidine
  modified_base 86: mod_base = OTHER; note = 2'-O-Methyl-cytidine
  modified_base 87: mod_base = OTHER; note = 2'-O-Methyl-guanosine
  modified_base 88: mod_base = OTHER; note = 2'-O-Methyl-adenosine
  modified_base 89: mod_base = OTHER; note = 2'-O-Methyl-guanosine
  modified_base 90: mod_base = OTHER; note = 2'-O-Methyl-uridine
  modified_base 91: mod_base = OTHER; note = 2'-O-Methyl-cytidine
  modified_base 92: mod_base = OTHER; note = 2'-O-Methyl-guanosine
  modified_base 93: mod_base = OTHER; note = 2'-O-Methyl-guanosine
  modified_base 94: mod_base = OTHER; note = 2'-O-Methyl-uridine
  modified_base 95: mod_base = OTHER; note = 2'-O-Methyl-guanosine
  modified_base 96: mod_base = OTHER; note = 2'-O-Methyl-cytidine
  modified_base 97: mod_base = OTHER; note = 2'-O-Methyl-uridine
  modified_base 98: mod_base = OTHER; note = 2'-O-Methyl-uridine phosphorothioate
  modified_base 99: mod_base = OTHER; note = 2'-O-Methyl-uridine phosphorothioate
  modified_base 100: mod_base = OTHER; note = 2'-O-Methyl-uridine

SEQ ID NO: 2028 - RNA, 100 nt, synthetic construct; identical to SEQ ID NO: 1921
  source 1..100: mol_type = other RNA; note = Description of Artificial Sequence: Synthetic polynucleotide
  modified_base 1: mod_base = OTHER; note = 2'-O-Methyl-cytidine phosphorothioate
  modified_base 2: mod_base = OTHER; note = 2'-O-Methyl-adenosine phosphorothioate
  modified_base 3: mod_base = OTHER; note = 2'-O-Methyl-guanosine phosphorothioate
  modified_base 9: mod_base = OTHER; note = Nebularine - ribonebularine
  modified_base 14: mod_base = OTHER; note = Nebularine - ribonebularine
  modified_base 21: mod_base = OTHER; note = 2'-O-Methyl-guanosine
  modified_base 28: mod_base = OTHER; note = Nebularine - 2'-O-methylnebularine
  modified_base 29: mod_base = OTHER; note = 2'-O-Methyl-guanosine
  modified_base 30: mod_base = OTHER; note = 2'-O-Methyl-cytidine
  modified_base 31: mod_base = OTHER; note = 2'-O-Methyl-uridine
  modified_base 32: mod_base = OTHER; note = 2'-O-Methyl-adenosine
  modified_base 33: mod_base = OTHER; note = 2'-O-Methyl-guanosine
  modified_base 34: mod_base = OTHER; note = Nebularine - 2'-O-methylnebularine
  modified_base 35: mod_base = OTHER; note = 2'-O-Methyl-adenosine
  modified_base 36: mod_base = OTHER; note = 2'-O-Methyl-adenosine
  modified_base 37: mod_base = OTHER; note = 2'-O-Methyl-uridine
  modified_base 38: mod_base = OTHER; note = 2'-O-Methyl-adenosine
  modified_base 39: mod_base = OTHER; note = 2'-O-Methyl-guanosine
  modified_base 40: mod_base = OTHER; note = 2'-O-Methyl-cytidine
  modified_base 41: mod_base = OTHER; note = 2'-O-Methyl-adenosine
  modified_base 42: mod_base = OTHER; note = Nebularine - 2'-O-methylnebularine
  modified_base 46: mod_base = OTHER; note = 2'-O-Methyl-adenosine
  modified_base 48: mod_base = OTHER; note = 2'-O-Methyl-adenosine
  modified_base 50: mod_base = OTHER; note = 2'-O-Methyl-uridine
  modified_base 52: mod_base = OTHER; note = 2'-O-Methyl-adenosine
  modified_base 53: mod_base = OTHER; note = 2'-O-Methyl-guanosine
  modified_base 54: mod_base = OTHER; note = 2'-O-Methyl-guanosine
  modified_base 55: mod_base = OTHER; note = 2'-O-Methyl-cytidine
  modified_base 56: mod_base = OTHER; note = 2'-O-Methyl-uridine
  modified_base 57: mod_base = OTHER; note = Nebularine - 2'-O-methylnebularine
  modified_base 60: mod_base = OTHER; note = 2'-O-Methyl-cytidine
  modified_base 61: mod_base = OTHER; note = 2'-O-Methyl-cytidine
  modified_base 66: mod_base = OTHER; note = 2'-O-Methyl-uridine
  modified_base 67: mod_base = OTHER; note = 2'-O-Methyl-cytidine
  modified_base 70: mod_base = OTHER; note = 2'-O-Methyl-cytidine
  modified_base 71: mod_base = OTHER; note = 2'-O-Methyl-uridine
  modified_base 72: mod_base = OTHER; note = 2'-O-Methyl-uridine
  modified_base 73: mod_base = OTHER; note = 2'-O-Methyl-guanosine
  modified_base 74: mod_base = OTHER; note = 2'-O-Methyl-adenosine
  modified_base 75: mod_base = OTHER; note = 2'-O-Methyl-adenosine
  modified_base 76: mod_base = OTHER; note = 2'-O-Methyl-adenosine
  modified_base 77: mod_base = OTHER; note = 2'-O-Methyl-adenosine
  modified_base 78: mod_base = OTHER; note = 2'-O-Methyl-adenosine
  modified_base 79: mod_base = OTHER; note = 2'-O-Methyl-guanosine
  modified_base 80: mod_base = OTHER; note = 2'-O-Methyl-uridine
  modified_base 81: mod_base = OTHER; note = 2'-O-Methyl-guanosine
  modified_base 83: mod_base = OTHER; note = 2'-O-Methyl-cytidine
  modified_base 84: mod_base = OTHER; note = 2'-O-Methyl-adenosine
  modified_base 85: mod_base = OTHER; note = 2'-O-Methyl-cytidine
  modified_base 86: mod_base = OTHER; note = 2'-O-Methyl-cytidine
  modified_base 87: mod_base = OTHER; note = 2'-O-Methyl-guanosine
  modified_base 88: mod_base = OTHER; note = 2'-O-Methyl-adenosine
  modified_base 89: mod_base = OTHER; note = 2'-O-Methyl-guanosine
  modified_base 90: mod_base = OTHER; note = 2'-O-Methyl-uridine
  modified_base 91: mod_base = OTHER; note = 2'-O-Methyl-cytidine
  modified_base 92: mod_base = OTHER; note = 2'-O-Methyl-guanosine
  modified_base 93: mod_base = OTHER; note = 2'-O-Methyl-guanosine
  modified_base 94: mod_base = OTHER; note = 2'-O-Methyl-uridine
  modified_base 95: mod_base = OTHER; note = 2'-O-Methyl-guanosine
  modified_base 96: mod_base = OTHER; note = 2'-O-Methyl-cytidine
  modified_base 97: mod_base = OTHER; note = 2'-O-Methyl-uridine
  modified_base 98: mod_base = OTHER; note = 2'-O-Methyl-uridine phosphorothioate
  modified_base 99: mod_base = OTHER; note = 2'-O-Methyl-uridine phosphorothioate
  modified_base 100: mod_base = OTHER; note = 2'-O-Methyl-uridine

SEQ ID NO: 2029 - RNA, 100 nt, synthetic construct; identical to SEQ ID NO: 1922
  source 1..100: mol_type = other RNA; note = Description of Artificial Sequence: Synthetic polynucleotide
  modified_base 1: mod_base = OTHER; note = 2'-O-Methyl-cytidine phosphorothioate
  modified_base 2: mod_base = OTHER; note = 2'-O-Methyl-adenosine phosphorothioate
  modified_base 3: mod_base = OTHER; note = 2'-O-Methyl-guanosine phosphorothioate
  modified_base 9: mod_base = OTHER; note = Nebularine - ribonebularine
  modified_base 14: mod_base = OTHER; note = Nebularine - ribonebularine
  modified_base 21: mod_base = OTHER; note = 2'-O-Methyl-guanosine
  modified_base 28: mod_base = OTHER; note = 2'-O-Methyl-adenosine
  modified_base 29: mod_base = OTHER; note = 2'-O-Methyl-guanosine
  modified_base 30: mod_base = OTHER; note = 2'-O-Methyl-cytidine
  modified_base 31: mod_base = OTHER; note = 2'-O-Methyl-uridine
  modified_base 32: mod_base = OTHER; note = 2'-O-Methyl-adenosine
  modified_base 33: mod_base = OTHER; note = 2'-O-Methyl-guanosine
  modified_base 34: mod_base = OTHER; note = Nebularine - 2'-O-methylnebularine
  modified_base 35: mod_base = OTHER; note = 2'-O-Methyl-adenosine
  modified_base 36: mod_base = OTHER; note = 2'-O-Methyl-adenosine
  modified_base 37: mod_base = OTHER; note = 2'-O-Methyl-uridine
  modified_base 38: mod_base = OTHER; note = 2'-O-Methyl-adenosine
  modified_base 39: mod_base = OTHER; note = 2'-O-Methyl-guanosine
  modified_base 40: mod_base = OTHER; note = 2'-O-Methyl-cytidine
  modified_base 41: mod_base = OTHER; note = 2'-O-Methyl-adenosine
  modified_base 42: mod_base = OTHER; note = Nebularine - 2'-O-methylnebularine
  modified_base 46: mod_base = OTHER; note = 2'-O-Methyl-adenosine
  modified_base 48: mod_base = OTHER; note = 2'-O-Methyl-adenosine
  modified_base 50: mod_base = OTHER; note = 2'-O-Methyl-uridine
  modified_base 52: mod_base = OTHER; note = 2'-O-Methyl-adenosine
  modified_base 53: mod_base = OTHER; note = 2'-O-Methyl-guanosine
  modified_base 54: mod_base = OTHER; note = 2'-O-Methyl-guanosine
  modified_base 55: mod_base = OTHER; note = 2'-O-Methyl-cytidine
  modified_base 56: mod_base = OTHER; note = 2'-O-Methyl-uridine
  modified_base 57: mod_base = OTHER; note = Nebularine - 2'-O-methylnebularine
  modified_base 60: mod_base = OTHER; note = 2'-O-Methyl-cytidine
  modified_base 61: mod_base = OTHER; note = 2'-O-Methyl-cytidine
  modified_base 66: mod_base = OTHER; note = 2'-O-Methyl-uridine
  modified_base 67: mod_base = OTHER; note = 2'-O-Methyl-cytidine
  modified_base 70: mod_base = OTHER; note = 2'-O-Methyl-cytidine
  modified_base 71: mod_base = OTHER; note = 2'-O-Methyl-uridine
  modified_base 72: mod_base = OTHER; note = 2'-O-Methyl-uridine
  modified_base 73: mod_base = OTHER; note = 2'-O-Methyl-guanosine
  modified_base 74: mod_base = OTHER; note = 2'-O-Methyl-adenosine
  modified_base 75: mod_base = OTHER; note = 2'-O-Methyl-adenosine
  modified_base 76: mod_base = OTHER; note = 2'-O-Methyl-adenosine
  modified_base 77: mod_base = OTHER; note = 2'-O-Methyl-adenosine
  modified_base 78: mod_base = OTHER; note = 2'-O-Methyl-adenosine
  modified_base 79: mod_base = OTHER; note = 2'-O-Methyl-guanosine
  modified_base 80: mod_base = OTHER; note = 2'-O-Methyl-uridine
  modified_base 81: mod_base = OTHER; note = 2'-O-Methyl-guanosine
  modified_base 83: mod_base = OTHER; note = 2'-O-Methyl-cytidine
  modified_base 84: mod_base = OTHER; note = 2'-O-Methyl-adenosine
  modified_base 85: mod_base = OTHER; note = 2'-O-Methyl-cytidine
  modified_base 86: mod_base = OTHER; note = 2'-O-Methyl-cytidine
  modified_base 87: mod_base = OTHER; note = 2'-O-Methyl-guanosine
  modified_base 88: mod_base = OTHER; note = 2'-O-Methyl-adenosine
  modified_base 89: mod_base = OTHER; note = 2'-O-Methyl-guanosine
  modified_base 90: mod_base = OTHER; note = 2'-O-Methyl-uridine
  modified_base 91: mod_base = OTHER; note = 2'-O-Methyl-cytidine
  modified_base 92: mod_base = OTHER; note = 2'-O-Methyl-guanosine
  modified_base 93: mod_base = OTHER; note = 2'-O-Methyl-guanosine
  modified_base 94: mod_base = OTHER; note = 2'-O-Methyl-uridine
  modified_base 95: mod_base = OTHER; note = 2'-O-Methyl-guanosine
  modified_base 96: mod_base = OTHER; note = 2'-O-Methyl-cytidine
  modified_base 97: mod_base = OTHER; note = 2'-O-Methyl-uridine
  modified_base 98: mod_base = OTHER; note = 2'-O-Methyl-uridine phosphorothioate
  modified_base 99: mod_base = OTHER; note = 2'-O-Methyl-uridine phosphorothioate
  modified_base 100: mod_base = OTHER; note = 2'-O-Methyl-uridine

SEQ ID NO: 2030 - RNA, 100 nt, synthetic construct; identical to SEQ ID NO: 1923
  source 1..100: mol_type = other RNA; note = Description of Artificial Sequence: Synthetic polynucleotide
  modified_base 1: mod_base = OTHER; note = 2'-O-Methyl-cytidine phosphorothioate
  modified_base 2: mod_base = OTHER; note = 2'-O-Methyl-adenosine phosphorothioate
  modified_base 3: mod_base = OTHER; note = 2'-O-Methyl-guanosine phosphorothioate
  modified_base 9: mod_base = OTHER; note = Nebularine - ribonebularine
  modified_base 14: mod_base = OTHER; note = Nebularine - ribonebularine
  modified_base 21: mod_base = OTHER; note = 2'-O-Methyl-guanosine
  modified_base 28: mod_base = OTHER; note = 2'-O-Methyl-adenosine
  modified_base 29: mod_base = OTHER; note = 2'-O-Methyl-guanosine
  modified_base 30: mod_base = OTHER; note = 2'-O-Methyl-cytidine
  modified_base 31: mod_base = OTHER; note = 2'-O-Methyl-uridine
  modified_base 32: mod_base = OTHER; note = 2'-O-Methyl-adenosine
  modified_base 33: mod_base = OTHER; note = 2'-O-Methyl-guanosine
  modified_base 34: mod_base = OTHER; note = 2'-O-Methyl-adenosine
  modified_base 35: mod_base = OTHER; note = 2'-O-Methyl-adenosine
  modified_base 36: mod_base = OTHER; note = 2'-O-Methyl-adenosine
  modified_base 37: mod_base = OTHER; note = 2'-O-Methyl-uridine
  modified_base 38: mod_base = OTHER; note = 2'-O-Methyl-adenosine
  modified_base 39: mod_base = OTHER; note = 2'-O-Methyl-guanosine
  modified_base 40: mod_base = OTHER; note = 2'-O-Methyl-cytidine
  modified_base 41: mod_base = OTHER; note = 2'-O-Methyl-adenosine
  modified_base 42: mod_base = OTHER; note = Nebularine - 2'-O-methylnebularine
  modified_base 46: mod_base = OTHER; note = 2'-O-Methyl-adenosine
  modified_base 48: mod_base = OTHER; note = 2'-O-Methyl-adenosine
  modified_base 50: mod_base = OTHER; note = 2'-O-Methyl-uridine
  modified_base 52: mod_base = OTHER; note = 2'-O-Methyl-adenosine
  modified_base 53: mod_base = OTHER; note = 2'-O-Methyl-guanosine
  modified_base 54: mod_base = OTHER; note = 2'-O-Methyl-guanosine
  modified_base 55: mod_base = OTHER; note = 2'-O-Methyl-cytidine
  modified_base 56: mod_base = OTHER; note = 2'-O-Methyl-uridine
  modified_base 57: mod_base = OTHER; note = Nebularine - 2'-O-methylnebularine
  modified_base 60: mod_base = OTHER; note = 2'-O-Methyl-cytidine
  modified_base 61: mod_base = OTHER; note = 2'-O-Methyl-cytidine
  modified_base 66: mod_base = OTHER; note = 2'-O-Methyl-uridine
  modified_base 67: mod_base = OTHER; note = 2'-O-Methyl-cytidine
  modified_base 70: mod_base = OTHER; note = 2'-O-Methyl-cytidine
  modified_base 71: mod_base = OTHER; note = 2'-O-Methyl-uridine
  modified_base 72: mod_base = OTHER; note = 2'-O-Methyl-uridine
  modified_base 73: mod_base = OTHER; note = 2'-O-Methyl-guanosine
  modified_base 74: mod_base = OTHER; note = 2'-O-Methyl-adenosine
  modified_base 75: mod_base = OTHER; note = 2'-O-Methyl-adenosine
  modified_base 76: mod_base = OTHER; note = 2'-O-Methyl-adenosine
  modified_base 77: mod_base = OTHER; note = 2'-O-Methyl-adenosine
  modified_base 78: mod_base = OTHER; note = 2'-O-Methyl-adenosine
  modified_base 79: mod_base = OTHER; note = 2'-O-Methyl-guanosine
  modified_base 80: mod_base = OTHER; note = 2'-O-Methyl-uridine
  modified_base 81: mod_base = OTHER; note = 2'-O-Methyl-guanosine
  modified_base 83: mod_base = OTHER; note = 2'-O-Methyl-cytidine
  modified_base 84: mod_base = OTHER; note = 2'-O-Methyl-adenosine
  modified_base 85: mod_base = OTHER; note = 2'-O-Methyl-cytidine
  modified_base 86: mod_base = OTHER; note = 2'-O-Methyl-cytidine
  modified_base 87: mod_base = OTHER; note = 2'-O-Methyl-guanosine
  modified_base 88: mod_base = OTHER; note = 2'-O-Methyl-adenosine
  modified_base 89: mod_base = OTHER; note = 2'-O-Methyl-guanosine
  modified_base 90: mod_base = OTHER; note = 2'-O-Methyl-uridine
  modified_base 91: mod_base = OTHER; note = 2'-O-Methyl-cytidine
  modified_base 92: mod_base = OTHER; note = 2'-O-Methyl-guanosine
  modified_base 93: mod_base = OTHER; note = 2'-O-Methyl-guanosine
  modified_base 94: mod_base = OTHER; note = 2'-O-Methyl-uridine
  modified_base 95: mod_base = OTHER; note = 2'-O-Methyl-guanosine
  modified_base 96: mod_base = OTHER; note = 2'-O-Methyl-cytidine
  modified_base 97: mod_base = OTHER; note = 2'-O-Methyl-uridine
  modified_base 98: mod_base = OTHER; note = 2'-O-Methyl-uridine phosphorothioate
  modified_base 99: mod_base = OTHER; note = 2'-O-Methyl-uridine phosphorothioate
  modified_base 100: mod_base = OTHER; note = 2'-O-Methyl-uridine

SEQ ID NO: 2031 - RNA, 100 nt, synthetic construct; identical to SEQ ID NO: 1924
  source 1..100: mol_type = other RNA; note = Description of Artificial Sequence: Synthetic polynucleotide
  modified_base 1: mod_base = OTHER; note = 2'-O-Methyl-cytidine phosphorothioate
  modified_base 2: mod_base = OTHER; note = 2'-O-Methyl-adenosine phosphorothioate
  modified_base 3: mod_base = OTHER; note = 2'-O-Methyl-guanosine phosphorothioate
  modified_base 9: mod_base = OTHER; note = Nebularine - ribonebularine
  modified_base 14: mod_base = OTHER; note = Nebularine - ribonebularine
  modified_base 21: mod_base = OTHER; note = 2'-O-Methyl-guanosine
  modified_base 28: mod_base = OTHER; note = 2'-O-Methyl-adenosine
  modified_base 29: mod_base = OTHER; note = 2'-O-Methyl-guanosine
  modified_base 30: mod_base = OTHER; note = 2'-O-Methyl-cytidine
  modified_base 31: mod_base = OTHER; note = 2'-O-Methyl-uridine
  modified_base 32: mod_base = OTHER; note = 2'-O-Methyl-adenosine
  modified_base 33: mod_base = OTHER; note = 2'-O-Methyl-guanosine
  modified_base 34: mod_base = OTHER; note = 2'-O-Methyl-adenosine
  modified_base 35: mod_base = OTHER; note = 2'-O-Methyl-adenosine
  modified_base 36: mod_base = OTHER; note = 2'-O-Methyl-adenosine
  modified_base 37: mod_base = OTHER; note = 2'-O-Methyl-uridine
  modified_base 38: mod_base = OTHER; note = 2'-O-Methyl-adenosine
  modified_base 39: mod_base = OTHER; note = 2'-O-Methyl-guanosine
  modified_base 40: mod_base = OTHER; note = 2'-O-Methyl-cytidine
  modified_base 41: mod_base = OTHER; note = 2'-O-Methyl-adenosine
  modified_base 42: mod_base = OTHER; note = 2'-O-Methyl-adenosine
  modified_base 46: mod_base = OTHER; note = 2'-O-Methyl-adenosine
  modified_base 48: mod_base = OTHER; note = 2'-O-Methyl-adenosine
  modified_base 50: mod_base = OTHER; note = 2'-O-Methyl-uridine
  modified_base 52: mod_base = OTHER; note = 2'-O-Methyl-adenosine
  modified_base 53: mod_base = OTHER; note = 2'-O-Methyl-guanosine
  modified_base 54: mod_base = OTHER; note = 2'-O-Methyl-guanosine
  modified_base 55: mod_base = OTHER; note = 2'-O-Methyl-cytidine
  modified_base 56: mod_base = OTHER; note = 2'-O-Methyl-uridine
  modified_base 57: mod_base = OTHER; note = Nebularine - 2'-O-methylnebularine
  modified_base 60: mod_base = OTHER; note = 2'-O-Methyl-cytidine
  modified_base 61: mod_base = OTHER; note = 2'-O-Methyl-cytidine
  modified_base 66: mod_base = OTHER; note = 2'-O-Methyl-uridine
  modified_base 67: mod_base = OTHER; note = 2'-O-Methyl-cytidine
  modified_base 70: mod_base = OTHER; note = 2'-O-Methyl-cytidine
  modified_base 71: mod_base = OTHER; note = 2'-O-Methyl-uridine
  modified_base 72: mod_base = OTHER; note = 2'-O-Methyl-uridine
  modified_base 73: mod_base = OTHER; note = 2'-O-Methyl-guanosine
  modified_base 74: mod_base = OTHER; note = 2'-O-Methyl-adenosine
  modified_base 75: mod_base = OTHER; note = 2'-O-Methyl-adenosine
  modified_base 76: mod_base = OTHER; note = 2'-O-Methyl-adenosine
  modified_base 77: mod_base = OTHER; note = 2'-O-Methyl-adenosine
  modified_base 78: mod_base = OTHER; note = 2'-O-Methyl-adenosine
  modified_base 79: mod_base = OTHER; note = 2'-O-Methyl-guanosine
  modified_base 80: mod_base = OTHER; note = 2'-O-Methyl-uridine
  modified_base 81: mod_base = OTHER; note = 2'-O-Methyl-guanosine
  modified_base 83: mod_base = OTHER; note = 2'-O-Methyl-cytidine
  modified_base 84: mod_base = OTHER; note = 2'-O-Methyl-adenosine
  modified_base 85: mod_base = OTHER; note = 2'-O-Methyl-cytidine
  modified_base 86: mod_base = OTHER; note = 2'-O-Methyl-cytidine
  modified_base 87: mod_base = OTHER; note = 2'-O-Methyl-guanosine
  modified_base 88: mod_base = OTHER; note = 2'-O-Methyl-adenosine
  modified_base 89: mod_base = OTHER; note = 2'-O-Methyl-guanosine
  modified_base 90: mod_base = OTHER; note = 2'-O-Methyl-uridine
  modified_base 91: mod_base = OTHER; note = 2'-O-Methyl-cytidine
  modified_base 92: mod_base = OTHER; note = 2'-O-Methyl-guanosine
  modified_base 93: mod_base = OTHER; note = 2'-O-Methyl-guanosine
  modified_base 94: mod_base = OTHER; note = 2'-O-Methyl-uridine
  modified_base 95: mod_base = OTHER; note = 2'-O-Methyl-guanosine
  modified_base 96: mod_base = OTHER; note = 2'-O-Methyl-cytidine
  modified_base 97: mod_base = OTHER; note = 2'-O-Methyl-uridine
  modified_base 98: mod_base = OTHER; note = 2'-O-Methyl-uridine phosphorothioate
  modified_base 99: mod_base = OTHER; note = 2'-O-Methyl-uridine phosphorothioate
  modified_base 100: mod_base = OTHER; note = 2'-O-Methyl-uridine

SEQ ID NO: 2032 - RNA, 100 nt, synthetic construct; identical to SEQ ID NO: 1925
  source 1..100: mol_type = other RNA; note = Description of Artificial Sequence: Synthetic polynucleotide
  modified_base 1: mod_base = OTHER; note = 2'-O-Methyl-cytidine phosphorothioate
  modified_base 2: mod_base = OTHER; note = 2'-O-Methyl-adenosine phosphorothioate
  modified_base 3: mod_base = OTHER; note = 2'-O-Methyl-guanosine phosphorothioate
  modified_base 9: mod_base = OTHER; note = Nebularine - ribonebularine
  modified_base 14: mod_base = OTHER; note = Nebularine - ribonebularine
  modified_base 21: mod_base = OTHER; note = 2'-O-Methyl-guanosine
  modified_base 28: mod_base = OTHER; note = Nebularine - 2'-O-methylnebularine
  modified_base 29: mod_base = OTHER; note = 2'-O-Methyl-guanosine
  modified_base 30: mod_base = OTHER; note = 2'-O-Methyl-cytidine
  modified_base 31: mod_base = OTHER; note = 2'-O-Methyl-uridine
  modified_base 32: mod_base = OTHER; note = 2'-O-Methyl-adenosine
  modified_base 33: mod_base = OTHER; note = 2'-O-Methyl-guanosine
  modified_base 34: mod_base = OTHER; note = 2'-O-Methyl-adenosine
  modified_base 35: mod_base = OTHER; note = 2'-O-Methyl-adenosine
  modified_base 36: mod_base = OTHER; note = 2'-O-Methyl-adenosine
  modified_base 37: mod_base = OTHER; note = 2'-O-Methyl-uridine
  modified_base 38: mod_base = OTHER; note = 2'-O-Methyl-adenosine
  modified_base 39: mod_base = OTHER; note = 2'-O-Methyl-guanosine
  modified_base 40: mod_base = OTHER; note = 2'-O-Methyl-cytidine
  modified_base 41: mod_base = OTHER; note = 2'-O-Methyl-adenosine
  modified_base 42: mod_base = OTHER; note = 2'-O-Methyl-adenosine
  modified_base 46: mod_base = OTHER; note = 2'-O-Methyl-adenosine
  modified_base 48: mod_base = OTHER; note = 2'-O-Methyl-adenosine
  modified_base 50: mod_base = OTHER; note = 2'-O-Methyl-uridine
  modified_base 52: mod_base = OTHER; note = 2'-O-Methyl-adenosine
  modified_base 53: mod_base = OTHER; note = 2'-O-Methyl-guanosine
  modified_base 54: mod_base = OTHER; note = 2'-O-Methyl-guanosine
  modified_base 55: mod_base = OTHER; note = 2'-O-Methyl-cytidine
  modified_base 56: mod_base = OTHER; note = 2'-O-Methyl-uridine
  modified_base 57: mod_base = OTHER; note = 2'-O-Methyl-adenosine
  modified_base 60: mod_base = OTHER; note = 2'-O-Methyl-cytidine
  modified_base 61: mod_base = OTHER; note = 2'-O-Methyl-cytidine
  modified_base 66: mod_base = OTHER; note = 2'-O-Methyl-uridine
  modified_base 67: mod_base = OTHER; note = 2'-O-Methyl-cytidine
  modified_base 70: mod_base = OTHER; note = 2'-O-Methyl-cytidine
  modified_base 71: mod_base = OTHER; note = 2'-O-Methyl-uridine
  modified_base 72: mod_base = OTHER; note = 2'-O-Methyl-uridine
  modified_base 73: mod_base = OTHER; note = 2'-O-Methyl-guanosine
  modified_base 74: mod_base = OTHER; note = 2'-O-Methyl-adenosine
  modified_base 75: mod_base = OTHER; note = 2'-O-Methyl-adenosine
  modified_base 76: mod_base = OTHER; note = 2'-O-Methyl-adenosine
  modified_base 77: mod_base = OTHER; note = 2'-O-Methyl-adenosine
  modified_base 78: mod_base = OTHER; note = 2'-O-Methyl-adenosine
  modified_base 79: mod_base = OTHER; note = 2'-O-Methyl-guanosine
  modified_base 80: mod_base = OTHER; note = 2'-O-Methyl-uridine
  modified_base 81: mod_base = OTHER; note = 2'-O-Methyl-guanosine
  modified_base 83: mod_base = OTHER; note = 2'-O-Methyl-cytidine
  modified_base 84: mod_base = OTHER; note = 2'-O-Methyl-adenosine
  modified_base 85: mod_base = OTHER; note = 2'-O-Methyl-cytidine
  modified_base 86: mod_base = OTHER; note = 2'-O-Methyl-cytidine
  modified_base 87: mod_base = OTHER; note = 2'-O-Methyl-guanosine
  modified_base 88: mod_base = OTHER; note = 2'-O-Methyl-adenosine
  modified_base 89: mod_base = OTHER; note = 2'-O-Methyl-guanosine
  modified_base 90: mod_base = OTHER; note = 2'-O-Methyl-uridine
  modified_base 91: mod_base = OTHER; note = 2'-O-Methyl-cytidine
  modified_base 92: mod_base = OTHER; note = 2'-O-Methyl-guanosine
  modified_base 93: mod_base = OTHER; note = 2'-O-Methyl-guanosine
  modified_base 94: mod_base = OTHER; note = 2'-O-Methyl-uridine
  modified_base 95: mod_base = OTHER; note = 2'-O-Methyl-guanosine
  modified_base 96: mod_base = OTHER; note = 2'-O-Methyl-cytidine
  modified_base 97: mod_base = OTHER; note = 2'-O-Methyl-uridine
  modified_base 98: mod_base = OTHER; note = 2'-O-Methyl-uridine phosphorothioate
  modified_base 99: mod_base = OTHER; note = 2'-O-Methyl-uridine phosphorothioate
  modified_base 100: mod_base = OTHER; note = 2'-O-Methyl-uridine

SEQ ID NO: 2033 - RNA, 100 nt, synthetic construct; identical to SEQ ID NO: 1926
  source 1..100: mol_type = other RNA; note = Description of Artificial Sequence: Synthetic polynucleotide
  modified_base 1: mod_base = OTHER; note = 2'-O-Methyl-cytidine phosphorothioate
  modified_base 2: mod_base = OTHER; note = 2'-O-Methyl-adenosine phosphorothioate
  modified_base 3: mod_base = OTHER; note = 2'-O-Methyl-guanosine phosphorothioate
  modified_base 9: mod_base = OTHER; note = Nebularine - ribonebularine
  modified_base 14: mod_base = OTHER; note = Nebularine - ribonebularine
  modified_base 21: mod_base = OTHER; note = 2'-O-Methyl-guanosine
  modified_base 28: mod_base = OTHER; note = 2'-O-Methyl-adenosine
  modified_base 29: mod_base = OTHER; note = 2'-O-Methyl-guanosine
  modified_base 30: mod_base = OTHER; note = 2'-O-Methyl-cytidine
  modified_base 31: mod_base = OTHER; note = 2'-O-Methyl-uridine
  modified_base 32: mod_base = OTHER; note = 2'-O-Methyl-adenosine
  modified_base 33: mod_base = OTHER; note = 2'-O-Methyl-guanosine
  modified_base 34: mod_base = OTHER; note = 2'-O-Methyl-adenosine
  modified_base 35: mod_base = OTHER; note = 2'-O-Methyl-adenosine
  modified_base 36: mod_base = OTHER; note = 2'-O-Methyl-adenosine
  modified_base 37: mod_base = OTHER; note = 2'-O-Methyl-uridine
  modified_base 38: mod_base = OTHER; note = 2'-O-Methyl-adenosine
  modified_base 39: mod_base = OTHER; note = 2'-O-Methyl-guanosine
  modified_base 40: mod_base = OTHER; note = 2'-O-Methyl-cytidine
  modified_base 41: mod_base = OTHER; note = 2'-O-Methyl-adenosine
  modified_base 42: mod_base = OTHER; note = Nebularine - 2'-O-methylnebularine
  modified_base 46: mod_base = OTHER; note = 2'-O-Methyl-adenosine
  modified_base 48: mod_base = OTHER; note = 2'-O-Methyl-adenosine
  modified_base 50: mod_base = OTHER; note = 2'-O-Methyl-uridine
  modified_base 52: mod_base = OTHER; note = 2'-O-Methyl-adenosine
  modified_base 53: mod_base = OTHER; note = 2'-O-Methyl-guanosine
  modified_base 54: mod_base = OTHER; note = 2'-O-Methyl-guanosine
  modified_base 55: mod_base = OTHER; note = 2'-O-Methyl-cytidine
  modified_base 56: mod_base = OTHER; note = 2'-O-Methyl-uridine
  modified_base 57: mod_base = OTHER; note = 2'-O-Methyl-adenosine
  modified_base 60: mod_base = OTHER; note = 2'-O-Methyl-cytidine
  modified_base 61: mod_base = OTHER; note = 2'-O-Methyl-cytidine
  modified_base 66: mod_base = OTHER; note = 2'-O-Methyl-uridine
  modified_base 67: mod_base = OTHER; note = 2'-O-Methyl-cytidine
  modified_base 70: mod_base = OTHER; note = 2'-O-Methyl-cytidine
  modified_base 71: mod_base = OTHER; note = 2'-O-Methyl-uridine
  modified_base 72: mod_base = OTHER; note = 2'-O-Methyl-uridine
  modified_base 73: mod_base = OTHER; note = 2'-O-Methyl-guanosine
  modified_base 74: mod_base = OTHER; note = 2'-O-Methyl-adenosine
  modified_base 75: mod_base = OTHER; note = 2'-O-Methyl-adenosine
  modified_base 76: mod_base = OTHER; note = 2'-O-Methyl-adenosine
  modified_base 77: mod_base = OTHER; note = 2'-O-Methyl-adenosine
  modified_base 78: mod_base = OTHER; note = 2'-O-Methyl-adenosine
  modified_base 79: mod_base = OTHER; note = 2'-O-Methyl-guanosine
  modified_base 80: mod_base = OTHER; note = 2'-O-Methyl-uridine
  modified_base 81: mod_base = OTHER; note = 2'-O-Methyl-guanosine
  modified_base 83: mod_base = OTHER; note = 2'-O-Methyl-cytidine
  modified_base 84: mod_base = OTHER; note = 2'-O-Methyl-adenosine
  modified_base 85: mod_base = OTHER; note = 2'-O-Methyl-cytidine
  modified_base 86: mod_base = OTHER; note = 2'-O-Methyl-cytidine
  modified_base 87: mod_base = OTHER; note = 2'-O-Methyl-guanosine
  modified_base 88: mod_base = OTHER; note = 2'-O-Methyl-adenosine
  modified_base 89: mod_base = OTHER; note = 2'-O-Methyl-guanosine
  modified_base 90: mod_base = OTHER; note = 2'-O-Methyl-uridine
  modified_base 91: mod_base = OTHER; note = 2'-O-Methyl-cytidine
  modified_base 92: mod_base = OTHER; note = 2'-O-Methyl-guanosine
  modified_base 93: mod_base = OTHER; note = 2'-O-Methyl-guanosine
  modified_base 94: mod_base = OTHER; note = 2'-O-Methyl-uridine
  modified_base 95: mod_base = OTHER; note = 2'-O-Methyl-guanosine
  modified_base 96: mod_base = OTHER; note = 2'-O-Methyl-cytidine
  modified_base 97: mod_base = OTHER; note = 2'-O-Methyl-uridine
  modified_base 98: mod_base = OTHER; note = 2'-O-Methyl-uridine phosphorothioate
  modified_base 99: mod_base = OTHER; note = 2'-O-Methyl-uridine phosphorothioate
  modified_base 100: mod_base = OTHER; note = 2'-O-Methyl-uridine

SEQ ID NO: 2034 - RNA, 100 nt, synthetic construct; identical to SEQ ID NO: 1927
  source 1..100: mol_type = other RNA; note = Description of Artificial Sequence: Synthetic polynucleotide
  modified_base 1: mod_base = OTHER; note = 2'-O-Methyl-cytidine phosphorothioate
  modified_base 2: mod_base = OTHER; note = 2'-O-Methyl-adenosine phosphorothioate
  modified_base 3: mod_base = OTHER; note = 2'-O-Methyl-guanosine phosphorothioate
  modified_base 9: mod_base = OTHER; note = Nebularine - ribonebularine
  modified_base 14: mod_base = OTHER; note = Nebularine - ribonebularine
  modified_base 21: mod_base = OTHER; note = 2'-O-Methyl-guanosine
  modified_base 28: mod_base = OTHER; note = 2'-O-Methyl-adenosine
  modified_base 29: mod_base = OTHER; note = 2'-O-Methyl-guanosine
  modified_base 30: mod_base = OTHER; note = 2'-O-Methyl-cytidine
  modified_base 31: mod_base = OTHER; note = 2'-O-Methyl-uridine
  modified_base 32: mod_base = OTHER; note = 2'-O-Methyl-adenosine
  modified_base 33: mod_base = OTHER; note = 2'-O-Methyl-guanosine
  modified_base 34: mod_base = OTHER; note = Nebularine - 2'-O-methylnebularine
  modified_base 35: mod_base = OTHER; note = 2'-O-Methyl-adenosine
  modified_base 36: mod_base = OTHER; note = 2'-O-Methyl-adenosine
  modified_base 37: mod_base = OTHER; note = 2'-O-Methyl-uridine
  modified_base 38: mod_base = OTHER; note = 2'-O-Methyl-adenosine
  modified_base 39: mod_base = OTHER; note = 2'-O-Methyl-guanosine
  modified_base 40: mod_base = OTHER; note = 2'-O-Methyl-cytidine
  modified_base 41: mod_base = OTHER; note = 2'-O-Methyl-adenosine
  modified_base 42: mod_base = OTHER; note = Nebularine - 2'-O-methylnebularine
  modified_base 46: mod_base = OTHER; note = 2'-O-Methyl-adenosine
  modified_base 48: mod_base = OTHER; note = 2'-O-Methyl-adenosine
  modified_base 50: mod_base = OTHER; note = 2'-O-Methyl-uridine
  modified_base 52: mod_base = OTHER; note = 2'-O-Methyl-adenosine
  modified_base 53: mod_base = OTHER; note = 2'-O-Methyl-guanosine
  modified_base 54: mod_base = OTHER; note = 2'-O-Methyl-guanosine
  modified_base 55: mod_base = OTHER; note = 2'-O-Methyl-cytidine
  modified_base 56: mod_base = OTHER; note = 2'-O-Methyl-uridine
  modified_base 57: mod_base = OTHER; note = 2'-O-Methyl-adenosine
  modified_base 60: mod_base = OTHER; note = 2'-O-Methyl-cytidine
  modified_base 61: mod_base = OTHER; note = 2'-O-Methyl-cytidine
  modified_base 66: mod_base = OTHER; note = 2'-O-Methyl-uridine
  modified_base 67: mod_base = OTHER; note = 2'-O-Methyl-cytidine
  modified_base 70: mod_base = OTHER; note = 2'-O-Methyl-cytidine
  modified_base 71: mod_base = OTHER; note = 2'-O-Methyl-uridine
  modified_base 72: mod_base = OTHER; note = 2'-O-Methyl-uridine
  modified_base 73: mod_base = OTHER; note = 2'-O-Methyl-guanosine
  modified_base 74: mod_base = OTHER; note = 2'-O-Methyl-adenosine
  modified_base 75: mod_base = OTHER; note = 2'-O-Methyl-adenosine
  modified_base 76: mod_base = OTHER; note = 2'-O-Methyl-adenosine
  modified_base 77: mod_base = OTHER; note = 2'-O-Methyl-adenosine
  modified_base 78: mod_base = OTHER; note = 2'-O-Methyl-adenosine
  modified_base 79: mod_base = OTHER; note = 2'-O-Methyl-guanosine
  modified_base 80: mod_base = OTHER; note = 2'-O-Methyl-uridine
  modified_base 81: mod_base = OTHER; note = 2'-O-Methyl-guanosine
  modified_base 83: mod_base = OTHER; note = 2'-O-Methyl-cytidine
  modified_base 84: mod_base = OTHER; note = 2'-O-Methyl-adenosine
  modified_base 85: mod_base = OTHER; note = 2'-O-Methyl-cytidine
  modified_base 86: mod_base = OTHER; note = 2'-O-Methyl-cytidine
  modified_base 87: mod_base = OTHER; note = 2'-O-Methyl-guanosine
  modified_base 88: mod_base = OTHER; note = 2'-O-Methyl-adenosine
  modified_base 89: mod_base = OTHER; note = 2'-O-Methyl-guanosine
  modified_base 90: mod_base = OTHER; note = 2'-O-Methyl-uridine
  modified_base 91: mod_base = OTHER; note = 2'-O-Methyl-cytidine
  modified_base 92: mod_base = OTHER; note = 2'-O-Methyl-guanosine
  modified_base 93: mod_base = OTHER; note = 2'-O-Methyl-guanosine
  modified_base 94: mod_base = OTHER; note = 2'-O-Methyl-uridine
  modified_base 95: mod_base = OTHER; note = 2'-O-Methyl-guanosine
  modified_base 96: mod_base = OTHER; note = 2'-O-Methyl-cytidine
  modified_base 97: mod_base = OTHER; note = 2'-O-Methyl-uridine
  modified_base 98: mod_base = OTHER; note = 2'-O-Methyl-uridine phosphorothioate
  modified_base 99: mod_base = OTHER; note = 2'-O-Methyl-uridine phosphorothioate
  modified_base 100: mod_base = OTHER; note = 2'-O-Methyl-uridine

SEQ ID NO: 2035 - RNA, 100 nt, synthetic construct; identical to SEQ ID NO: 1928
  source 1..100: mol_type = other RNA; note = Description of Artificial Sequence: Synthetic polynucleotide
  modified_base 1: mod_base = OTHER; note = 2'-O-Methyl-cytidine phosphorothioate
  modified_base 2: mod_base = OTHER; note = 2'-O-Methyl-adenosine phosphorothioate
  modified_base 3: mod_base = OTHER; note = 2'-O-Methyl-guanosine phosphorothioate
  modified_base 14: mod_base = OTHER; note = Nebularine - ribonebularine
  modified_base 21: mod_base = OTHER; note = 2'-O-Methyl-guanosine
  modified_base 28: mod_base = OTHER; note = Nebularine - 2'-O-methylnebularine
  modified_base 29: mod_base = OTHER; note = 2'-O-Methyl-guanosine
  modified_base 30: mod_base = OTHER; note = 2'-O-Methyl-cytidine
  modified_base 31: mod_base = OTHER; note = 2'-O-Methyl-uridine
  modified_base 32: mod_base = OTHER; note = 2'-O-Methyl-adenosine
  modified_base 33: mod_base = OTHER; note = 2'-O-Methyl-guanosine
  modified_base 34: mod_base = OTHER; note = Nebularine - 2'-O-methylnebularine
  modified_base 35: mod_base = OTHER; note = 2'-O-Methyl-adenosine
  modified_base 36: mod_base = OTHER; note = 2'-O-Methyl-adenosine
  modified_base 37: mod_base = OTHER; note = 2'-O-Methyl-uridine
  modified_base 38: mod_base = OTHER; note = 2'-O-Methyl-adenosine
  modified_base 39: mod_base = OTHER; note = 2'-O-Methyl-guanosine
  modified_base 40: mod_base = OTHER; note = 2'-O-Methyl-cytidine
  modified_base 41: mod_base = OTHER; note = 2'-O-Methyl-adenosine
  modified_base 42: mod_base = OTHER; note = Nebularine - 2'-O-methylnebularine
  modified_base 46: mod_base = OTHER; note = 2'-O-Methyl-adenosine
  modified_base 48: mod_base = OTHER; note = 2'-O-Methyl-adenosine
  modified_base 50: mod_base = OTHER; note = 2'-O-Methyl-uridine
  modified_base 52: mod_base = OTHER; note = 2'-O-Methyl-adenosine
  modified_base 53: mod_base = OTHER; note = 2'-O-Methyl-guanosine
  modified_base 54: mod_base = OTHER; note = 2'-O-Methyl-guanosine
  modified_base 55: mod_base = OTHER; note = 2'-O-Methyl-cytidine
  modified_base 56: mod_base = OTHER; note = 2'-O-Methyl-uridine
  modified_base 57: mod_base = OTHER; note = Nebularine - 2'-O-methylnebularine
  modified_base 60: mod_base = OTHER; note = 2'-O-Methyl-cytidine
  modified_base 61: mod_base = OTHER; note = 2'-O-Methyl-cytidine
  modified_base 66: mod_base = OTHER; note = 2'-O-Methyl-uridine
  modified_base 67: mod_base = OTHER; note = 2'-O-Methyl-cytidine
  modified_base 70: mod_base = OTHER; note = 2'-O-Methyl-cytidine
  modified_base 71: mod_base = OTHER; note = 2'-O-Methyl-uridine
  modified_base 72: mod_base = OTHER; note = 2'-O-Methyl-uridine
  modified_base 73: mod_base = OTHER; note = 2'-O-Methyl-guanosine
  modified_base 74: mod_base = OTHER; note = 2'-O-Methyl-adenosine
  modified_base 75: mod_base = OTHER; note = 2'-O-Methyl-adenosine
  modified_base 76: mod_base = OTHER; note = 2'-O-Methyl-adenosine
  modified_base 77: mod_base = OTHER; note = 2'-O-Methyl-adenosine
  modified_base 78: mod_base = OTHER; note = 2'-O-Methyl-adenosine
  modified_base 79: mod_base = OTHER; note = 2'-O-Methyl-guanosine
  modified_base 80: mod_base = OTHER; note = 2'-O-Methyl-uridine
  modified_base 81: mod_base = OTHER; note = 2'-O-Methyl-guanosine
  modified_base 83: mod_base = OTHER; note = 2'-O-Methyl-cytidine
  modified_base 84: mod_base = OTHER; note = 2'-O-Methyl-adenosine
  modified_base 85: mod_base = OTHER; note = 2'-O-Methyl-cytidine
  modified_base 86: mod_base = OTHER; note = 2'-O-Methyl-cytidine
  modified_base 87: mod_base = OTHER; note = 2'-O-Methyl-guanosine
  modified_base 88: mod_base = OTHER; note = 2'-O-Methyl-adenosine
  modified_base 89: mod_base = OTHER; note = 2'-O-Methyl-guanosine
  modified_base 90: mod_base = OTHER; note = 2'-O-Methyl-uridine
  modified_base 91: mod_base = OTHER; note = 2'-O-Methyl-cytidine
  modified_base 92: mod_base = OTHER; note = 2'-O-Methyl-guanosine
  modified_base 93: mod_base = OTHER; note = 2'-O-Methyl-guanosine
  modified_base 94: mod_base = OTHER; note = 2'-O-Methyl-uridine
  modified_base 95: mod_base = OTHER; note = 2'-O-Methyl-guanosine
  modified_base 96: mod_base = OTHER; note = 2'-O-Methyl-cytidine
  modified_base 97: mod_base = OTHER; note = 2'-O-Methyl-uridine
  modified_base 98: mod_base = OTHER; note = 2'-O-Methyl-uridine phosphorothioate
  modified_base 99: mod_base = OTHER; note = 2'-O-Methyl-uridine phosphorothioate
  modified_base 100: mod_base = OTHER; note = 2'-O-Methyl-uridine

SEQ ID NO: 2036 - RNA, 100 nt, synthetic construct; identical to SEQ ID NO: 1929
  source 1..100: mol_type = other RNA; note = Description of Artificial Sequence: Synthetic polynucleotide
  modified_base 1: mod_base = OTHER; note = 2'-O-Methyl-cytidine phosphorothioate
  modified_base 2: mod_base = OTHER; note = 2'-O-Methyl-adenosine phosphorothioate
  modified_base 3: mod_base = OTHER; note = 2'-O-Methyl-guanosine phosphorothioate
  modified_base 14: mod_base = OTHER; note = Nebularine - ribonebularine
  modified_base 21: mod_base = OTHER; note = 2'-O-Methyl-guanosine
  modified_base 28: mod_base = OTHER; note = 2'-O-Methyl-adenosine
  modified_base 29: mod_base = OTHER; note = 2'-O-Methyl-guanosine
  modified_base 30: mod_base = OTHER; note = 2'-O-Methyl-cytidine
  modified_base 31: mod_base = OTHER; note = 2'-O-Methyl-uridine
  modified_base 32: mod_base = OTHER; note = 2'-O-Methyl-adenosine
  modified_base 33: mod_base = OTHER; note = 2'-O-Methyl-guanosine
  modified_base 34: mod_base = OTHER; note = Nebularine - 2'-O-methylnebularine
  modified_base 35: mod_base = OTHER; note = 2'-O-Methyl-adenosine
  modified_base 36: mod_base = OTHER; note = 2'-O-Methyl-adenosine
  modified_base 37: mod_base = OTHER; note = 2'-O-Methyl-uridine
  modified_base 38: mod_base = OTHER; note = 2'-O-Methyl-adenosine
  modified_base 39: mod_base = OTHER; note = 2'-O-Methyl-guanosine
  modified_base 40: mod_base = OTHER; note = 2'-O-Methyl-cytidine
  modified_base 41: mod_base = OTHER; note = 2'-O-Methyl-adenosine
  modified_base 42: mod_base = OTHER; note = Nebularine - 2'-O-methylnebularine
  modified_base 46: mod_base = OTHER; note = 2'-O-Methyl-adenosine
  modified_base 48: mod_base = OTHER; note = 2'-O-Methyl-adenosine
  modified_base 50: mod_base = OTHER; note = 2'-O-Methyl-uridine
  modified_base 52: mod_base = OTHER; note = 2'-O-Methyl-adenosine
  modified_base 53: mod_base = OTHER; note = 2'-O-Methyl-guanosine
  modified_base 54: mod_base = OTHER; note = 2'-O-Methyl-guanosine
  modified_base 55: mod_base = OTHER; note = 2'-O-Methyl-cytidine
  modified_base 56: mod_base = OTHER; note = 2'-O-Methyl-uridine
  modified_base 57: mod_base = OTHER; note = Nebularine - 2'-O-methylnebularine
  modified_base 60: mod_base = OTHER; note = 2'-O-Methyl-cytidine
  modified_base 61: mod_base = OTHER; note = 2'-O-Methyl-cytidine
  modified_base 66: mod_base = OTHER; note = 2'-O-Methyl-uridine
  modified_base 67: mod_base = OTHER; note = 2'-O-Methyl-cytidine
  modified_base 70: mod_base = OTHER; note = 2'-O-Methyl-cytidine
  modified_base 71: mod_base = OTHER; note = 2'-O-Methyl-uridine
  modified_base 72: mod_base = OTHER; note = 2'-O-Methyl-uridine
  modified_base 73: mod_base = OTHER; note = 2'-O-Methyl-guanosine
  modified_base 74: mod_base = OTHER; note = 2'-O-Methyl-adenosine
  modified_base 75: mod_base = OTHER; note = 2'-O-Methyl-adenosine
  modified_base 76: mod_base = OTHER; note = 2'-O-Methyl-adenosine
  modified_base 77: mod_base = OTHER; note = 2'-O-Methyl-adenosine
  modified_base 78: mod_base = OTHER; note = 2'-O-Methyl-adenosine
  modified_base 79: mod_base = OTHER; note = 2'-O-Methyl-guanosine
  modified_base 80: mod_base = OTHER; note = 2'-O-Methyl-uridine
  modified_base 81: mod_base = OTHER; note = 2'-O-Methyl-guanosine
  modified_base 83: mod_base = OTHER; note = 2'-O-Methyl-cytidine
  modified_base 84: mod_base = OTHER; note = 2'-O-Methyl-adenosine
  modified_base 85: mod_base = OTHER; note = 2'-O-Methyl-cytidine
  modified_base 86: mod_base = OTHER; note = 2'-O-Methyl-cytidine
  modified_base 87: mod_base = OTHER; note = 2'-O-Methyl-guanosine
  modified_base 88: mod_base = OTHER; note = 2'-O-Methyl-adenosine
  modified_base 89: mod_base = OTHER; note = 2'-O-Methyl-guanosine
  modified_base 90: mod_base = OTHER; note = 2'-O-Methyl-uridine
  modified_base 91: mod_base = OTHER; note = 2'-O-Methyl-cytidine
  modified_base 92: mod_base = OTHER; note = 2'-O-Methyl-guanosine
  modified_base 93: mod_base = OTHER; note = 2'-O-Methyl-guanosine
  modified_base 94: mod_base = OTHER; note = 2'-O-Methyl-uridine
  modified_base 95: mod_base = OTHER; note = 2'-O-Methyl-guanosine
  modified_base 96: mod_base = OTHER; note = 2'-O-Methyl-cytidine
  modified_base 97: mod_base = OTHER; note = 2'-O-Methyl-uridine
  modified_base 98: mod_base = OTHER; note = 2'-O-Methyl-uridine phosphorothioate
  modified_base 99: mod_base = OTHER; note = 2'-O-Methyl-uridine phosphorothioate
  modified_base 100: mod_base = OTHER; note = 2'-O-Methyl-uridine

SEQ ID NO: 2037 - RNA, 100 nt, synthetic construct; identical to SEQ ID NO: 1930
  source 1..100: mol_type = other RNA; note = Description of Artificial Sequence: Synthetic polynucleotide
  modified_base 1: mod_base = OTHER; note = 2'-O-Methyl-cytidine phosphorothioate
  modified_base 2: mod_base = OTHER; note = 2'-O-Methyl-adenosine phosphorothioate
  modified_base 3: mod_base = OTHER; note = 2'-O-Methyl-guanosine phosphorothioate
  modified_base 14: mod_base = OTHER; note = Nebularine - ribonebularine
  modified_base 21: mod_base = OTHER; note = 2'-O-Methyl-guanosine
  modified_base 28: mod_base = OTHER; note = 2'-O-Methyl-adenosine
  modified_base 29: mod_base = OTHER; note = 2'-O-Methyl-guanosine
  modified_base 30: mod_base = OTHER; note = 2'-O-Methyl-cytidine
  modified_base 31: mod_base = OTHER; note = 2'-O-Methyl-uridine
  modified_base 32: mod_base = OTHER; note = 2'-O-Methyl-adenosine
  modified_base 33: mod_base = OTHER; note = 2'-O-Methyl-guanosine
  modified_base 34: mod_base = OTHER; note = 2'-O-Methyl-adenosine
  modified_base 35: mod_base = OTHER; note = 2'-O-Methyl-adenosine
  modified_base 36: mod_base = OTHER; note = 2'-O-Methyl-adenosine
  modified_base 37: mod_base = OTHER; note = 2'-O-Methyl-uridine
  modified_base 38: mod_base = OTHER; note = 2'-O-Methyl-adenosine
  modified_base 39: mod_base = OTHER; note = 2'-O-Methyl-guanosine
  modified_base 40: mod_base = OTHER; note = 2'-O-Methyl-cytidine
  modified_base 41: mod_base = OTHER; note = 2'-O-Methyl-adenosine
  modified_base 42: mod_base = OTHER; note = Nebularine - 2'-O-methylnebularine
  modified_base 46: mod_base = OTHER; note = 2'-O-Methyl-adenosine
  modified_base 48: mod_base = OTHER; note = 2'-O-Methyl-adenosine
  modified_base 50: mod_base = OTHER; note = 2'-O-Methyl-uridine
  modified_base 52: mod_base = OTHER; note = 2'-O-Methyl-adenosine
  modified_base 53: mod_base = OTHER; note = 2'-O-Methyl-guanosine
  modified_base 54: mod_base = OTHER; note = 2'-O-Methyl-guanosine
  modified_base 55: mod_base = OTHER; note = 2'-O-Methyl-cytidine
  modified_base 56: mod_base = OTHER; note = 2'-O-Methyl-uridine
  modified_base 57: mod_base = OTHER; note = Nebularine - 2'-O-methylnebularine
  modified_base 60: mod_base = OTHER; note = 2'-O-Methyl-cytidine
  modified_base 61: mod_base = OTHER; note = 2'-O-Methyl-cytidine
  modified_base 66: mod_base = OTHER; note = 2'-O-Methyl-uridine
  modified_base 67: mod_base = OTHER; note = 2'-O-Methyl-cytidine
  modified_base 70: mod_base = OTHER; note = 2'-O-Methyl-cytidine
  modified_base 71: mod_base = OTHER; note = 2'-O-Methyl-uridine
  modified_base 72: mod_base = OTHER; note = 2'-O-Methyl-uridine
  modified_base 73: mod_base = OTHER; note = 2'-O-Methyl-guanosine
  modified_base 74: mod_base = OTHER; note = 2'-O-Methyl-adenosine
  modified_base 75: mod_base = OTHER; note = 2'-O-Methyl-adenosine
  modified_base 76: mod_base = OTHER; note = 2'-O-Methyl-adenosine
  modified_base 77: mod_base = OTHER; note = 2'-O-Methyl-adenosine
  modified_base 78: mod_base = OTHER; note = 2'-O-Methyl-adenosine
  modified_base 79: mod_base = OTHER; note = 2'-O-Methyl-guanosine
  modified_base 80: mod_base = OTHER; note = 2'-O-Methyl-uridine
  modified_base 81: mod_base = OTHER; note = 2'-O-Methyl-guanosine
  modified_base 83: mod_base = OTHER; note = 2'-O-Methyl-cytidine
  modified_base 84: mod_base = OTHER; note = 2'-O-Methyl-adenosine
  modified_base 85: mod_base = OTHER; note = 2'-O-Methyl-cytidine
  modified_base 86: mod_base = OTHER; note = 2'-O-Methyl-cytidine
  modified_base 87: mod_base = OTHER; note = 2'-O-Methyl-guanosine
  modified_base 88: mod_base = OTHER; note = 2'-O-Methyl-adenosine
  modified_base 89: mod_base = OTHER; note = 2'-O-Methyl-guanosine
  modified_base 90: mod_base = OTHER; note = 2'-O-Methyl-uridine
  modified_base 91: mod_base = OTHER; note = 2'-O-Methyl-cytidine
  modified_base 92: mod_base = OTHER; note = 2'-O-Methyl-guanosine
  modified_base 93: mod_base = OTHER; note = 2'-O-Methyl-guanosine
  modified_base 94: mod_base = OTHER; note = 2'-O-Methyl-uridine
  modified_base 95: mod_base = OTHER; note = 2'-O-Methyl-guanosine
  modified_base 96: mod_base = OTHER; note = 2'-O-Methyl-cytidine
  modified_base 97: mod_base = OTHER; note = 2'-O-Methyl-uridine
  modified_base 98: mod_base = OTHER; note = 2'-O-Methyl-uridine phosphorothioate
  modified_base 99: mod_base = OTHER; note = 2'-O-Methyl-uridine phosphorothioate
  modified_base 100: mod_base = OTHER; note = 2'-O-Methyl-uridine

SEQ ID NO: 2038 - RNA, 100 nt, synthetic construct; identical to SEQ ID NO: 1931
  source 1..100: mol_type = other RNA; note = Description of Artificial Sequence: Synthetic polynucleotide
  modified_base 1: mod_base = OTHER; note = 2'-O-Methyl-cytidine phosphorothioate
  modified_base 2: mod_base = OTHER; note = 2'-O-Methyl-adenosine phosphorothioate
  modified_base 3: mod_base = OTHER; note = 2'-O-Methyl-guanosine phosphorothioate
  modified_base 14: mod_base = OTHER; note = Nebularine - ribonebularine
  modified_base 21: mod_base = OTHER; note = 2'-O-Methyl-guanosine
  modified_base 28: mod_base = OTHER; note = Nebularine - 2'-O-methylnebularine
  modified_base 29: mod_base = OTHER; note = 2'-O-Methyl-guanosine
  modified_base 30: mod_base = OTHER; note = 2'-O-Methyl-cytidine
  modified_base 31: mod_base = OTHER; note = 2'-O-Methyl-uridine
  modified_base 32: mod_base = OTHER; note = 2'-O-Methyl-adenosine
  modified_base 33: mod_base = OTHER; note = 2'-O-Methyl-guanosine
  modified_base 34: mod_base = OTHER; note = 2'-O-Methyl-adenosine
  modified_base 35: mod_base = OTHER; note = 2'-O-Methyl-adenosine
  modified_base 36: mod_base = OTHER; note = 2'-O-Methyl-adenosine
  modified_base 37: mod_base = OTHER; note = 2'-O-Methyl-uridine
  modified_base 38: mod_base = OTHER; note = 2'-O-Methyl-adenosine
  modified_base 39: mod_base = OTHER; note = 2'-O-Methyl-guanosine
  modified_base 40: mod_base = OTHER; note = 2'-O-Methyl-cytidine
  modified_base 41: mod_base = OTHER; note = 2'-O-Methyl-adenosine
  modified_base 42: mod_base = OTHER; note = 2'-O-Methyl-adenosine
  modified_base 46: mod_base = OTHER; note = 2'-O-Methyl-adenosine
  modified_base 48: mod_base = OTHER; note = 2'-O-Methyl-adenosine
  modified_base 50: mod_base = OTHER; note = 2'-O-Methyl-uridine
  modified_base 52: mod_base = OTHER; note = 2'-O-Methyl-adenosine
  modified_base 53: mod_base = OTHER; note = 2'-O-Methyl-guanosine
  modified_base 54: mod_base = OTHER; note = 2'-O-Methyl-guanosine
  modified_base 55: mod_base = OTHER; note = 2'-O-Methyl-cytidine
  modified_base 56: mod_base = OTHER; note = 2'-O-Methyl-uridine
  modified_base 57: mod_base = OTHER; note = 2'-O-Methyl-adenosine
  modified_base 60: mod_base = OTHER; note = 2'-O-Methyl-cytidine
  modified_base 61: mod_base = OTHER; note = 2'-O-Methyl-cytidine
  modified_base 66: mod_base = OTHER; note = 2'-O-Methyl-uridine
  modified_base 67: mod_base = OTHER; note = 2'-O-Methyl-cytidine
  modified_base 70: mod_base = OTHER; note = 2'-O-Methyl-cytidine
  modified_base 71: mod_base = OTHER; note = 2'-O-Methyl-uridine
  modified_base 72: mod_base = OTHER; note = 2'-O-Methyl-uridine
  modified_base 73: mod_base = OTHER; note = 2'-O-Methyl-guanosine
  modified_base 74: mod_base = OTHER; note = 2'-O-Methyl-adenosine
  modified_base 75: mod_base = OTHER; note = 2'-O-Methyl-adenosine
  modified_base 76: mod_base = OTHER; note = 2'-O-Methyl-adenosine
  modified_base 77: mod_base = OTHER; note = 2'-O-Methyl-adenosine
  modified_base 78: mod_base = OTHER; note = 2'-O-Methyl-adenosine
  modified_base 79: mod_base = OTHER; note = 2'-O-Methyl-guanosine
  modified_base 80: mod_base = OTHER; note = 2'-O-Methyl-uridine
  modified_base 81: mod_base = OTHER; note = 2'-O-Methyl-guanosine
  modified_base 83: mod_base = OTHER; note = 2'-O-Methyl-cytidine
  modified_base 84: mod_base = OTHER; note = 2'-O-Methyl-adenosine
  modified_base 85: mod_base = OTHER; note = 2'-O-Methyl-cytidine
  modified_base 86: mod_base = OTHER; note = 2'-O-Methyl-cytidine
  modified_base 87: mod_base = OTHER; note = 2'-O-Methyl-guanosine
  modified_base 88: mod_base = OTHER; note = 2'-O-Methyl-adenosine
  modified_base 89: mod_base = OTHER; note = 2'-O-Methyl-guanosine
  modified_base 90: mod_base = OTHER; note = 2'-O-Methyl-uridine
  modified_base 91: mod_base = OTHER; note = 2'-O-Methyl-cytidine
  modified_base 92: mod_base = OTHER; note = 2'-O-Methyl-guanosine
  modified_base 93: mod_base = OTHER; note = 2'-O-Methyl-guanosine
  modified_base 94: mod_base = OTHER; note = 2'-O-Methyl-uridine
  modified_base 95: mod_base = OTHER; note = 2'-O-Methyl-guanosine
  modified_base 96: mod_base = OTHER; note = 2'-O-Methyl-cytidine
  modified_base 97: mod_base = OTHER; note = 2'-O-Methyl-uridine
  modified_base 98: mod_base = OTHER; note = 2'-O-Methyl-uridine phosphorothioate
  modified_base 99: mod_base = OTHER; note = 2'-O-Methyl-uridine phosphorothioate
  modified_base 100: mod_base = OTHER; note = 2'-O-Methyl-uridine

SEQ ID NO: 2039 - RNA, 100 nt, synthetic construct; identical to SEQ ID NO: 1932
  source 1..100: mol_type = other RNA; note = Description of Artificial Sequence: Synthetic polynucleotide
  modified_base 1: mod_base = OTHER; note = 2'-O-Methyl-cytidine phosphorothioate
  modified_base 2: mod_base = OTHER; note = 2'-O-Methyl-adenosine phosphorothioate
  modified_base 3: mod_base = OTHER; note = 2'-O-Methyl-guanosine phosphorothioate
  modified_base 14: mod_base = OTHER; note = Nebularine - ribonebularine
  modified_base 21: mod_base = OTHER; note = 2'-O-Methyl-guanosine
  modified_base 28: mod_base = OTHER; note = 2'-O-Methyl-adenosine
  modified_base 29: mod_base = OTHER; note = 2'-O-Methyl-guanosine
  modified_base 30: mod_base = OTHER; note = 2'-O-Methyl-cytidine
  modified_base 31: mod_base = OTHER; note = 2'-O-Methyl-uridine
  modified_base 32: mod_base = OTHER; note = 2'-O-Methyl-adenosine
  modified_base 33: mod_base = OTHER; note = 2'-O-Methyl-guanosine
  modified_base 34: mod_base = OTHER; note = 2'-O-Methyl-adenosine
  modified_base 35: mod_base = OTHER; note = 2'-O-Methyl-adenosine
  modified_base 36: mod_base = OTHER; note = 2'-O-Methyl-adenosine
  modified_base 37: mod_base = OTHER; note = 2'-O-Methyl-uridine
  modified_base 38: mod_base = OTHER; note = 2'-O-Methyl-adenosine
  modified_base 39: mod_base = OTHER; note = 2'-O-Methyl-guanosine
  modified_base 40: mod_base = OTHER; note = 2'-O-Methyl-cytidine
  modified_base 41: mod_base = OTHER; note = 2'-O-Methyl-adenosine
  modified_base 42: mod_base = OTHER; note = Nebularine - 2'-O-methylnebularine
  modified_base 46: mod_base = OTHER; note = 2'-O-Methyl-adenosine
  modified_base 48: mod_base = OTHER; note = 2'-O-Methyl-adenosine
  modified_base 50: mod_base = OTHER; note = 2'-O-Methyl-uridine
  modified_base 52: mod_base = OTHER; note = 2'-O-Methyl-adenosine
  modified_base 53: mod_base = OTHER; note = 2'-O-Methyl-guanosine
  modified_base 54: mod_base = OTHER; note = 2'-O-Methyl-guanosine
  modified_base 55: mod_base = OTHER; note = 2'-O-Methyl-cytidine
  modified_base 56: mod_base = OTHER; note = 2'-O-Methyl-uridine
  modified_base 57: mod_base = OTHER; note = 2'-O-Methyl-adenosine
  modified_base 60: mod_base = OTHER; note = 2'-O-Methyl-cytidine
  modified_base 61: mod_base = OTHER; note = 2'-O-Methyl-cytidine
  modified_base 66: mod_base = OTHER; note = 2'-O-Methyl-uridine
  modified_base 67: mod_base = OTHER; note = 2'-O-Methyl-cytidine
  modified_base 70: mod_base = OTHER; note = 2'-O-Methyl-cytidine
  modified_base 71: mod_base = OTHER; note = 2'-O-Methyl-uridine
  modified_base 72: mod_base = OTHER; note = 2'-O-Methyl-uridine
  modified_base 73: mod_base = OTHER; note = 2'-O-Methyl-guanosine
  modified_base 74: mod_base = OTHER; note = 2'-O-Methyl-adenosine
  modified_base 75: mod_base = OTHER; note = 2'-O-Methyl-adenosine
  modified_base 76: mod_base = OTHER; note = 2'-O-Methyl-adenosine
  modified_base 77: mod_base = OTHER; note = 2'-O-Methyl-adenosine
  modified_base 78: mod_base = OTHER; note = 2'-O-Methyl-adenosine
  modified_base 79: mod_base = OTHER; note = 2'-O-Methyl-guanosine
  modified_base 80: mod_base = OTHER; note = 2'-O-Methyl-uridine
  modified_base 81: mod_base = OTHER; note = 2'-O-Methyl-guanosine
  modified_base 83: mod_base = OTHER; note = 2'-O-Methyl-cytidine
  modified_base 84: mod_base = OTHER; note = 2'-O-Methyl-adenosine
  modified_base 85: mod_base = OTHER; note = 2'-O-Methyl-cytidine
  modified_base 86: mod_base = OTHER; note = 2'-O-Methyl-cytidine
  modified_base 87: mod_base = OTHER; note = 2'-O-Methyl-guanosine
  modified_base 88: mod_base = OTHER; note = 2'-O-Methyl-adenosine
  modified_base 89: mod_base = OTHER; note = 2'-O-Methyl-guanosine
  modified_base 90: mod_base = OTHER; note = 2'-O-Methyl-uridine
  modified_base 91: mod_base = OTHER; note = 2'-O-Methyl-cytidine
  modified_base 92: mod_base = OTHER; note = 2'-O-Methyl-guanosine
  modified_base 93: mod_base = OTHER; note = 2'-O-Methyl-guanosine
  modified_base 94: mod_base = OTHER; note = 2'-O-Methyl-uridine
  modified_base 95: mod_base = OTHER; note = 2'-O-Methyl-guanosine
  modified_base 96: mod_base = OTHER; note = 2'-O-Methyl-cytidine
  modified_base 97: mod_base = OTHER; note = 2'-O-Methyl-uridine
  modified_base 98: mod_base = OTHER; note = 2'-O-Methyl-uridine phosphorothioate
  modified_base 99: mod_base = OTHER; note = 2'-O-Methyl-uridine phosphorothioate
  modified_base 100: mod_base = OTHER; note = 2'-O-Methyl-uridine

SEQ ID NO: 2040 - RNA, 100 nt, synthetic construct; identical to SEQ ID NO: 1933
  source 1..100: mol_type = other RNA; note = Description of Artificial Sequence: Synthetic polynucleotide
  modified_base 1: mod_base = OTHER; note = 2'-O-Methyl-cytidine phosphorothioate
  modified_base 2: mod_base = OTHER; note = 2'-O-Methyl-adenosine phosphorothioate
  modified_base 3: mod_base = OTHER; note = 2'-O-Methyl-guanosine phosphorothioate
  modified_base 14: mod_base = OTHER; note = Nebularine - ribonebularine
  modified_base 21: mod_base = OTHER; note = 2'-O-Methyl-guanosine
  modified_base 28: mod_base = OTHER; note = 2'-O-Methyl-adenosine
  modified_base 29: mod_base = OTHER; note = 2'-O-Methyl-guanosine
  modified_base 30: mod_base = OTHER; note = 2'-O-Methyl-cytidine
  modified_base 31: mod_base = OTHER; note = 2'-O-Methyl-uridine
  modified_base 32: mod_base = OTHER; note = 2'-O-Methyl-adenosine
  modified_base 33: mod_base = OTHER; note = 2'-O-Methyl-guanosine
  modified_base 34: mod_base = OTHER; note = Nebularine - 2'-O-methylnebularine
  modified_base 35: mod_base = OTHER; note = 2'-O-Methyl-adenosine
  modified_base 36: mod_base = OTHER; note = 2'-O-Methyl-adenosine
  modified_base 37: mod_base = OTHER; note = 2'-O-Methyl-uridine
  modified_base 38: mod_base = OTHER; note = 2'-O-Methyl-adenosine
  modified_base 39: mod_base = OTHER; note = 2'-O-Methyl-guanosine
  modified_base 40: mod_base = OTHER; note = 2'-O-Methyl-cytidine
  modified_base 41: mod_base = OTHER; note = 2'-O-Methyl-adenosine
  modified_base 42: mod_base = OTHER; note = Nebularine - 2'-O-methylnebularine
  modified_base 46: mod_base = OTHER; note = 2'-O-Methyl-adenosine
  modified_base 48: mod_base = OTHER; note = 2'-O-Methyl-adenosine
  modified_base 50: mod_base = OTHER; note = 2'-O-Methyl-uridine
  modified_base 52: mod_base = OTHER; note = 2'-O-Methyl-adenosine
  modified_base 53: mod_base = OTHER; note = 2'-O-Methyl-guanosine
  modified_base 54: mod_base = OTHER; note = 2'-O-Methyl-guanosine
  modified_base 55: mod_base = OTHER; note = 2'-O-Methyl-cytidine
  modified_base 56: mod_base = OTHER; note = 2'-O-Methyl-uridine
  modified_base 57: mod_base = OTHER; note = 2'-O-Methyl-adenosine
  modified_base 60: mod_base = OTHER; note = 2'-O-Methyl-cytidine
  modified_base 61: mod_base = OTHER; note = 2'-O-Methyl-cytidine
  modified_base 66: mod_base = OTHER; note = 2'-O-Methyl-uridine
  modified_base 67: mod_base = OTHER; note = 2'-O-Methyl-cytidine
  modified_base 70: mod_base = OTHER; note = 2'-O-Methyl-cytidine
  modified_base 71: mod_base = OTHER; note = 2'-O-Methyl-uridine
  modified_base 72: mod_base = OTHER; note = 2'-O-Methyl-uridine
  modified_base 73: mod_base = OTHER; note = 2'-O-Methyl-guanosine
  modified_base 74: mod_base = OTHER; note = 2'-O-Methyl-adenosine
  modified_base 75: mod_base = OTHER; note = 2'-O-Methyl-adenosine
  modified_base 76: mod_base = OTHER; note = 2'-O-Methyl-adenosine
  modified_base 77: mod_base = OTHER; note = 2'-O-Methyl-adenosine
  modified_base 78: mod_base = OTHER; note = 2'-O-Methyl-adenosine
  modified_base 79: mod_base = OTHER; note = 2'-O-Methyl-guanosine
  modified_base 80: mod_base = OTHER; note = 2'-O-Methyl-uridine
  modified_base 81: mod_base = OTHER; note = 2'-O-Methyl-guanosine
  modified_base 83: mod_base = OTHER; note = 2'-O-Methyl-cytidine
  modified_base 84: mod_base = OTHER; note = 2'-O-Methyl-adenosine
  modified_base 85: mod_base = OTHER; note = 2'-O-Methyl-cytidine
  modified_base 86: mod_base = OTHER; note = 2'-O-Methyl-cytidine
  modified_base 87: mod_base = OTHER; note = 2'-O-Methyl-guanosine
  modified_base 88: mod_base = OTHER; note = 2'-O-Methyl-adenosine
  modified_base 89: mod_base = OTHER; note = 2'-O-Methyl-guanosine
  modified_base 90: mod_base = OTHER; note = 2'-O-Methyl-uridine
  modified_base 91: mod_base = OTHER; note = 2'-O-Methyl-cytidine
  modified_base 92: mod_base = OTHER; note = 2'-O-Methyl-guanosine
  modified_base 93: mod_base = OTHER; note = 2'-O-Methyl-guanosine
  modified_base 94: mod_base = OTHER; note = 2'-O-Methyl-uridine
  modified_base 95: mod_base = OTHER; note = 2'-O-Methyl-guanosine
  modified_base 96: mod_base = OTHER; note = 2'-O-Methyl-cytidine
  modified_base 97: mod_base = OTHER; note = 2'-O-Methyl-uridine
  modified_base 98: mod_base = OTHER; note = 2'-O-Methyl-uridine phosphorothioate
  modified_base 99: mod_base = OTHER; note = 2'-O-Methyl-uridine phosphorothioate
  modified_base 100: mod_base = OTHER; note = 2'-O-Methyl-uridine

SEQ ID NO: 2041 - RNA, 100 nt, synthetic construct; identical to SEQ ID NO: 1934
  source 1..100: mol_type = other RNA; note = Description of Artificial Sequence: Synthetic polynucleotide
  modified_base 1: mod_base = OTHER; note = 2'-O-Methyl-cytidine phosphorothioate
  modified_base 2: mod_base = OTHER; note = 2'-O-Methyl-adenosine phosphorothioate
  modified_base 3: mod_base = OTHER; note = 2'-O-Methyl-guanosine phosphorothioate
  modified_base 9: mod_base = OTHER; note = Nebularine - ribonebularine
  modified_base 21: mod_base = OTHER; note = 2'-O-Methyl-guanosine
  modified_base 28: mod_base = OTHER; note = Nebularine - 2'-O-methylnebularine
  modified_base 29: mod_base = OTHER; note = 2'-O-Methyl-guanosine
  modified_base 30: mod_base = OTHER; note = 2'-O-Methyl-cytidine
  modified_base 31: mod_base = OTHER; note = 2'-O-Methyl-uridine
  modified_base 32: mod_base = OTHER; note = 2'-O-Methyl-adenosine
  modified_base 33: mod_base = OTHER; note = 2'-O-Methyl-guanosine
  modified_base 34: mod_base = OTHER; note = Nebularine - 2'-O-methylnebularine
  modified_base 35: mod_base = OTHER; note = 2'-O-Methyl-adenosine
  modified_base 36: mod_base = OTHER; note = 2'-O-Methyl-adenosine
  modified_base 37: mod_base = OTHER; note = 2'-O-Methyl-uridine
  modified_base 38: mod_base = OTHER; note = 2'-O-Methyl-adenosine
  modified_base 39: mod_base = OTHER; note = 2'-O-Methyl-guanosine
  modified_base 40: mod_base = OTHER; note = 2'-O-Methyl-cytidine
  modified_base 41: mod_base = OTHER; note = 2'-O-Methyl-adenosine
  modified_base 42: mod_base = OTHER; note = Nebularine - 2'-O-methylnebularine
  modified_base 46: mod_base = OTHER; note = 2'-O-Methyl-adenosine
  modified_base 48: mod_base = OTHER; note = 2'-O-Methyl-adenosine
  modified_base 50: mod_base = OTHER; note = 2'-O-Methyl-uridine
  modified_base 52: mod_base = OTHER; note = 2'-O-Methyl-adenosine
  modified_base 53: mod_base = OTHER; note = 2'-O-Methyl-guanosine
  modified_base 54: mod_base = OTHER; note = 2'-O-Methyl-guanosine
  modified_base 55: mod_base = OTHER; note = 2'-O-Methyl-cytidine
  modified_base 56: mod_base = OTHER; note = 2'-O-Methyl-uridine
  modified_base 57: mod_base = OTHER; note = Nebularine - 2'-O-methylnebularine
  modified_base 60: mod_base = OTHER; note = 2'-O-Methyl-cytidine
  modified_base 61: mod_base = OTHER; note = 2'-O-Methyl-cytidine
  modified_base 66: mod_base = OTHER; note = 2'-O-Methyl-uridine
  modified_base 67: mod_base = OTHER; note = 2'-O-Methyl-cytidine
  modified_base 70: mod_base = OTHER; note = 2'-O-Methyl-cytidine
  modified_base 71: mod_base = OTHER; note = 2'-O-Methyl-uridine
  modified_base 72: mod_base = OTHER; note = 2'-O-Methyl-uridine
  modified_base 73: mod_base = OTHER; note = 2'-O-Methyl-guanosine
  modified_base 74: mod_base = OTHER; note = 2'-O-Methyl-adenosine
  modified_base 75: mod_base = OTHER; note = 2'-O-Methyl-adenosine
  modified_base 76: mod_base = OTHER; note = 2'-O-Methyl-adenosine
  modified_base 77: mod_base = OTHER; note = 2'-O-Methyl-adenosine
  modified_base 78: mod_base = OTHER; note = 2'-O-Methyl-adenosine
  modified_base 79: mod_base = OTHER; note = 2'-O-Methyl-guanosine
  modified_base 80: mod_base = OTHER; note = 2'-O-Methyl-uridine
  modified_base 81: mod_base = OTHER; note = 2'-O-Methyl-guanosine
  modified_base 83: mod_base = OTHER; note = 2'-O-Methyl-cytidine
  modified_base 84: mod_base = OTHER; note = 2'-O-Methyl-adenosine
  modified_base 85: mod_base = OTHER; note = 2'-O-Methyl-cytidine
  modified_base 86: mod_base = OTHER; note = 2'-O-Methyl-cytidine
  modified_base 87: mod_base = OTHER; note = 2'-O-Methyl-guanosine
  modified_base 88: mod_base = OTHER; note = 2'-O-Methyl-adenosine
  modified_base 89: mod_base = OTHER; note = 2'-O-Methyl-guanosine
  modified_base 90: mod_base = OTHER; note = 2'-O-Methyl-uridine
  modified_base 91: mod_base = OTHER; note = 2'-O-Methyl-cytidine
  modified_base 92: mod_base = OTHER; note = 2'-O-Methyl-guanosine
  modified_base 93: mod_base = OTHER; note = 2'-O-Methyl-guanosine
  modified_base 94: mod_base = OTHER; note = 2'-O-Methyl-uridine
  modified_base 95: mod_base = OTHER; note = 2'-O-Methyl-guanosine
  modified_base 96: mod_base = OTHER; note = 2'-O-Methyl-cytidine
  modified_base 97: mod_base = OTHER; note = 2'-O-Methyl-uridine
  modified_base 98: mod_base = OTHER; note = 2'-O-Methyl-uridine phosphorothioate
  modified_base 99: mod_base = OTHER; note = 2'-O-Methyl-uridine phosphorothioate
  modified_base 100: mod_base = OTHER; note = 2'-O-Methyl-uridine

SEQ ID NO: 2042 - RNA, 100 nt, synthetic construct; identical to SEQ ID NO: 1935
  source 1..100: mol_type = other RNA; note = Description of Artificial Sequence: Synthetic polynucleotide
  modified_base 1: mod_base = OTHER; note = 2'-O-Methyl-cytidine phosphorothioate
  modified_base 2: mod_base = OTHER; note = 2'-O-Methyl-adenosine phosphorothioate
  modified_base 3: mod_base = OTHER; note = 2'-O-Methyl-guanosine phosphorothioate
  modified_base 9: mod_base = OTHER; note = Nebularine - ribonebularine
  modified_base 21: mod_base = OTHER; note = 2'-O-Methyl-guanosine
  modified_base 28: mod_base = OTHER; note = 2'-O-Methyl-adenosine
  modified_base 29: mod_base = OTHER; note = 2'-O-Methyl-guanosine
  modified_base 30: mod_base = OTHER; note = 2'-O-Methyl-cytidine
  modified_base 31: mod_base = OTHER; note = 2'-O-Methyl-uridine
  modified_base 32: mod_base = OTHER; note = 2'-O-Methyl-adenosine
  modified_base 33: mod_base = OTHER; note = 2'-O-Methyl-guanosine
  modified_base 34: mod_base = OTHER; note = Nebularine - 2'-O-methylnebularine
  modified_base 35: mod_base = OTHER; note = 2'-O-Methyl-adenosine
  modified_base 36: mod_base = OTHER; note = 2'-O-Methyl-adenosine
  modified_base 37: mod_base = OTHER; note = 2'-O-Methyl-uridine
  modified_base 38: mod_base = OTHER; note = 2'-O-Methyl-adenosine
  modified_base 39: mod_base = OTHER; note = 2'-O-Methyl-guanosine
  modified_base 40: mod_base = OTHER; note = 2'-O-Methyl-cytidine
  modified_base 41: mod_base = OTHER; note = 2'-O-Methyl-adenosine
  modified_base 42: mod_base = OTHER; note = Nebularine - 2'-O-methylnebularine
  modified_base 46: mod_base = OTHER; note = 2'-O-Methyl-adenosine
  modified_base 48: mod_base = OTHER; note = 2'-O-Methyl-adenosine
  modified_base 50: mod_base = OTHER; note = 2'-O-Methyl-uridine
  modified_base 52: mod_base = OTHER; note = 2'-O-Methyl-adenosine
  modified_base 53: mod_base = OTHER; note = 2'-O-Methyl-guanosine
  modified_base 54: mod_base = OTHER; note = 2'-O-Methyl-guanosine
  modified_base 55: mod_base = OTHER; note = 2'-O-Methyl-cytidine
  modified_base 56: mod_base = OTHER; note = 2'-O-Methyl-uridine
  modified_base 57: mod_base = OTHER; note = Nebularine - 2'-O-methylnebularine
  modified_base 60: mod_base = OTHER; note = 2'-O-Methyl-cytidine
  modified_base 61: mod_base = OTHER; note = 2'-O-Methyl-cytidine
  modified_base 66: mod_base = OTHER; note = 2'-O-Methyl-uridine
  modified_base 67: mod_base = OTHER; note = 2'-O-Methyl-cytidine
  modified_base 70: mod_base = OTHER; note = 2'-O-Methyl-cytidine
  modified_base 71: mod_base = OTHER; note = 2'-O-Methyl-uridine
  modified_base 72: mod_base = OTHER; note = 2'-O-Methyl-uridine
  modified_base 73: mod_base = OTHER; note = 2'-O-Methyl-guanosine
  modified_base 74: mod_base = OTHER; note = 2'-O-Methyl-adenosine
  modified_base 75: mod_base = OTHER; note = 2'-O-Methyl-adenosine
  modified_base 76: mod_base = OTHER; note = 2'-O-Methyl-adenosine
  modified_base 77: mod_base = OTHER; note = 2'-O-Methyl-adenosine
  modified_base 78: mod_base = OTHER; note = 2'-O-Methyl-adenosine
  modified_base 79: mod_base = OTHER; note = 2'-O-Methyl-guanosine
  modified_base 80: mod_base = OTHER; note = 2'-O-Methyl-uridine
  modified_base 81: mod_base = OTHER; note = 2'-O-Methyl-guanosine
  modified_base 83: mod_base = OTHER; note = 2'-O-Methyl-cytidine
  modified_base 84: mod_base = OTHER; note = 2'-O-Methyl-adenosine
  modified_base 85: mod_base = OTHER; note = 2'-O-Methyl-cytidine
  modified_base 86: mod_base = OTHER; note = 2'-O-Methyl-cytidine
  modified_base 87: mod_base = OTHER; note = 2'-O-Methyl-guanosine
  modified_base 88: mod_base = OTHER; note = 2'-O-Methyl-adenosine
  modified_base 89: mod_base = OTHER; note = 2'-O-Methyl-guanosine
  modified_base 90: mod_base = OTHER; note = 2'-O-Methyl-uridine
  modified_base 91: mod_base = OTHER; note = 2'-O-Methyl-cytidine
  modified_base 92: mod_base = OTHER; note = 2'-O-Methyl-guanosine
  modified_base 93: mod_base = OTHER; note = 2'-O-Methyl-guanosine
  modified_base 94: mod_base = OTHER; note = 2'-O-Methyl-uridine
  modified_base 95: mod_base = OTHER; note = 2'-O-Methyl-guanosine
  modified_base 96: mod_base = OTHER; note = 2'-O-Methyl-cytidine
  modified_base 97: mod_base = OTHER; note = 2'-O-Methyl-uridine
  modified_base 98: mod_base = OTHER; note = 2'-O-Methyl-uridine phosphorothioate
  modified_base 99: mod_base = OTHER; note = 2'-O-Methyl-uridine phosphorothioate
  modified_base 100: mod_base = OTHER; note = 2'-O-Methyl-uridine

SEQ ID NO: 2043 - RNA, 100 nt, synthetic construct; identical to SEQ ID NO: 1936
  source 1..100: mol_type = other RNA; note = Description of Artificial Sequence: Synthetic polynucleotide
  modified_base 1: mod_base = OTHER; note = 2'-O-Methyl-cytidine phosphorothioate
  modified_base 2: mod_base = OTHER; note = 2'-O-Methyl-adenosine phosphorothioate
  modified_base 3: mod_base = OTHER; note = 2'-O-Methyl-guanosine phosphorothioate
  modified_base 9: mod_base = OTHER; note = Nebularine - ribonebularine
  modified_base 21: mod_base = OTHER; note = 2'-O-Methyl-guanosine
  modified_base 28: mod_base = OTHER; note = 2'-O-Methyl-adenosine
  modified_base 29: mod_base = OTHER; note = 2'-O-Methyl-guanosine
  modified_base 30: mod_base = OTHER; note = 2'-O-Methyl-cytidine
  modified_base 31: mod_base = OTHER; note = 2'-O-Methyl-uridine
  modified_base 32: mod_base = OTHER; note = 2'-O-Methyl-adenosine
  modified_base 33: mod_base = OTHER; note = 2'-O-Methyl-guanosine
  modified_base 34: mod_base = OTHER; note = 2'-O-Methyl-adenosine
  modified_base 35: mod_base = OTHER; note = 2'-O-Methyl-adenosine
  modified_base 36: mod_base = OTHER; note = 2'-O-Methyl-adenosine
  modified_base 37: mod_base = OTHER; note = 2'-O-Methyl-uridine
  modified_base 38: mod_base = OTHER; note = 2'-O-Methyl-adenosine
  modified_base 39: mod_base = OTHER; note = 2'-O-Methyl-guanosine
  modified_base 40: mod_base = OTHER; note = 2'-O-Methyl-cytidine
  modified_base 41: mod_base = OTHER; note = 2'-O-Methyl-adenosine
  modified_base 42: mod_base = OTHER; note = Nebularine - 2'-O-methylnebularine
  modified_base 46: mod_base = OTHER; note = 2'-O-Methyl-adenosine
  modified_base 48: mod_base = OTHER; note = 2'-O-Methyl-adenosine
  modified_base 50: mod_base = OTHER; note = 2'-O-Methyl-uridine
  modified_base 52: mod_base = OTHER; note = 2'-O-Methyl-adenosine
  modified_base 53: mod_base = OTHER; note = 2'-O-Methyl-guanosine
  modified_base 54: mod_base = OTHER; note = 2'-O-Methyl-guanosine
  modified_base 55: mod_base = OTHER; note = 2'-O-Methyl-cytidine
  modified_base 56: mod_base = OTHER; note = 2'-O-Methyl-uridine
  modified_base 57: mod_base = OTHER; note = Nebularine - 2'-O-methylnebularine
  modified_base 60: mod_base = OTHER; note = 2'-O-Methyl-cytidine
  modified_base 61: mod_base = OTHER; note = 2'-O-Methyl-cytidine
  modified_base 66: mod_base = OTHER; note = 2'-O-Methyl-uridine
  modified_base 67: mod_base = OTHER; note = 2'-O-Methyl-cytidine
  modified_base 70: mod_base = OTHER; note = 2'-O-Methyl-cytidine
  modified_base 71: mod_base = OTHER; note = 2'-O-Methyl-uridine
  modified_base 72: mod_base = OTHER; note = 2'-O-Methyl-uridine
  modified_base 73: mod_base = OTHER; note = 2'-O-Methyl-guanosine
  modified_base 74: mod_base = OTHER; note = 2'-O-Methyl-adenosine
  modified_base 75: mod_base = OTHER; note = 2'-O-Methyl-adenosine
  modified_base 76: mod_base = OTHER; note = 2'-O-Methyl-adenosine
  modified_base 77: mod_base = OTHER; note = 2'-O-Methyl-adenosine
  modified_base 78: mod_base = OTHER; note = 2'-O-Methyl-adenosine
  modified_base 79: mod_base = OTHER; note = 2'-O-Methyl-guanosine
  modified_base 80: mod_base = OTHER; note = 2'-O-Methyl-uridine
  modified_base 81: mod_base = OTHER; note = 2'-O-Methyl-guanosine
  modified_base 83: mod_base = OTHER; note = 2'-O-Methyl-cytidine
  modified_base 84: mod_base = OTHER; note = 2'-O-Methyl-adenosine
  modified_base 85: mod_base = OTHER; note = 2'-O-Methyl-cytidine
  modified_base 86: mod_base = OTHER; note = 2'-O-Methyl-cytidine
  modified_base 87: mod_base = OTHER; note = 2'-O-Methyl-guanosine
  modified_base 88: mod_base = OTHER; note = 2'-O-Methyl-adenosine
  modified_base 89: mod_base = OTHER; note = 2'-O-Methyl-guanosine
  modified_base 90: mod_base = OTHER; note = 2'-O-Methyl-uridine
  modified_base 91: mod_base = OTHER; note = 2'-O-Methyl-cytidine
  modified_base 92: mod_base = OTHER; note = 2'-O-Methyl-guanosine
  modified_base 93: mod_base = OTHER; note = 2'-O-Methyl-guanosine
  modified_base 94: mod_base = OTHER; note = 2'-O-Methyl-uridine
  modified_base 95: mod_base = OTHER; note = 2'-O-Methyl-guanosine
  modified_base 96: mod_base = OTHER; note = 2'-O-Methyl-cytidine
  modified_base 97: mod_base = OTHER; note = 2'-O-Methyl-uridine
  modified_base 98: mod_base = OTHER; note = 2'-O-Methyl-uridine phosphorothioate
  modified_base 99: mod_base = OTHER; note = 2'-O-Methyl-uridine phosphorothioate
  modified_base 100: mod_base = OTHER; note = 2'-O-Methyl-uridine

SEQ ID NO: 2044 - RNA, 100 nt, synthetic construct; identical to SEQ ID NO: 1937
  source 1..100: mol_type = other RNA; note = Description of Artificial Sequence: Synthetic polynucleotide
  modified_base 1: mod_base = OTHER; note = 2'-O-Methyl-cytidine phosphorothioate
  modified_base 2: mod_base = OTHER; note = 2'-O-Methyl-adenosine phosphorothioate
  modified_base 3: mod_base = OTHER; note = 2'-O-Methyl-guanosine phosphorothioate
  modified_base 9: mod_base = OTHER; note = Nebularine - ribonebularine
  modified_base 21: mod_base = OTHER; note = 2'-O-Methyl-guanosine
  modified_base 28: mod_base = OTHER; note = Nebularine - 2'-O-methylnebularine
  modified_base 29: mod_base = OTHER; note = 2'-O-Methyl-guanosine
  modified_base 30: mod_base = OTHER; note = 2'-O-Methyl-cytidine
  modified_base 31: mod_base = OTHER; note = 2'-O-Methyl-uridine
  modified_base 32: mod_base = OTHER; note = 2'-O-Methyl-adenosine
  modified_base 33: mod_base = OTHER; note = 2'-O-Methyl-guanosine
  modified_base 34: mod_base = OTHER; note = 2'-O-Methyl-adenosine
  modified_base 35: mod_base = OTHER; note = 2'-O-Methyl-adenosine
  modified_base 36: mod_base = OTHER; note = 2'-O-Methyl-adenosine
  modified_base 37: mod_base = OTHER; note = 2'-O-Methyl-uridine
  modified_base 38: mod_base = OTHER; note = 2'-O-Methyl-adenosine
  modified_base 39: mod_base = OTHER; note = 2'-O-Methyl-guanosine
  modified_base 40: mod_base = OTHER; note = 2'-O-Methyl-cytidine
  modified_base 41: mod_base = OTHER; note = 2'-O-Methyl-adenosine
  modified_base 42: mod_base = OTHER; note = 2'-O-Methyl-adenosine
  modified_base 46: mod_base = OTHER; note = 2'-O-Methyl-adenosine
  modified_base 48: mod_base = OTHER; note = 2'-O-Methyl-adenosine
  modified_base 50: mod_base = OTHER; note = 2'-O-Methyl-uridine
  modified_base 52: mod_base = OTHER; note = 2'-O-Methyl-adenosine
  modified_base 53: mod_base = OTHER; note = 2'-O-Methyl-guanosine
  modified_base 54: mod_base = OTHER; note = 2'-O-Methyl-guanosine
  modified_base 55: mod_base = OTHER; note = 2'-O-Methyl-cytidine
  modified_base 56: mod_base = OTHER; note = 2'-O-Methyl-uridine
  modified_base 57: mod_base = OTHER; note = 2'-O-Methyl-adenosine
  modified_base 60: mod_base = OTHER; note = 2'-O-Methyl-cytidine
  modified_base 61: mod_base = OTHER; note = 2'-O-Methyl-cytidine
  modified_base 66: mod_base = OTHER; note = 2'-O-Methyl-uridine
  modified_base 67: mod_base = OTHER; note = 2'-O-Methyl-cytidine
  modified_base 70: mod_base = OTHER; note = 2'-O-Methyl-cytidine
  modified_base 71: mod_base = OTHER; note = 2'-O-Methyl-uridine
  modified_base 72: mod_base = OTHER; note = 2'-O-Methyl-uridine
  modified_base 73: mod_base = OTHER; note = 2'-O-Methyl-guanosine
  modified_base 74: mod_base = OTHER; note = 2'-O-Methyl-adenosine
  modified_base 75: mod_base = OTHER; note = 2'-O-Methyl-adenosine
  modified_base 76: mod_base = OTHER; note = 2'-O-Methyl-adenosine
  modified_base 77: mod_base = OTHER; note = 2'-O-Methyl-adenosine
  modified_base 78: mod_base = OTHER; note = 2'-O-Methyl-adenosine
  modified_base 79: mod_base = OTHER; note = 2'-O-Methyl-guanosine
  modified_base 80: mod_base = OTHER; note = 2'-O-Methyl-uridine
  modified_base 81: mod_base = OTHER; note = 2'-O-Methyl-guanosine
  modified_base 83: mod_base = OTHER; note = 2'-O-Methyl-cytidine
  modified_base 84: mod_base = OTHER; note = 2'-O-Methyl-adenosine
  modified_base 85: mod_base = OTHER; note = 2'-O-Methyl-cytidine
  modified_base 86: mod_base = OTHER; note = 2'-O-Methyl-cytidine
  modified_base 87: mod_base = OTHER; note = 2'-O-Methyl-guanosine
  modified_base 88: mod_base = OTHER; note = 2'-O-Methyl-adenosine
  modified_base 89: mod_base = OTHER; note = 2'-O-Methyl-guanosine
  modified_base 90: mod_base = OTHER; note = 2'-O-Methyl-uridine
  modified_base 91: mod_base = OTHER; note = 2'-O-Methyl-cytidine
  modified_base 92: mod_base = OTHER; note = 2'-O-Methyl-guanosine
  modified_base 93: mod_base = OTHER; note = 2'-O-Methyl-guanosine
  modified_base 94: mod_base = OTHER; note = 2'-O-Methyl-uridine
  modified_base 95: mod_base = OTHER; note = 2'-O-Methyl-guanosine
  modified_base 96: mod_base = OTHER; note = 2'-O-Methyl-cytidine
  modified_base 97: mod_base = OTHER; note = 2'-O-Methyl-uridine
  modified_base 98: mod_base = OTHER; note = 2'-O-Methyl-uridine phosphorothioate
  modified_base 99: mod_base = OTHER; note = 2'-O-Methyl-uridine phosphorothioate
  modified_base 100: mod_base = OTHER; note = 2'-O-Methyl-uridine

SEQ ID NO: 2045 - RNA, 100 nt, synthetic construct; identical to SEQ ID NO: 1938
  source 1..100: mol_type = other RNA; note = Description of Artificial Sequence: Synthetic polynucleotide
  modified_base 1: mod_base = OTHER; note = 2'-O-Methyl-cytidine phosphorothioate
  modified_base 2: mod_base = OTHER; note = 2'-O-Methyl-adenosine phosphorothioate
  modified_base 3: mod_base = OTHER; note = 2'-O-Methyl-guanosine phosphorothioate
  modified_base 9: mod_base = OTHER; note = Nebularine - ribonebularine
  modified_base 21: mod_base = OTHER; note = 2'-O-Methyl-guanosine
  modified_base 28: mod_base = OTHER; note = 2'-O-Methyl-adenosine
  modified_base 29: mod_base = OTHER; note = 2'-O-Methyl-guanosine
  modified_base 30: mod_base = OTHER; note = 2'-O-Methyl-cytidine
  modified_base 31: mod_base = OTHER; note = 2'-O-Methyl-uridine
  modified_base 32: mod_base = OTHER; note = 2'-O-Methyl-adenosine
  modified_base 33: mod_base = OTHER; note = 2'-O-Methyl-guanosine
  modified_base 34: mod_base = OTHER; note = 2'-O-Methyl-adenosine
  modified_base 35: mod_base = OTHER; note = 2'-O-Methyl-adenosine
  modified_base 36: mod_base = OTHER; note = 2'-O-Methyl-adenosine
  modified_base 37: mod_base = OTHER; note = 2'-O-Methyl-uridine
  modified_base 38: mod_base = OTHER; note = 2'-O-Methyl-adenosine
  modified_base 39: mod_base = OTHER; note = 2'-O-Methyl-guanosine
  modified_base 40: mod_base = OTHER; note = 2'-O-Methyl-cytidine
  modified_base 41: mod_base = OTHER; note = 2'-O-Methyl-adenosine
  modified_base 42: mod_base = OTHER; note = Nebularine - 2'-O-methylnebularine
  modified_base 46: mod_base = OTHER; note = 2'-O-Methyl-adenosine
  modified_base 48: mod_base = OTHER; note = 2'-O-Methyl-adenosine
  modified_base 50: mod_base = OTHER; note = 2'-O-Methyl-uridine
  modified_base 52: mod_base = OTHER; note = 2'-O-Methyl-adenosine
  modified_base 53: mod_base = OTHER; note = 2'-O-Methyl-guanosine
  modified_base 54: mod_base = OTHER; note = 2'-O-Methyl-guanosine
  modified_base 55: mod_base = OTHER; note = 2'-O-Methyl-cytidine
  modified_base 56: mod_base = OTHER; note = 2'-O-Methyl-uridine
  modified_base 57: mod_base = OTHER; note = 2'-O-Methyl-adenosine
  modified_base 60: mod_base = OTHER; note = 2'-O-Methyl-cytidine
  modified_base 61: mod_base = OTHER; note = 2'-O-Methyl-cytidine
  modified_base 66: mod_base = OTHER; note = 2'-O-Methyl-uridine
  modified_base 67: mod_base = OTHER; note = 2'-O-Methyl-cytidine
  modified_base 70: mod_base = OTHER; note = 2'-O-Methyl-cytidine
  modified_base 71: mod_base = OTHER; note = 2'-O-Methyl-uridine
  modified_base 72: mod_base = OTHER; note = 2'-O-Methyl-uridine
  modified_base 73: mod_base = OTHER; note = 2'-O-Methyl-guanosine
  modified_base 74: mod_base = OTHER; note = 2'-O-Methyl-adenosine
  modified_base 75: mod_base = OTHER; note = 2'-O-Methyl-adenosine
  modified_base 76: mod_base = OTHER; note = 2'-O-Methyl-adenosine
  modified_base 77: mod_base = OTHER; note = 2'-O-Methyl-adenosine
  modified_base 78: mod_base = OTHER; note = 2'-O-Methyl-adenosine
  modified_base 79: mod_base = OTHER; note = 2'-O-Methyl-guanosine
  modified_base 80: mod_base = OTHER; note = 2'-O-Methyl-uridine
  modified_base 81: mod_base = OTHER; note = 2'-O-Methyl-guanosine
  modified_base 83: mod_base = OTHER; note = 2'-O-Methyl-cytidine
  modified_base 84: mod_base = OTHER; note = 2'-O-Methyl-adenosine
  modified_base 85: mod_base = OTHER; note = 2'-O-Methyl-cytidine
  modified_base 86: mod_base = OTHER; note = 2'-O-Methyl-cytidine
  modified_base 87: mod_base = OTHER; note = 2'-O-Methyl-guanosine
  modified_base 88: mod_base = OTHER; note = 2'-O-Methyl-adenosine
  modified_base 89: mod_base = OTHER; note = 2'-O-Methyl-guanosine
  modified_base 90: mod_base = OTHER; note = 2'-O-Methyl-uridine
  modified_base 91: mod_base = OTHER; note = 2'-O-Methyl-cytidine
  modified_base 92: mod_base = OTHER; note = 2'-O-Methyl-guanosine
  modified_base 93: mod_base = OTHER; note = 2'-O-Methyl-guanosine
  modified_base 94: mod_base = OTHER; note = 2'-O-Methyl-uridine
  modified_base 95: mod_base = OTHER; note = 2'-O-Methyl-guanosine
  modified_base 96: mod_base = OTHER; note = 2'-O-Methyl-cytidine
  modified_base 97: mod_base = OTHER; note = 2'-O-Methyl-uridine
  modified_base 98: mod_base = OTHER; note = 2'-O-Methyl-uridine phosphorothioate
  modified_base 99: mod_base = OTHER; note = 2'-O-Methyl-uridine phosphorothioate
  modified_base 100: mod_base = OTHER; note = 2'-O-Methyl-uridine

SEQ ID NO: 2046 - RNA, 100 nt, synthetic construct; identical to SEQ ID NO: 1939
  source 1..100: mol_type = other RNA; note = Description of Artificial Sequence: Synthetic polynucleotide
  modified_base 1: mod_base = OTHER; note = 2'-O-Methyl-cytidine phosphorothioate
  modified_base 2: mod_base = OTHER; note = 2'-O-Methyl-adenosine phosphorothioate
  modified_base 3: mod_base = OTHER; note = 2'-O-Methyl-guanosine phosphorothioate
  modified_base 9: mod_base = OTHER; note = Nebularine - ribonebularine
  modified_base 21: mod_base = OTHER; note = 2'-O-Methyl-guanosine
  modified_base 28: mod_base = OTHER; note = 2'-O-Methyl-adenosine
  modified_base 29: mod_base = OTHER; note = 2'-O-Methyl-guanosine
  modified_base 30: mod_base = OTHER; note = 2'-O-Methyl-cytidine
  modified_base 31: mod_base = OTHER; note = 2'-O-Methyl-uridine
  modified_base 32: mod_base = OTHER; note = 2'-O-Methyl-adenosine
  modified_base 33: mod_base = OTHER; note = 2'-O-Methyl-guanosine
  modified_base 34: mod_base = OTHER; note = Nebularine - 2'-O-methylnebularine
  modified_base 35: mod_base = OTHER; note = 2'-O-Methyl-adenosine
  modified_base 36: mod_base = OTHER; note = 2'-O-Methyl-adenosine
  modified_base 37: mod_base = OTHER; note = 2'-O-Methyl-uridine
  modified_base 38: mod_base = OTHER; note = 2'-O-Methyl-adenosine
  modified_base 39: mod_base = OTHER; note = 2'-O-Methyl-guanosine
  modified_base 40: mod_base = OTHER; note = 2'-O-Methyl-cytidine
  modified_base 41: mod_base = OTHER; note = 2'-O-Methyl-adenosine
  modified_base 42: mod_base = OTHER; note = Nebularine - 2'-O-methylnebularine
  modified_base 46: mod_base = OTHER; note = 2'-O-Methyl-adenosine
  modified_base 48: mod_base = OTHER; note = 2'-O-Methyl-adenosine
  modified_base 50: mod_base = OTHER; note = 2'-O-Methyl-uridine
  modified_base 52: mod_base = OTHER; note = 2'-O-Methyl-adenosine
  modified_base 53: mod_base = OTHER; note = 2'-O-Methyl-guanosine
  modified_base 54: mod_base = OTHER; note = 2'-O-Methyl-guanosine
  modified_base 55: mod_base = OTHER; note = 2'-O-Methyl-cytidine
  modified_base 56: mod_base = OTHER; note = 2'-O-Methyl-uridine
  modified_base 57: mod_base = OTHER; note = 2'-O-Methyl-adenosine
  modified_base 60: mod_base = OTHER; note = 2'-O-Methyl-cytidine
  modified_base 61: mod_base = OTHER; note = 2'-O-Methyl-cytidine
  modified_base 66: mod_base = OTHER; note = 2'-O-Methyl-uridine
  modified_base 67: mod_base = OTHER; note = 2'-O-Methyl-cytidine
  modified_base 70: mod_base = OTHER; note = 2'-O-Methyl-cytidine
  modified_base 71: mod_base = OTHER; note = 2'-O-Methyl-uridine
  modified_base 72: mod_base = OTHER; note = 2'-O-Methyl-uridine
  modified_base 73: mod_base = OTHER; note = 2'-O-Methyl-guanosine
  modified_base 74: mod_base = OTHER; note = 2'-O-Methyl-adenosine
  modified_base 75: mod_base = OTHER; note = 2'-O-Methyl-adenosine
  modified_base 76: mod_base = OTHER; note = 2'-O-Methyl-adenosine
  modified_base 77: mod_base = OTHER; note = 2'-O-Methyl-adenosine
  modified_base 78: mod_base = OTHER; note = 2'-O-Methyl-adenosine
  modified_base 79: mod_base = OTHER; note = 2'-O-Methyl-guanosine
  modified_base 80: mod_base = OTHER; note = 2'-O-Methyl-uridine
  modified_base 81: mod_base = OTHER; note = 2'-O-Methyl-guanosine
  modified_base 83: mod_base = OTHER; note = 2'-O-Methyl-cytidine
  modified_base 84: mod_base = OTHER; note = 2'-O-Methyl-adenosine
  modified_base 85: mod_base = OTHER; note = 2'-O-Methyl-cytidine
  modified_base 86: mod_base = OTHER; note = 2'-O-Methyl-cytidine
  modified_base 87: mod_base = OTHER; note = 2'-O-Methyl-guanosine
  modified_base 88: mod_base = OTHER; note = 2'-O-Methyl-adenosine
  modified_base 89: mod_base = OTHER; note = 2'-O-Methyl-guanosine
  modified_base 90: mod_base = OTHER; note = 2'-O-Methyl-uridine
  modified_base 91: mod_base = OTHER; note = 2'-O-Methyl-cytidine
  modified_base 92: mod_base = OTHER; note = 2'-O-Methyl-guanosine
  modified_base 93: mod_base = OTHER; note = 2'-O-Methyl-guanosine
  modified_base 94: mod_base = OTHER; note = 2'-O-Methyl-uridine
  modified_base 95: mod_base = OTHER; note = 2'-O-Methyl-guanosine
  modified_base 96: mod_base = OTHER; note = 2'-O-Methyl-cytidine
  modified_base 97: mod_base = OTHER; note = 2'-O-Methyl-uridine
  modified_base 98: mod_base = OTHER; note = 2'-O-Methyl-uridine phosphorothioate
  modified_base 99: mod_base = OTHER; note = 2'-O-Methyl-uridine phosphorothioate
  modified_base 100: mod_base = OTHER; note = 2'-O-Methyl-uridine

SEQ ID NO: 2047 - RNA, 100 nt, synthetic construct; identical to SEQ ID NO: 1940
  source 1..100: mol_type = other RNA; note = Description of Artificial Sequence: Synthetic polynucleotide
  modified_base 1: mod_base = OTHER; note = 2'-O-Methyl-cytidine phosphorothioate
  modified_base 2: mod_base = OTHER; note = 2'-O-Methyl-adenosine phosphorothioate
  modified_base 3: mod_base = OTHER; note = 2'-O-Methyl-guanosine phosphorothioate
  modified_base 9: mod_base = OTHER; note = Nebularine - ribonebularine
  modified_base 21: mod_base = OTHER; note = 2'-O-Methyl-guanosine
  modified_base 28: mod_base = OTHER; note = 2'-O-Methyl-adenosine
  modified_base 29: mod_base = OTHER; note = 2'-O-Methyl-guanosine
  modified_base 30: mod_base = OTHER; note = 2'-O-Methyl-cytidine
  modified_base 31: mod_base = OTHER; note = 2'-O-Methyl-uridine
  modified_base 32: mod_base = OTHER; note = 2'-O-Methyl-adenosine
  modified_base 33: mod_base = OTHER; note = 2'-O-Methyl-guanosine
  modified_base 34: mod_base = OTHER; note = Nebularine - 2'-O-methylnebularine
  modified_base 35: mod_base = OTHER; note = 2'-O-Methyl-adenosine
  modified_base 36: mod_base = OTHER; note = 2'-O-Methyl-adenosine
  modified_base 37: mod_base = OTHER; note = 2'-O-Methyl-uridine
  modified_base 38: mod_base = OTHER; note = 2'-O-Methyl-adenosine
  modified_base 39: mod_base = OTHER; note = 2'-O-Methyl-guanosine
  modified_base 40: mod_base = OTHER; note = 2'-O-Methyl-cytidine
  modified_base 41: mod_base = OTHER; note = 2'-O-Methyl-adenosine
  modified_base 42: mod_base = OTHER; note = 2'-O-Methyl-adenosine
  modified_base 46: mod_base = OTHER; note = 2'-O-Methyl-adenosine
  modified_base 48: mod_base = OTHER; note = 2'-O-Methyl-adenosine
  modified_base 50: mod_base = OTHER; note = 2'-O-Methyl-uridine
  modified_base 52: mod_base = OTHER; note = 2'-O-Methyl-adenosine
  modified_base 53: mod_base = OTHER; note = 2'-O-Methyl-guanosine
  modified_base 54: mod_base = OTHER; note = 2'-O-Methyl-guanosine
  modified_base 55: mod_base = OTHER; note = 2'-O-Methyl-cytidine
  modified_base 56: mod_base = OTHER; note = 2'-O-Methyl-uridine
  modified_base 57: mod_base = OTHER; note = 2'-O-Methyl-adenosine
  modified_base 60: mod_base = OTHER; note = 2'-O-Methyl-cytidine
  modified_base 61: mod_base = OTHER; note = 2'-O-Methyl-cytidine
  modified_base 66: mod_base = OTHER; note = 2'-O-Methyl-uridine
  modified_base 67: mod_base = OTHER; note = 2'-O-Methyl-cytidine
  modified_base 70: mod_base = OTHER; note = 2'-O-Methyl-cytidine
  modified_base 71: mod_base = OTHER; note = 2'-O-Methyl-uridine
  modified_base 72: mod_base = OTHER; note = 2'-O-Methyl-uridine
  modified_base 73: mod_base = OTHER; note = 2'-O-Methyl-guanosine
  modified_base 74: mod_base = OTHER; note = 2'-O-Methyl-adenosine
  modified_base 75: mod_base = OTHER; note = 2'-O-Methyl-adenosine
  modified_base 76: mod_base = OTHER; note = 2'-O-Methyl-adenosine
  modified_base 77: mod_base = OTHER; note = 2'-O-Methyl-adenosine
  modified_base 78: mod_base = OTHER; note = 2'-O-Methyl-adenosine
  modified_base 79: mod_base = OTHER; note = 2'-O-Methyl-guanosine
  modified_base 80: mod_base = OTHER; note = 2'-O-Methyl-uridine
  modified_base 81: mod_base = OTHER; note = 2'-O-Methyl-guanosine
  modified_base 83: mod_base = OTHER; note = 2'-O-Methyl-cytidine
  modified_base 84: mod_base = OTHER; note = 2'-O-Methyl-adenosine
  modified_base 85: mod_base = OTHER; note = 2'-O-Methyl-cytidine
  modified_base 86: mod_base = OTHER; note = 2'-O-Methyl-cytidine
  modified_base 87: mod_base = OTHER; note = 2'-O-Methyl-guanosine
  modified_base 88: mod_base = OTHER; note = 2'-O-Methyl-adenosine
  modified_base 89: mod_base = OTHER; note = 2'-O-Methyl-guanosine
  modified_base 90: mod_base = OTHER; note = 2'-O-Methyl-uridine
  modified_base 91: mod_base = OTHER; note = 2'-O-Methyl-cytidine
  modified_base 92: mod_base = OTHER; note = 2'-O-Methyl-guanosine
  modified_base 93: mod_base = OTHER; note = 2'-O-Methyl-guanosine
  modified_base 94: mod_base = OTHER; note = 2'-O-Methyl-uridine
  modified_base 95: mod_base = OTHER; note = 2'-O-Methyl-guanosine
  modified_base 96: mod_base = OTHER; note = 2'-O-Methyl-cytidine
  modified_base 97: mod_base = OTHER; note = 2'-O-Methyl-uridine
  modified_base 98: mod_base = OTHER; note = 2'-O-Methyl-uridine phosphorothioate
  modified_base 99: mod_base = OTHER; note = 2'-O-Methyl-uridine phosphorothioate
  modified_base 100: mod_base = OTHER; note = 2'-O-Methyl-uridine

SEQ ID NO: 2048 - DNA, 100 bp, synthetic construct; identical to SEQ ID NO: 1941
  source 1..100: mol_type = other DNA; note = Description of Artificial Sequence: Synthetic oligonucleotide; note = Description of Combined DNA/RNA Molecule: Synthetic oligonucleotide
  modified_base 1: mod_base = OTHER; note = 2'-O-Methyl-cytidine phosphorothioate
  modified_base 2: mod_base = OTHER; note = 2'-O-Methyl-adenosine phosphorothioate
  modified_base 3: mod_base = OTHER; note = 2'-O-Methyl-guanosine phosphorothioate
  modified_base 9: mod_base = OTHER; note = Nebularine - 2'-deoxynebularine
  modified_base 14: mod_base = OTHER; note = Nebularine - 2'-deoxynebularine
  modified_base 21: mod_base = OTHER; note = 2'-O-Methyl-guanosine
  modified_base 28: mod_base = OTHER; note = 2'-O-Methyl-adenosine
  modified_base 29: mod_base = OTHER; note = 2'-O-Methyl-guanosine
  modified_base 30: mod_base = OTHER; note = 2'-O-Methyl-cytidine
  modified_base 31: mod_base = OTHER; note = 2'-O-Methyl-uridine
  modified_base 32: mod_base = OTHER; note = 2'-O-Methyl-adenosine
  modified_base 33: mod_base = OTHER; note = 2'-O-Methyl-guanosine
  modified_base 34: mod_base = OTHER; note = 2'-O-Methyl-adenosine
  modified_base 35: mod_base = OTHER; note = 2'-O-Methyl-adenosine
  modified_base 36: mod_base = OTHER; note = 2'-O-Methyl-adenosine
  modified_base 37: mod_base = OTHER; note = 2'-O-Methyl-uridine
  modified_base 38: mod_base = OTHER; note = 2'-O-Methyl-adenosine
  modified_base 39: mod_base = OTHER; note = 2'-O-Methyl-guanosine
  modified_base 40: mod_base = OTHER; note = 2'-O-Methyl-cytidine
  modified_base 41: mod_base = OTHER; note = 2'-O-Methyl-adenosine
  modified_base 42: mod_base = OTHER; note = 2'-O-Methyl-adenosine
  modified_base 46: mod_base = OTHER; note = 2'-O-Methyl-adenosine
  modified_base 48: mod_base = OTHER; note = 2'-O-Methyl-adenosine
  modified_base 50: mod_base = OTHER; note = 2'-O-Methyl-uridine
  modified_base 52: mod_base = OTHER; note = 2'-O-Methyl-adenosine
  modified_base 53: mod_base = OTHER; note = 2'-O-Methyl-guanosine
  modified_base 54: mod_base = OTHER; note = 2'-O-Methyl-guanosine
  modified_base 55: mod_base = OTHER; note = 2'-O-Methyl-cytidine
  modified_base 56: mod_base = OTHER; note = 2'-O-Methyl-uridine
  modified_base 57: mod_base = OTHER; note = 2'-O-Methyl-adenosine
  modified_base 60: mod_base = OTHER; note = 2'-O-Methyl-cytidine
  modified_base 61: mod_base = OTHER; note = 2'-O-Methyl-cytidine
  modified_base 66: mod_base = OTHER; note = 2'-O-Methyl-uridine
  modified_base 67: mod_base = OTHER; note = 2'-O-Methyl-cytidine
  modified_base 70: mod_base = OTHER; note = 2'-O-Methyl-cytidine
  modified_base 71: mod_base = OTHER; note = 2'-O-Methyl-uridine
  modified_base 72: mod_base = OTHER; note = 2'-O-Methyl-uridine
  modified_base 73: mod_base = OTHER; note = 2'-O-Methyl-guanosine
  modified_base 74: mod_base = OTHER; note = 2'-O-Methyl-adenosine
  modified_base 75: mod_base = OTHER; note = 2'-O-Methyl-adenosine
  modified_base 76: mod_base = OTHER; note = 2'-O-Methyl-adenosine
  modified_base 77: mod_base = OTHER; note = 2'-O-Methyl-adenosine
  modified_base 78: mod_base = OTHER; note = 2'-O-Methyl-adenosine
  modified_base 79: mod_base = OTHER; note = 2'-O-Methyl-guanosine
  modified_base 80: mod_base = OTHER; note = 2'-O-Methyl-uridine
  modified_base 81: mod_base = OTHER; note = 2'-O-Methyl-guanosine
  modified_base 83: mod_base = OTHER; note = 2'-O-Methyl-cytidine
  modified_base 84: mod_base = OTHER; note = 2'-O-Methyl-adenosine
  modified_base 85: mod_base = OTHER; note = 2'-O-Methyl-cytidine
  modified_base 86: mod_base = OTHER; note = 2'-O-Methyl-cytidine
  modified_base 87: mod_base = OTHER; note = 2'-O-Methyl-guanosine
  modified_base 88: mod_base = OTHER; note = 2'-O-Methyl-adenosine
  modified_base 89: mod_base = OTHER; note = 2'-O-Methyl-guanosine
  modified_base 90: mod_base = OTHER; note = 2'-O-Methyl-uridine
  modified_base 91: mod_base = OTHER; note = 2'-O-Methyl-cytidine
  modified_base 92: mod_base = OTHER; note = 2'-O-Methyl-guanosine
  modified_base 93: mod_base = OTHER; note = 2'-O-Methyl-guanosine
  modified_base 94: mod_base = OTHER; note = 2'-O-Methyl-uridine
  modified_base 95: mod_base = OTHER; note = 2'-O-Methyl-guanosine
  modified_base 96: mod_base = OTHER; note = 2'-O-Methyl-cytidine
  modified_base 97: mod_base = OTHER; note = 2'-O-Methyl-uridine
  modified_base 98: mod_base = OTHER; note = 2'-O-Methyl-uridine phosphorothioate
  modified_base 99: mod_base = OTHER; note = 2'-O-Methyl-uridine phosphorothioate
  modified_base 100: mod_base = OTHER; note = 2'-O-Methyl-uridine
  misc_feature 1..8: note = RNA
  misc_feature 9: note = DNA
  misc_feature 10..13: note = RNA
  misc_feature 14: note = DNA
  misc_feature 15..100: note = RNA

SEQ ID NO: 2049 - DNA, 100 bp, synthetic construct; identical to SEQ ID NO: 1942
  source 1..100: mol_type = other DNA; note = Description of Artificial Sequence: Synthetic oligonucleotide; note = Description of Combined DNA/RNA Molecule: Synthetic oligonucleotide
  modified_base 1: mod_base = OTHER; note = 2'-O-Methyl-cytidine phosphorothioate
  modified_base 2: mod_base = OTHER; note = 2'-O-Methyl-adenosine phosphorothioate
  modified_base 3: mod_base = OTHER; note = 2'-O-Methyl-guanosine phosphorothioate
  modified_base 9: mod_base = OTHER; note = Nebularine - 2'-deoxynebularine
  modified_base 21: mod_base = OTHER; note = 2'-O-Methyl-guanosine
  modified_base 28: mod_base = OTHER; note = 2'-O-Methyl-adenosine
  modified_base 29: mod_base = OTHER; note = 2'-O-Methyl-guanosine
  modified_base 30: mod_base = OTHER; note = 2'-O-Methyl-cytidine
  modified_base 31: mod_base = OTHER; note = 2'-O-Methyl-uridine
  modified_base 32: mod_base = OTHER; note = 2'-O-Methyl-adenosine
  modified_base 33: mod_base = OTHER; note = 2'-O-Methyl-guanosine
  modified_base 34: mod_base = OTHER; note = 2'-O-Methyl-adenosine
  modified_base 35: mod_base = OTHER; note = 2'-O-Methyl-adenosine
  modified_base 36: mod_base = OTHER; note = 2'-O-Methyl-adenosine
  modified_base 37: mod_base = OTHER; note = 2'-O-Methyl-uridine
  modified_base 38: mod_base = OTHER; note = 2'-O-Methyl-adenosine
  modified_base 39: mod_base = OTHER; note = 2'-O-Methyl-guanosine
  modified_base 40: mod_base = OTHER; note = 2'-O-Methyl-cytidine
  modified_base 41: mod_base = OTHER; note = 2'-O-Methyl-adenosine
  modified_base 42: mod_base = OTHER; note = 2'-O-Methyl-adenosine
  modified_base 46: mod_base = OTHER; note = 2'-O-Methyl-adenosine
  modified_base 48: mod_base = OTHER; note = 2'-O-Methyl-adenosine
  modified_base 50: mod_base = OTHER; note = 2'-O-Methyl-uridine
  modified_base 52: mod_base = OTHER; note = 2'-O-Methyl-adenosine
  modified_base 53: mod_base = OTHER; note = 2'-O-Methyl-guanosine
  modified_base 54: mod_base = OTHER; note = 2'-O-Methyl-guanosine
  modified_base 55: mod_base = OTHER; note = 2'-O-Methyl-cytidine
  modified_base 56: mod_base = OTHER; note = 2'-O-Methyl-uridine
  modified_base 57: mod_base = OTHER; note = 2'-O-Methyl-adenosine
  modified_base 60: mod_base = OTHER; note = 2'-O-Methyl-cytidine
  modified_base 61: mod_base = OTHER; note = 2'-O-Methyl-cytidine
  modified_base 66: mod_base = OTHER; note = 2'-O-Methyl-uridine
  modified_base 67: mod_base = OTHER; note = 2'-O-Methyl-cytidine
  modified_base 70: mod_base = OTHER; note = 2'-O-Methyl-cytidine
  modified_base 71: mod_base = OTHER; note = 2'-O-Methyl-uridine
  modified_base 72: mod_base = OTHER; note = 2'-O-Methyl-uridine
  modified_base 73: mod_base = OTHER; note = 2'-O-Methyl-guanosine
  modified_base 74: mod_base = OTHER; note = 2'-O-Methyl-adenosine
  modified_base 75: mod_base = OTHER; note = 2'-O-Methyl-adenosine
  modified_base 76: mod_base = OTHER; note = 2'-O-Methyl-adenosine
  modified_base 77: mod_base = OTHER; note = 2'-O-Methyl-adenosine
  modified_base 78: mod_base = OTHER; note = 2'-O-Methyl-adenosine
  modified_base 79: mod_base = OTHER; note = 2'-O-Methyl-guanosine
  modified_base 80: mod_base = OTHER; note = 2'-O-Methyl-uridine
  modified_base 81: mod_base = OTHER; note = 2'-O-Methyl-guanosine
  modified_base 83: mod_base = OTHER; note = 2'-O-Methyl-cytidine
  modified_base 84: mod_base = OTHER; note = 2'-O-Methyl-adenosine
  modified_base 85: mod_base = OTHER; note = 2'-O-Methyl-cytidine
  modified_base 86: mod_base = OTHER; note = 2'-O-Methyl-cytidine
  modified_base 87: mod_base = OTHER; note = 2'-O-Methyl-guanosine
  modified_base 88: mod_base = OTHER; note = 2'-O-Methyl-adenosine
  modified_base 89: mod_base = OTHER; note = 2'-O-Methyl-guanosine
  modified_base 90: mod_base = OTHER; note = 2'-O-Methyl-uridine
  modified_base 91: mod_base = OTHER; note = 2'-O-Methyl-cytidine
  modified_base 92: mod_base = OTHER; note = 2'-O-Methyl-guanosine
  modified_base 93: mod_base = OTHER; note = 2'-O-Methyl-guanosine
  modified_base 94: mod_base = OTHER; note = 2'-O-Methyl-uridine
  modified_base 95: mod_base = OTHER; note = 2'-O-Methyl-guanosine
  modified_base 96: mod_base = OTHER; note = 2'-O-Methyl-cytidine
  modified_base 97: mod_base = OTHER; note = 2'-O-Methyl-uridine
  modified_base 98: mod_base = OTHER; note = 2'-O-Methyl-uridine phosphorothioate
  modified_base 99: mod_base = OTHER; note = 2'-O-Methyl-uridine phosphorothioate
  modified_base 100: mod_base = OTHER; note = 2'-O-Methyl-uridine
  misc_feature 1..8: note = RNA
  misc_feature 9: note = DNA
  misc_feature 10..100: note = RNA

SEQ ID NO: 2050 - DNA, 100 bp, synthetic construct; identical to SEQ ID NO: 1943
  source 1..100: mol_type = other DNA; note = Description of Artificial Sequence: Synthetic oligonucleotide; note = Description of Combined DNA/RNA Molecule: Synthetic oligonucleotide
  modified_base 1: mod_base = OTHER; note = 2'-O-Methyl-cytidine phosphorothioate
  modified_base 2: mod_base = OTHER; note = 2'-O-Methyl-adenosine phosphorothioate
  modified_base 3: mod_base = OTHER; note = 2'-O-Methyl-guanosine phosphorothioate
  modified_base 14: mod_base = OTHER; note = Nebularine - 2'-deoxynebularine
  modified_base 21: mod_base = OTHER; note = 2'-O-Methyl-guanosine
  modified_base 28: mod_base = OTHER; note = 2'-O-Methyl-adenosine
  modified_base 29: mod_base = OTHER; note = 2'-O-Methyl-guanosine
  modified_base 30: mod_base = OTHER; note = 2'-O-Methyl-cytidine
  modified_base 31: mod_base = OTHER; note = 2'-O-Methyl-uridine
  modified_base 32: mod_base = OTHER; note = 2'-O-Methyl-adenosine
  modified_base 33: mod_base = OTHER; note = 2'-O-Methyl-guanosine
  modified_base 34: mod_base = OTHER; note = 2'-O-Methyl-adenosine
  modified_base 35: mod_base = OTHER; note = 2'-O-Methyl-adenosine
  modified_base 36: mod_base = OTHER; note = 2'-O-Methyl-adenosine
  modified_base 37: mod_base = OTHER; note = 2'-O-Methyl-uridine
  modified_base 38: mod_base = OTHER; note = 2'-O-Methyl-adenosine
  modified_base 39: mod_base = OTHER; note = 2'-O-Methyl-guanosine
  modified_base 40: mod_base = OTHER; note = 2'-O-Methyl-cytidine
  modified_base 41: mod_base = OTHER; note = 2'-O-Methyl-adenosine
  modified_base 42: mod_base = OTHER; note = 2'-O-Methyl-adenosine
  modified_base 46: mod_base = OTHER; note = 2'-O-Methyl-adenosine
  modified_base 48: mod_base = OTHER; note = 2'-O-Methyl-adenosine
  modified_base 50: mod_base = OTHER; note = 2'-O-Methyl-uridine
  modified_base 52: mod_base = OTHER; note = 2'-O-Methyl-adenosine
  modified_base 53: mod_base = OTHER; note = 2'-O-Methyl-guanosine
  modified_base 54: mod_base = OTHER; note = 2'-O-Methyl-guanosine
  modified_base 55: mod_base = OTHER; note = 2'-O-Methyl-cytidine
  modified_base 56: mod_base = OTHER; note = 2'-O-Methyl-uridine
  modified_base 57: mod_base = OTHER; note = 2'-O-Methyl-adenosine
  modified_base 60: mod_base = OTHER; note = 2'-O-Methyl-cytidine
  modified_base 61: mod_base = OTHER; note = 2'-O-Methyl-cytidine
  modified_base 66: mod_base = OTHER; note = 2'-O-Methyl-uridine
  modified_base 67: mod_base = OTHER; note = 2'-O-Methyl-cytidine
  modified_base 70: mod_base = OTHER; note = 2'-O-Methyl-cytidine
  modified_base 71: mod_base = OTHER; note = 2'-O-Methyl-uridine
  modified_base 72: mod_base = OTHER; note = 2'-O-Methyl-uridine
  modified_base 73: mod_base = OTHER; note = 2'-O-Methyl-guanosine
  modified_base 74: mod_base = OTHER; note = 2'-O-Methyl-adenosine
  modified_base 75: mod_base = OTHER; note = 2'-O-Methyl-adenosine
  modified_base 76: mod_base = OTHER; note = 2'-O-Methyl-adenosine
  modified_base 77: mod_base = OTHER; note = 2'-O-Methyl-adenosine
  modified_base 78: mod_base = OTHER; note = 2'-O-Methyl-adenosine
  modified_base 79: mod_base = OTHER; note = 2'-O-Methyl-guanosine
  modified_base 80: mod_base = OTHER; note = 2'-O-Methyl-uridine
  modified_base 81: mod_base = OTHER; note = 2'-O-Methyl-guanosine
  modified_base 83: mod_base = OTHER; note = 2'-O-Methyl-cytidine
  modified_base 84: mod_base = OTHER; note = 2'-O-Methyl-adenosine
  modified_base 85: mod_base = OTHER; note = 2'-O-Methyl-cytidine
  modified_base 86: mod_base = OTHER; note = 2'-O-Methyl-cytidine
  modified_base 87: mod_base = OTHER; note = 2'-O-Methyl-guanosine
  modified_base 88: mod_base = OTHER; note = 2'-O-Methyl-adenosine
  modified_base 89: mod_base = OTHER; note = 2'-O-Methyl-guanosine
  modified_base 90: mod_base = OTHER; note = 2'-O-Methyl-uridine
  modified_base 91: mod_base = OTHER; note = 2'-O-Methyl-cytidine
  modified_base 92: mod_base = OTHER; note = 2'-O-Methyl-guanosine
  modified_base 93: mod_base = OTHER; note = 2'-O-Methyl-guanosine
  modified_base 94: mod_base = OTHER; note = 2'-O-Methyl-uridine
  modified_base 95: mod_base = OTHER; note = 2'-O-Methyl-guanosine
  modified_base 96: mod_base = OTHER; note = 2'-O-Methyl-cytidine
  modified_base 97: mod_base = OTHER; note = 2'-O-Methyl-uridine
  modified_base 98: mod_base = OTHER; note = 2'-O-Methyl-uridine phosphorothioate
  modified_base 99: mod_base = OTHER; note = 2'-O-Methyl-uridine phosphorothioate
  modified_base 100: mod_base = OTHER; note = 2'-O-Methyl-uridine
  misc_feature 1..13: note = RNA
  misc_feature 14: note = DNA
  misc_feature 15..100: note = RNA

SEQ ID NO: 2051 - DNA, 100 bp, synthetic construct; identical to SEQ ID NO: 1944
  source 1..100: mol_type = other DNA; note = Description of Artificial Sequence: Synthetic oligonucleotide; note = Description of Combined DNA/RNA Molecule: Synthetic oligonucleotide
  modified_base 1: mod_base = OTHER; note = 2'-O-Methyl-cytidine phosphorothioate
  modified_base 2: mod_base = OTHER; note = 2'-O-Methyl-adenosine phosphorothioate
  modified_base 3: mod_base = OTHER; note = 2'-O-Methyl-guanosine phosphorothioate
  modified_base 21: mod_base = OTHER; note = 2'-O-Methyl-guanosine
  modified_base 28: mod_base = OTHER; note = 2'-O-Methyl-adenosine
  modified_base 29: mod_base = OTHER; note = 2'-O-Methyl-guanosine
  modified_base 30: mod_base = OTHER; note = 2'-O-Methyl-cytidine
  modified_base 31: mod_base = OTHER; note = 2'-O-Methyl-uridine
  modified_base 32: mod_base = OTHER; note = 2'-O-Methyl-adenosine
  modified_base 33: mod_base = OTHER; note = 2'-O-Methyl-guanosine
  modified_base 34: mod_base = OTHER; note = Nebularine - 2'-deoxynebularine
  modified_base 35: mod_base = OTHER; note = 2'-O-Methyl-adenosine
  modified_base 36: mod_base = OTHER; note = 2'-O-Methyl-adenosine
  modified_base 37: mod_base = OTHER; note = 2'-O-Methyl-uridine
  modified_base 38: mod_base = OTHER; note = 2'-O-Methyl-adenosine
  modified_base 39: mod_base = OTHER; note = 2'-O-Methyl-guanosine
  modified_base 40: mod_base = OTHER; note = 2'-O-Methyl-cytidine
  modified_base 41: mod_base = OTHER; note = 2'-O-Methyl-adenosine
  modified_base 42: mod_base = OTHER; note = 2'-O-Methyl-adenosine
  modified_base 46: mod_base = OTHER; note = 2'-O-Methyl-adenosine
  modified_base 48: mod_base = OTHER; note = 2'-O-Methyl-adenosine
  modified_base 50: mod_base = OTHER; note = 2'-O-Methyl-uridine
  modified_base 52: mod_base = OTHER; note = 2'-O-Methyl-adenosine
  modified_base 53: mod_base = OTHER; note = 2'-O-Methyl-guanosine
  modified_base 54: mod_base = OTHER; note = 2'-O-Methyl-guanosine
  modified_base 55: mod_base = OTHER; note = 2'-O-Methyl-cytidine
  modified_base 56: mod_base = OTHER; note = 2'-O-Methyl-uridine
  modified_base 57: mod_base = OTHER; note = 2'-O-Methyl-adenosine
  modified_base 60: mod_base = OTHER; note = 2'-O-Methyl-cytidine
  modified_base 61: mod_base = OTHER; note = 2'-O-Methyl-cytidine
  modified_base 66: mod_base = OTHER; note = 2'-O-Methyl-uridine
  modified_base 67: mod_base = OTHER; note = 2'-O-Methyl-cytidine
  modified_base 70: mod_base = OTHER; note = 2'-O-Methyl-cytidine
  modified_base 71: mod_base = OTHER; note = 2'-O-Methyl-uridine
  modified_base 72: mod_base = OTHER; note = 2'-O-Methyl-uridine
  modified_base 73: mod_base = OTHER; note = 2'-O-Methyl-guanosine
  modified_base 74: mod_base = OTHER; note = 2'-O-Methyl-adenosine
  modified_base 75: mod_base = OTHER; note = 2'-O-Methyl-adenosine
  modified_base 76: mod_base = OTHER; note = 2'-O-Methyl-adenosine
  modified_base 77: mod_base = OTHER; note = 2'-O-Methyl-adenosine
  modified_base 78: mod_base = OTHER; note = 2'-O-Methyl-adenosine
  modified_base 79: mod_base = OTHER; note = 2'-O-Methyl-guanosine
  modified_base 80: mod_base = OTHER; note = 2'-O-Methyl-uridine
  modified_base 81: mod_base = OTHER; note = 2'-O-Methyl-guanosine
  modified_base 83: mod_base = OTHER; note = 2'-O-Methyl-cytidine
  modified_base 84: mod_base = OTHER; note = 2'-O-Methyl-adenosine
  modified_base 85: mod_base = OTHER; note = 2'-O-Methyl-cytidine
  modified_base 86: mod_base = OTHER; note = 2'-O-Methyl-cytidine
  modified_base 87: mod_base = OTHER; note = 2'-O-Methyl-guanosine
  modified_base 88: mod_base = OTHER; note = 2'-O-Methyl-adenosine
  modified_base 89: mod_base = OTHER; note = 2'-O-Methyl-guanosine
  modified_base 90: mod_base = OTHER; note = 2'-O-Methyl-uridine
  modified_base 91: mod_base = OTHER; note = 2'-O-Methyl-cytidine
  modified_base 92: mod_base = OTHER; note = 2'-O-Methyl-guanosine
  modified_base 93: mod_base = OTHER; note = 2'-O-Methyl-guanosine
  modified_base 94: mod_base = OTHER; note = 2'-O-Methyl-uridine
  modified_base 95: mod_base = OTHER; note = 2'-O-Methyl-guanosine
  modified_base 96: mod_base = OTHER; note = 2'-O-Methyl-cytidine
  modified_base 97: mod_base = OTHER; note = 2'-O-Methyl-uridine
  modified_base 98: mod_base = OTHER; note = 2'-O-Methyl-uridine phosphorothioate
  modified_base 99: mod_base = OTHER; note = 2'-O-Methyl-uridine phosphorothioate
  modified_base 100: mod_base = OTHER; note = 2'-O-Methyl-uridine
  misc_feature 1..33: note = RNA
  misc_feature 34: note = DNA
  misc_feature 35..100: note = RNA

SEQ ID NO: 2052 - DNA, 100 bp, synthetic construct; identical to SEQ ID NO: 1945
  source 1..100: mol_type = other DNA; note = Description of Artificial Sequence: Synthetic oligonucleotide; note = Description of Combined DNA/RNA Molecule: Synthetic oligonucleotide
  modified_base 1: mod_base = OTHER; note = 2'-O-Methyl-cytidine phosphorothioate
  modified_base 2: mod_base = OTHER; note = 2'-O-Methyl-adenosine phosphorothioate
  modified_base 3: mod_base = OTHER; note = 2'-O-Methyl-guanosine phosphorothioate
  modified_base 21: mod_base = OTHER; note = 2'-O-Methyl-guanosine
  modified_base 28: mod_base = OTHER; note = 2'-O-Methyl-adenosine
  modified_base 29: mod_base = OTHER; note = 2'-O-Methyl-guanosine
  modified_base 30: mod_base = OTHER; note = 2'-O-Methyl-cytidine
  modified_base 31: mod_base = OTHER; note = 2'-O-Methyl-uridine
  modified_base 32: mod_base = OTHER; note = 2'-O-Methyl-adenosine
  modified_base 33: mod_base = OTHER; note = 2'-O-Methyl-guanosine
  modified_base 34: mod_base = OTHER; note = Nebularine - 2'-deoxynebularine
  modified_base 35: mod_base = OTHER; note = 2'-O-Methyl-adenosine
  modified_base 36: mod_base = OTHER; note = 2'-O-Methyl-adenosine
  modified_base 37: mod_base = OTHER; note = 2'-O-Methyl-uridine
  modified_base 38: mod_base = OTHER; note = 2'-O-Methyl-adenosine
  modified_base 39: mod_base = OTHER; note = 2'-O-Methyl-guanosine
  modified_base 40: mod_base = OTHER; note = 2'-O-Methyl-cytidine
  modified_base 41: mod_base = OTHER; note = 2'-O-Methyl-adenosine
  modified_base 42: mod_base = OTHER; note = 2'-O-Methyl-adenosine
  modified_base 46: mod_base = OTHER; note = 2'-O-Methyl-adenosine
  modified_base 48: mod_base = OTHER; note = 2'-O-Methyl-adenosine
  modified_base 50: mod_base = OTHER; note = 2'-O-Methyl-uridine
  modified_base 52: mod_base = OTHER; note = 2'-O-Methyl-adenosine
  modified_base 53: mod_base = OTHER; note = 2'-O-Methyl-guanosine
  modified_base 54: mod_base = OTHER; note = 2'-O-Methyl-guanosine
  modified_base 55: mod_base = OTHER; note = 2'-O-Methyl-cytidine
  modified_base 56: mod_base = OTHER; note = 2'-O-Methyl-uridine
  modified_base 57: mod_base = OTHER; note = Nebularine - 2'-deoxynebularine
  modified_base 60: mod_base = OTHER; note = 2'-O-Methyl-cytidine
  modified_base 61: mod_base = OTHER; note = 2'-O-Methyl-cytidine
  modified_base 66: mod_base = OTHER; note = 2'-O-Methyl-uridine
  modified_base 67: mod_base = OTHER; note = 2'-O-Methyl-cytidine
  modified_base 70: mod_base = OTHER; note = 2'-O-Methyl-cytidine
  modified_base 71: mod_base = OTHER; note = 2'-O-Methyl-uridine
  modified_base 72: mod_base = OTHER; note = 2'-O-Methyl-uridine
  modified_base 73: mod_base = OTHER; note = 2'-O-Methyl-guanosine
  modified_base 74: mod_base = OTHER; note = 2'-O-Methyl-adenosine
  modified_base 75: mod_base = OTHER; note = 2'-O-Methyl-adenosine
  modified_base 76: mod_base = OTHER; note = 2'-O-Methyl-adenosine
  modified_base 77: mod_base = OTHER; note = 2'-O-Methyl-adenosine
  modified_base 78: mod_base = OTHER; note = 2'-O-Methyl-adenosine
  modified_base 79: mod_base = OTHER; note = 2'-O-Methyl-guanosine
  modified_base 80: mod_base = OTHER; note = 2'-O-Methyl-uridine
  modified_base 81: mod_base = OTHER; note = 2'-O-Methyl-guanosine
  modified_base 83: mod_base = OTHER; note = 2'-O-Methyl-cytidine
  modified_base 84: mod_base = OTHER; note = 2'-O-Methyl-adenosine
  modified_base 85: mod_base = OTHER; note = 2'-O-Methyl-cytidine
  modified_base 86: mod_base = OTHER; note = 2'-O-Methyl-cytidine
  modified_base 87: mod_base = OTHER; note = 2'-O-Methyl-guanosine
  modified_base 88: mod_base = OTHER; note = 2'-O-Methyl-adenosine
  modified_base 89: mod_base = OTHER; note = 2'-O-Methyl-guanosine
  modified_base 90: mod_base = OTHER; note = 2'-O-Methyl-uridine
  modified_base 91: mod_base = OTHER; note = 2'-O-Methyl-cytidine
  modified_base 92: mod_base = OTHER; note = 2'-O-Methyl-guanosine
  modified_base 93: mod_base = OTHER; note = 2'-O-Methyl-guanosine
  modified_base 94: mod_base = OTHER; note = 2'-O-Methyl-uridine
  modified_base 95: mod_base = OTHER; note = 2'-O-Methyl-guanosine
  modified_base 96: mod_base = OTHER; note = 2'-O-Methyl-cytidine
  modified_base 97: mod_base = OTHER; note = 2'-O-Methyl-uridine
  modified_base 98: mod_base = OTHER; note = 2'-O-Methyl-uridine phosphorothioate
  modified_base 99: mod_base = OTHER; note = 2'-O-Methyl-uridine phosphorothioate
  modified_base 100: mod_base = OTHER; note = 2'-O-Methyl-uridine
  misc_feature 1..33: note = RNA
  misc_feature 34: note = DNA
  misc_feature 35..56: note = RNA
  misc_feature 57: note = DNA
  misc_feature 58..100: note = RNA

SEQ ID NO: 2053 - DNA, 100 bp, synthetic construct; identical to SEQ ID NO: 1946
  source 1..100: mol_type = other DNA; note = Description of Artificial Sequence: Synthetic oligonucleotide; note = Description of Combined DNA/RNA Molecule: Synthetic oligonucleotide
  modified_base 1: mod_base = OTHER; note = 2'-O-Methyl-cytidine phosphorothioate
  modified_base 2: mod_base = OTHER; note = 2'-O-Methyl-adenosine phosphorothioate
  modified_base 3: mod_base = OTHER; note = 2'-O-Methyl-guanosine phosphorothioate
  modified_base 21: mod_base = OTHER; note = 2'-O-Methyl-guanosine
  modified_base 28: mod_base = OTHER; note = 2'-O-Methyl-adenosine
  modified_base 29: mod_base = OTHER; note = 2'-O-Methyl-guanosine
  modified_base 30: mod_base = OTHER; note = 2'-O-Methyl-cytidine
  modified_base 31: mod_base = OTHER; note = 2'-O-Methyl-uridine
  modified_base 32: mod_base = OTHER; note = 2'-O-Methyl-adenosine
  modified_base 33: mod_base = OTHER; note = 2'-O-Methyl-guanosine
  modified_base 34: mod_base = OTHER; note = 2'-O-Methyl-adenosine
  modified_base 35: mod_base = OTHER; note = 2'-O-Methyl-adenosine
  modified_base 36: mod_base = OTHER; note = 2'-O-Methyl-adenosine
  modified_base 37: mod_base = OTHER; note = 2'-O-Methyl-uridine
  modified_base 38: mod_base = OTHER; note = 2'-O-Methyl-adenosine
  modified_base 39: mod_base = OTHER; note = 2'-O-Methyl-guanosine
  modified_base 40: mod_base = OTHER; note = 2'-O-Methyl-cytidine
  modified_base 41: mod_base = OTHER; note = 2'-O-Methyl-adenosine
  modified_base 42: mod_base = OTHER; note = 2'-O-Methyl-adenosine
  modified_base 46: mod_base = OTHER; note = 2'-O-Methyl-adenosine
  modified_base 48: mod_base = OTHER; note = 2'-O-Methyl-adenosine
  modified_base 50: mod_base = OTHER; note = 2'-O-Methyl-uridine
  modified_base 52: mod_base = OTHER; note = 2'-O-Methyl-adenosine
  modified_base 53: mod_base = OTHER; note = 2'-O-Methyl-guanosine
  modified_base 54: mod_base = OTHER; note = 2'-O-Methyl-guanosine
  modified_base 55: mod_base = OTHER; note = 2'-O-Methyl-cytidine
  modified_base 56: mod_base = OTHER; note = 2'-O-Methyl-uridine
  modified_base 57: mod_base = OTHER; note = Nebularine - 2'-deoxynebularine
  modified_base 60: mod_base = OTHER; note = 2'-O-Methyl-cytidine
  modified_base 61: mod_base = OTHER; note = 2'-O-Methyl-cytidine
  modified_base 66: mod_base = OTHER; note = 2'-O-Methyl-uridine
  modified_base 67: mod_base = OTHER; note = 2'-O-Methyl-cytidine
  modified_base 70: mod_base = OTHER; note = 2'-O-Methyl-cytidine
  modified_base 71: mod_base = OTHER; note = 2'-O-Methyl-uridine
  modified_base 72: mod_base = OTHER; note = 2'-O-Methyl-uridine
  modified_base 73: mod_base = OTHER; note = 2'-O-Methyl-guanosine
  modified_base 74: mod_base = OTHER; note = 2'-O-Methyl-adenosine
  modified_base 75: mod_base = OTHER; note = 2'-O-Methyl-adenosine
  modified_base 76: mod_base = OTHER; note = 2'-O-Methyl-adenosine
  modified_base 77: mod_base = OTHER; note = 2'-O-Methyl-adenosine
  modified_base 78: mod_base = OTHER; note = 2'-O-Methyl-adenosine
  modified_base 79: mod_base = OTHER; note = 2'-O-Methyl-guanosine
  modified_base 80: mod_base = OTHER; note = 2'-O-Methyl-uridine
  modified_base 81: mod_base = OTHER; note = 2'-O-Methyl-guanosine
  modified_base 83: mod_base = OTHER; note = 2'-O-Methyl-cytidine
  modified_base 84: mod_base = OTHER; note = 2'-O-Methyl-adenosine
  modified_base 85: mod_base = OTHER; note = 2'-O-Methyl-cytidine
  modified_base 86: mod_base = OTHER; note = 2'-O-Methyl-cytidine
  modified_base 87: mod_base = OTHER; note = 2'-O-Methyl-guanosine
  modified_base 88: mod_base = OTHER; note = 2'-O-Methyl-adenosine
  modified_base 89: mod_base = OTHER; note = 2'-O-Methyl-guanosine
  modified_base 90: mod_base = OTHER; note = 2'-O-Methyl-uridine
  modified_base 91: mod_base = OTHER; note = 2'-O-Methyl-cytidine
  modified_base 92: mod_base = OTHER; note = 2'-O-Methyl-guanosine
  modified_base 93: mod_base = OTHER; note = 2'-O-Methyl-guanosine
  modified_base 94: mod_base = OTHER; note = 2'-O-Methyl-uridine
  modified_base 95: mod_base = OTHER; note = 2'-O-Methyl-guanosine
  modified_base 96: mod_base = OTHER; note = 2'-O-Methyl-cytidine
  modified_base 97: mod_base = OTHER; note = 2'-O-Methyl-uridine
  modified_base 98: mod_base = OTHER; note = 2'-O-Methyl-uridine phosphorothioate
  modified_base 99: mod_base = OTHER; note = 2'-O-Methyl-uridine phosphorothioate
  modified_base 100: mod_base = OTHER; note = 2'-O-Methyl-uridine
  misc_feature 1..56: note = RNA
  misc_feature 57: note = DNA
  misc_feature 58..100: note = RNA

SEQ ID NO: 2054 - DNA, 100 bp, synthetic construct; identical to SEQ ID NO: 1947
  source 1..100: mol_type = other DNA; note = Description of Artificial Sequence: Synthetic oligonucleotide; note = Description of Combined DNA/RNA Molecule: Synthetic oligonucleotide
  modified_base 1: mod_base = OTHER; note = 2'-O-Methyl-cytidine phosphorothioate
  modified_base 2: mod_base = OTHER; note = 2'-O-Methyl-adenosine phosphorothioate
  modified_base 3: mod_base = OTHER; note = 2'-O-Methyl-guanosine phosphorothioate
  modified_base 21: mod_base = OTHER; note = 2'-O-Methyl-guanosine
  modified_base 28: mod_base = OTHER; note = 2'-O-Methyl-adenosine
  modified_base 29: mod_base = OTHER; note = 2'-O-Methyl-guanosine
  modified_base 30: mod_base = OTHER; note = 2'-O-Methyl-cytidine
  modified_base 31: mod_base = OTHER; note = 2'-O-Methyl-uridine
  modified_base 32: mod_base = OTHER; note = 2'-O-Methyl-adenosine
  modified_base 33: mod_base = OTHER; note = 2'-O-Methyl-guanosine
  modified_base 34: mod_base = OTHER; note = 2'-O-Methyl-adenosine
  modified_base 35: mod_base = OTHER; note = 2'-O-Methyl-adenosine
  modified_base 36: mod_base = OTHER; note = 2'-O-Methyl-adenosine
  modified_base 37: mod_base = OTHER; note = 2'-O-Methyl-uridine
  modified_base 38: mod_base = OTHER; note = 2'-O-Methyl-adenosine
  modified_base 39: mod_base = OTHER; note = 2'-O-Methyl-guanosine
  modified_base 40: mod_base = OTHER; note = 2'-O-Methyl-cytidine
  modified_base 41: mod_base = OTHER; note = 2'-O-Methyl-adenosine
  modified_base 42: mod_base = OTHER; note = 2'-O-Methyl-adenosine
  modified_base 46: mod_base = OTHER; note = 2'-O-Methyl-adenosine
  modified_base 48: mod_base = OTHER; note = 2'-O-Methyl-adenosine
  modified_base 50: mod_base = OTHER; note = 2'-O-Methyl-uridine
  modified_base 52: mod_base = OTHER; note = 2'-O-Methyl-adenosine
  modified_base 53: mod_base = OTHER; note = 2'-O-Methyl-guanosine
  modified_base 54: mod_base = OTHER; note = 2'-O-Methyl-guanosine
  modified_base 55: mod_base = OTHER; note = 2'-O-Methyl-cytidine
  modified_base 56: mod_base = OTHER; note = 2'-O-Methyl-uridine
  modified_base 57: mod_base = OTHER; note = 2'-O-Methyl-adenosine
  modified_base 60: mod_base = OTHER; note = 2'-O-Methyl-cytidine
  modified_base 61: mod_base = OTHER; note = 2'-O-Methyl-cytidine
  modified_base 65: mod_base = OTHER; note = Nebularine - 2'-deoxynebularine
  modified_base 66: mod_base = OTHER; note = 2'-O-Methyl-uridine
  modified_base 67: mod_base = OTHER; note = 2'-O-Methyl-cytidine
  modified_base 70: mod_base = OTHER; note = 2'-O-Methyl-cytidine
  modified_base 71: mod_base = OTHER; note = 2'-O-Methyl-uridine
  modified_base 72: mod_base = OTHER; note = 2'-O-Methyl-uridine
  modified_base 73: mod_base = OTHER; note = 2'-O-Methyl-guanosine
  modified_base 74: mod_base = OTHER; note = 2'-O-Methyl-adenosine
  modified_base 75: mod_base = OTHER; note = 2'-O-Methyl-adenosine
  modified_base 76: mod_base = OTHER; note = 2'-O-Methyl-adenosine
  modified_base 77: mod_base = OTHER; note = 2'-O-Methyl-adenosine
  modified_base 78: mod_base = OTHER; note = 2'-O-Methyl-adenosine
  modified_base 79: mod_base = OTHER; note = 2'-O-Methyl-guanosine
  modified_base 80: mod_base = OTHER; note = 2'-O-Methyl-uridine
  modified_base 81: mod_base = OTHER; note = 2'-O-Methyl-guanosine
  modified_base 83: mod_base = OTHER; note = 2'-O-Methyl-cytidine
  modified_base 84: mod_base = OTHER; note = 2'-O-Methyl-adenosine
  modified_base 85: mod_base = OTHER; note = 2'-O-Methyl-cytidine
  modified_base 86: mod_base = OTHER; note = 2'-O-Methyl-cytidine
  modified_base 87: mod_base = OTHER; note = 2'-O-Methyl-guanosine
  modified_base 88: mod_base = OTHER; note = 2'-O-Methyl-adenosine
  modified_base 89: mod_base = OTHER; note = 2'-O-Methyl-guanosine
  modified_base 90: mod_base = OTHER; note = 2'-O-Methyl-uridine
  modified_base 91: mod_base = OTHER; note = 2'-O-Methyl-cytidine
  modified_base 92: mod_base = OTHER; note = 2'-O-Methyl-guanosine
  modified_base 93: mod_base = OTHER; note = 2'-O-Methyl-guanosine
  modified_base 94: mod_base = OTHER; note = 2'-O-Methyl-uridine
  modified_base 95: mod_base = OTHER; note = 2'-O-Methyl-guanosine
  modified_base 96: mod_base = OTHER; note = 2'-O-Methyl-cytidine
  modified_base 97: mod_base = OTHER; note = 2'-O-Methyl-uridine
  modified_base 98: mod_base = OTHER; note = 2'-O-Methyl-uridine phosphorothioate
  modified_base 99: mod_base = OTHER; note = 2'-O-Methyl-uridine phosphorothioate
  modified_base 100: mod_base = OTHER; note = 2'-O-Methyl-uridine
  misc_feature 1..64: note = RNA
  misc_feature 65: note = DNA
  misc_feature 66..100: note = RNA

SEQ ID NO: 2055 - DNA, 100 bp, synthetic construct; identical to SEQ ID NO: 1948
  source 1..100: mol_type = other DNA; note = Description of Artificial Sequence: Synthetic oligonucleotide; note = Description of Combined DNA/RNA Molecule: Synthetic oligonucleotide
  modified_base 1: mod_base = OTHER; note = 2'-O-Methyl-cytidine phosphorothioate
  modified_base 2: mod_base = OTHER; note = 2'-O-Methyl-adenosine phosphorothioate
  modified_base 3: mod_base = OTHER; note = 2'-O-Methyl-guanosine phosphorothioate
  modified_base 21: mod_base = OTHER; note = 2'-O-Methyl-guanosine
  modified_base 28: mod_base = OTHER; note = 2'-O-Methyl-adenosine
  modified_base 29: mod_base = OTHER; note = 2'-O-Methyl-guanosine
  modified_base 30: mod_base = OTHER; note = 2'-O-Methyl-cytidine
  modified_base 31: mod_base = OTHER; note = 2'-O-Methyl-uridine
  modified_base 32: mod_base = OTHER; note = 2'-O-Methyl-adenosine
  modified_base 33: mod_base = OTHER; note = 2'-O-Methyl-guanosine
  modified_base 34: mod_base = OTHER; note = Nebularine - 2'-deoxynebularine
  modified_base 35: mod_base = OTHER; note = 2'-O-Methyl-adenosine
  modified_base 36: mod_base = OTHER; note = 2'-O-Methyl-adenosine
  modified_base 37: mod_base = OTHER; note = 2'-O-Methyl-uridine
  modified_base 38: mod_base = OTHER; note = 2'-O-Methyl-adenosine
  modified_base 39: mod_base = OTHER; note = 2'-O-Methyl-guanosine
  modified_base 40: mod_base = OTHER; note = 2'-O-Methyl-cytidine
  modified_base 41: mod_base = OTHER; note = 2'-O-Methyl-adenosine
  modified_base 42: mod_base = OTHER; note = 2'-O-Methyl-adenosine
  modified_base 46: mod_base = OTHER; note = 2'-O-Methyl-adenosine
  modified_base 48: mod_base = OTHER; note = 2'-O-Methyl-adenosine
  modified_base 50: mod_base = OTHER; note = 2'-O-Methyl-uridine
  modified_base 52: mod_base = OTHER; note = 2'-O-Methyl-adenosine
  modified_base 53: mod_base = OTHER; note = 2'-O-Methyl-guanosine
  modified_base 54: mod_base = OTHER; note = 2'-O-Methyl-guanosine
  modified_base 55: mod_base = OTHER; note = 2'-O-Methyl-cytidine
  modified_base 56: mod_base = OTHER; note = 2'-O-Methyl-uridine
  modified_base 57: mod_base = OTHER; note = Nebularine - 2'-deoxynebularine
  modified_base 60: mod_base = OTHER; note = 2'-O-Methyl-cytidine
  modified_base 61: mod_base = OTHER; note = 2'-O-Methyl-cytidine
  modified_base 65: mod_base = OTHER; note = Nebularine - 2'-deoxynebularine
  modified_base 66: mod_base = OTHER; note = 2'-O-Methyl-uridine
  modified_base 67: mod_base = OTHER; note = 2'-O-Methyl-cytidine
  modified_base 70: mod_base = OTHER; note = 2'-O-Methyl-cytidine
  modified_base 71: mod_base = OTHER; note = 2'-O-Methyl-uridine
  modified_base 72: mod_base = OTHER; note = 2'-O-Methyl-uridine
  modified_base 73: mod_base = OTHER; note = 2'-O-Methyl-guanosine
  modified_base 74: mod_base = OTHER; note = 2'-O-Methyl-adenosine
  modified_base 75: mod_base = OTHER; note = 2'-O-Methyl-adenosine
  modified_base 76: mod_base = OTHER; note = 2'-O-Methyl-adenosine
  modified_base 77: mod_base = OTHER; note = 2'-O-Methyl-adenosine
  modified_base 78: mod_base = OTHER; note = 2'-O-Methyl-adenosine
  modified_base 79: mod_base = OTHER; note = 2'-O-Methyl-guanosine
  modified_base 80: mod_base = OTHER; note = 2'-O-Methyl-uridine
  modified_base 81: mod_base = OTHER; note = 2'-O-Methyl-guanosine
  modified_base 83: mod_base = OTHER; note = 2'-O-Methyl-cytidine
  modified_base 84: mod_base = OTHER; note = 2'-O-Methyl-adenosine
  modified_base 85: mod_base = OTHER; note = 2'-O-Methyl-cytidine
  modified_base 86: mod_base = OTHER; note = 2'-O-Methyl-cytidine
  modified_base 87: mod_base = OTHER; note = 2'-O-Methyl-guanosine
  modified_base 88: mod_base = OTHER; note = 2'-O-Methyl-adenosine
  modified_base 89: mod_base = OTHER; note = 2'-O-Methyl-guanosine
  modified_base 90: mod_base = OTHER; note = 2'-O-Methyl-uridine
  modified_base 91: mod_base = OTHER; note = 2'-O-Methyl-cytidine
  modified_base 92: mod_base = OTHER; note = 2'-O-Methyl-guanosine
  modified_base 93: mod_base = OTHER; note = 2'-O-Methyl-guanosine
  modified_base 94: mod_base = OTHER; note = 2'-O-Methyl-uridine
  modified_base 95: mod_base = OTHER; note = 2'-O-Methyl-guanosine
  modified_base 96: mod_base = OTHER; note = 2'-O-Methyl-cytidine
  modified_base 97: mod_base = OTHER; note = 2'-O-Methyl-uridine
  modified_base 98: mod_base = OTHER; note = 2'-O-Methyl-uridine phosphorothioate
  modified_base 99: mod_base = OTHER; note = 2'-O-Methyl-uridine phosphorothioate
  modified_base 100: mod_base = OTHER; note = 2'-O-Methyl-uridine
  misc_feature 1..33: note = RNA
  misc_feature 34: note = DNA
  misc_feature 35..56: note = RNA
  misc_feature 57: note = DNA
  misc_feature 58..64: note = RNA
  misc_feature 65: note = DNA
  misc_feature 66..100: note = RNA

SEQ ID NO: 2056 - DNA, 100 bp, synthetic construct; identical to SEQ ID NO: 1949
  source 1..100: mol_type = other DNA; note = Description of Artificial Sequence: Synthetic oligonucleotide; note = Description of Combined DNA/RNA Molecule: Synthetic oligonucleotide
  modified_base 1: mod_base = OTHER; note = 2'-O-Methyl-cytidine phosphorothioate
  modified_base 2: mod_base = OTHER; note = 2'-O-Methyl-adenosine phosphorothioate
  modified_base 3: mod_base = OTHER; note = 2'-O-Methyl-guanosine phosphorothioate
  modified_base 21: mod_base = OTHER; note = 2'-O-Methyl-guanosine
  modified_base 28: mod_base = OTHER; note = Nebularine - 2'-deoxynebularine
  modified_base 29: mod_base = OTHER; note = 2'-O-Methyl-guanosine
  modified_base 30: mod_base = OTHER; note = 2'-O-Methyl-cytidine
  modified_base 31: mod_base = OTHER; note = 2'-O-Methyl-uridine
  modified_base 32: mod_base = OTHER; note = 2'-O-Methyl-adenosine
  modified_base 33: mod_base = OTHER; note = 2'-O-Methyl-guanosine
  modified_base 34: mod_base = OTHER; note = Nebularine - 2'-deoxynebularine
  modified_base 35: mod_base = OTHER; note = 2'-O-Methyl-adenosine
  modified_base 36: mod_base = OTHER; note = 2'-O-Methyl-adenosine
  modified_base 37: mod_base = OTHER; note = 2'-O-Methyl-uridine
  modified_base 38: mod_base = OTHER; note = 2'-O-Methyl-adenosine
  modified_base 39: mod_base = OTHER; note = 2'-O-Methyl-guanosine
  modified_base 40: mod_base = OTHER; note = 2'-O-Methyl-cytidine
  modified_base 41: mod_base = OTHER; note = 2'-O-Methyl-adenosine
  modified_base 42: mod_base = OTHER; note = Nebularine - 2'-deoxynebularine
  modified_base 46: mod_base = OTHER; note = 2'-O-Methyl-adenosine
  modified_base 48: mod_base = OTHER; note = 2'-O-Methyl-adenosine
  modified_base 50: mod_base = OTHER; note = 2'-O-Methyl-uridine
  modified_base 52: mod_base = OTHER; note = 2'-O-Methyl-adenosine
  modified_base 53: mod_base = OTHER; note = 2'-O-Methyl-guanosine
  modified_base 54: mod_base = OTHER; note = 2'-O-Methyl-guanosine
  modified_base 55: mod_base = OTHER; note = 2'-O-Methyl-cytidine
  modified_base 56: mod_base = OTHER; note = 2'-O-Methyl-uridine
  modified_base 57: mod_base = OTHER; note = Nebularine - 2'-deoxynebularine
  modified_base 60: mod_base = OTHER; note = 2'-O-Methyl-cytidine
  modified_base 61: mod_base = OTHER; note = 2'-O-Methyl-cytidine
  modified_base 65: mod_base = OTHER; note = Nebularine - 2'-deoxynebularine
  modified_base 66: mod_base = OTHER; note = 2'-O-Methyl-uridine
  modified_base 67: mod_base = OTHER; note = 2'-O-Methyl-cytidine
  modified_base 70: mod_base = OTHER; note = 2'-O-Methyl-cytidine
  modified_base 71: mod_base = OTHER; note = 2'-O-Methyl-uridine
  modified_base 72: mod_base = OTHER; note = 2'-O-Methyl-uridine
  modified_base 73: mod_base = OTHER; note = 2'-O-Methyl-guanosine
  modified_base 74: mod_base = OTHER; note = 2'-O-Methyl-adenosine
  modified_base 75: mod_base = OTHER; note = 2'-O-Methyl-adenosine
  modified_base 76: mod_base = OTHER; note = 2'-O-Methyl-adenosine
  modified_base 77: mod_base = OTHER; note = 2'-O-Methyl-adenosine
  modified_base 78: mod_base = OTHER; note = 2'-O-Methyl-adenosine
  modified_base 79: mod_base = OTHER; note = 2'-O-Methyl-guanosine
  modified_base 80: mod_base = OTHER; note = 2'-O-Methyl-uridine
  modified_base 81: mod_base = OTHER; note = 2'-O-Methyl-guanosine
  modified_base 83: mod_base = OTHER; note = 2'-O-Methyl-cytidine
  modified_base 84: mod_base = OTHER; note = 2'-O-Methyl-adenosine
  modified_base 85: mod_base = OTHER; note = 2'-O-Methyl-cytidine
  modified_base 86: mod_base = OTHER; note = 2'-O-Methyl-cytidine
  modified_base 87: mod_base = OTHER; note = 2'-O-Methyl-guanosine
  modified_base 88: mod_base = OTHER; note = 2'-O-Methyl-adenosine
  modified_base 89: mod_base = OTHER; note = 2'-O-Methyl-guanosine
  modified_base 90: mod_base = OTHER; note = 2'-O-Methyl-uridine
  modified_base 91: mod_base = OTHER; note = 2'-O-Methyl-cytidine
  modified_base 92: mod_base = OTHER; note = 2'-O-Methyl-guanosine
  modified_base 93: mod_base = OTHER; note = 2'-O-Methyl-guanosine
  modified_base 94: mod_base = OTHER; note = 2'-O-Methyl-uridine
  modified_base 95: mod_base = OTHER; note = 2'-O-Methyl-guanosine
  modified_base 96: mod_base = OTHER; note = 2'-O-Methyl-cytidine
  modified_base 97: mod_base = OTHER; note = 2'-O-Methyl-uridine
  modified_base 98: mod_base = OTHER; note = 2'-O-Methyl-uridine phosphorothioate
  modified_base 99: mod_base = OTHER; note = 2'-O-Methyl-uridine phosphorothioate
  modified_base 100: mod_base = OTHER; note = 2'-O-Methyl-uridine
  misc_feature 1..27: note = RNA
  misc_feature 28: note = DNA
  misc_feature 29..33: note = RNA
  misc_feature 34: note = DNA
  misc_feature 35..41: note = RNA
  misc_feature 42: note = DNA
  misc_feature 43..56: note = RNA
  misc_feature 57: note = DNA
  misc_feature 58..64: note = RNA
  misc_feature 65: note = DNA
  misc_feature 66..100: note = RNA

SEQ ID NO: 2057 - RNA, 100 nt, synthetic construct; identical to SEQ ID NO: 1896
  source 1..100: mol_type = other RNA; note = Description of Artificial Sequence: Synthetic polynucleotide
  modified_base 1: mod_base = OTHER; note = 2'-O-Methyl-cytidine phosphorothioate
  modified_base 2: mod_base = OTHER; note = 2'-O-Methyl-adenosine phosphorothioate
  modified_base 3: mod_base = OTHER; note = 2'-O-Methyl-guanosine
  modified_base 9: mod_base = OTHER; note = Nebularine - ribonebularine
  modified_base 14: mod_base = OTHER; note = Nebularine - ribonebularine
  modified_base 21: mod_base = OTHER; note = 2'-O-Methyl-guanosine
  modified_base 28: mod_base = OTHER; note = 2'-O-Methyl-adenosine
  modified_base 29: mod_base = OTHER; note = 2'-O-Methyl-guanosine
  modified_base 30: mod_base = OTHER; note = 2'-O-Methyl-cytidine
  modified_base 31: mod_base = OTHER; note = 2'-O-Methyl-uridine
  modified_base 32: mod_base = OTHER; note = 2'-O-Methyl-adenosine
  modified_base 33: mod_base = OTHER; note = 2'-O-Methyl-guanosine
  modified_base 34: mod_base = OTHER; note = 2'-O-Methyl-adenosine
  modified_base 35: mod_base = OTHER; note = 2'-O-Methyl-adenosine
  modified_base 36: mod_base = OTHER; note = 2'-O-Methyl-adenosine
  modified_base 37: mod_base = OTHER; note = 2'-O-Methyl-uridine
  modified_base 38: mod_base = OTHER; note = 2'-O-Methyl-adenosine
  modified_base 39: mod_base = OTHER; note = 2'-O-Methyl-guanosine
  modified_base 40: mod_base = OTHER; note = 2'-O-Methyl-cytidine
  modified_base 41: mod_base = OTHER; note = 2'-O-Methyl-adenosine
  modified_base 42: mod_base = OTHER; note = 2'-O-Methyl-adenosine
  modified_base 46: mod_base = OTHER; note = 2'-O-Methyl-adenosine
  modified_base 48: mod_base = OTHER; note = 2'-O-Methyl-adenosine
  modified_base 50: mod_base = OTHER; note = 2'-O-Methyl-uridine
  modified_base 52: mod_base = OTHER; note = 2'-O-Methyl-adenosine
  modified_base 53: mod_base = OTHER; note = 2'-O-Methyl-guanosine
  modified_base 54: mod_base = OTHER; note = 2'-O-Methyl-guanosine
  modified_base 55: mod_base = OTHER; note = 2'-O-Methyl-cytidine
  modified_base 56: mod_base = OTHER; note = 2'-O-Methyl-uridine
  modified_base 57: mod_base = OTHER; note = 2'-O-Methyl-adenosine
  modified_base 60: mod_base = OTHER; note = 2'-O-Methyl-cytidine
  modified_base 61: mod_base = OTHER; note = 2'-O-Methyl-cytidine
  modified_base 66: mod_base = OTHER; note = 2'-O-Methyl-uridine
  modified_base 67: mod_base = OTHER; note = 2'-O-Methyl-cytidine
  modified_base 70: mod_base = OTHER; note = 2'-O-Methyl-cytidine
  modified_base 71: mod_base = OTHER; note = 2'-O-Methyl-uridine
  modified_base 72: mod_base = OTHER; note = 2'-O-Methyl-uridine
  modified_base 73: mod_base = OTHER; note = 2'-O-Methyl-guanosine
  modified_base 74: mod_base = OTHER; note = 2'-O-Methyl-adenosine
  modified_base 75: mod_base = OTHER; note = 2'-O-Methyl-adenosine
  modified_base 76: mod_base = OTHER; note = 2'-O-Methyl-adenosine
  modified_base 77: mod_base = OTHER; note = 2'-O-Methyl-adenosine
  modified_base 78: mod_base = OTHER; note = 2'-O-Methyl-adenosine
  modified_base 79: mod_base = OTHER; note = 2'-O-Methyl-guanosine
  modified_base 80: mod_base = OTHER; note = 2'-O-Methyl-uridine
  modified_base 81: mod_base = OTHER; note = 2'-O-Methyl-guanosine
  modified_base 83: mod_base = OTHER; note = 2'-O-Methyl-cytidine
  modified_base 84: mod_base = OTHER; note = 2'-O-Methyl-adenosine
  modified_base 85: mod_base = OTHER; note = 2'-O-Methyl-cytidine
  modified_base 86: mod_base = OTHER; note = 2'-O-Methyl-cytidine
  modified_base 87: mod_base = OTHER; note = 2'-O-Methyl-guanosine
  modified_base 88: mod_base = OTHER; note = 2'-O-Methyl-adenosine
  modified_base 89: mod_base = OTHER; note = 2'-O-Methyl-guanosine
  modified_base 90: mod_base = OTHER; note = 2'-O-Methyl-uridine
  modified_base 91: mod_base = OTHER; note = 2'-O-Methyl-cytidine
  modified_base 92: mod_base = OTHER; note = 2'-O-Methyl-guanosine
  modified_base 93: mod_base = OTHER; note = 2'-O-Methyl-guanosine
  modified_base 94: mod_base = OTHER; note = 2'-O-Methyl-uridine
  modified_base 95: mod_base = OTHER; note = 2'-O-Methyl-guanosine
  modified_base 96: mod_base = OTHER; note = 2'-O-Methyl-cytidine
  modified_base 97: mod_base = OTHER; note = 2'-O-Methyl-uridine
  modified_base 98: mod_base = OTHER; note = 2'-O-Methyl-uridine phosphorothioate
  modified_base 99: mod_base = OTHER; note = 2'-O-Methyl-uridine phosphorothioate
  modified_base 100: mod_base = OTHER; note = 2'-O-Methyl-uridine

SEQ ID NO: 2058 - RNA, 100 nt, synthetic construct; identical to SEQ ID NO: 1897
  source 1..100: mol_type = other RNA; note = Description of Artificial Sequence: Synthetic polynucleotide
  modified_base 1: mod_base = OTHER; note = 2'-O-Methyl-cytidine phosphorothioate
  modified_base 2: mod_base = OTHER; note = 2'-O-Methyl-adenosine phosphorothioate
  modified_base 3: mod_base = OTHER; note = 2'-O-Methyl-guanosine
  modified_base 9: mod_base = OTHER; note = Nebularine - ribonebularine
  modified_base 21: mod_base = OTHER; note = 2'-O-Methyl-guanosine
  modified_base 28: mod_base = OTHER; note = 2'-O-Methyl-adenosine
  modified_base 29: mod_base = OTHER; note = 2'-O-Methyl-guanosine
  modified_base 30: mod_base = OTHER; note = 2'-O-Methyl-cytidine
  modified_base 31: mod_base = OTHER; note = 2'-O-Methyl-uridine
  modified_base 32: mod_base = OTHER; note = 2'-O-Methyl-adenosine
  modified_base 33: mod_base = OTHER; note = 2'-O-Methyl-guanosine
  modified_base 34: mod_base = OTHER; note = 2'-O-Methyl-adenosine
  modified_base 35: mod_base = OTHER; note = 2'-O-Methyl-adenosine
  modified_base 36: mod_base = OTHER; note = 2'-O-Methyl-adenosine
  modified_base 37: mod_base = OTHER; note = 2'-O-Methyl-uridine
  modified_base 38: mod_base = OTHER; note = 2'-O-Methyl-adenosine
  modified_base 39: mod_base = OTHER; note = 2'-O-Methyl-guanosine
  modified_base 40: mod_base = OTHER; note = 2'-O-Methyl-cytidine
  modified_base 41: mod_base = OTHER; note = 2'-O-Methyl-adenosine
  modified_base 42: mod_base = OTHER; note = 2'-O-Methyl-adenosine
  modified_base 46: mod_base = OTHER; note = 2'-O-Methyl-adenosine
  modified_base 48: mod_base = OTHER; note = 2'-O-Methyl-adenosine
  modified_base 50: mod_base = OTHER; note = 2'-O-Methyl-uridine
  modified_base 52: mod_base = OTHER; note = 2'-O-Methyl-adenosine
  modified_base 53: mod_base = OTHER; note = 2'-O-Methyl-guanosine
  modified_base 54: mod_base = OTHER; note = 2'-O-Methyl-guanosine
  modified_base 55: mod_base = OTHER; note = 2'-O-Methyl-cytidine
  modified_base 56: mod_base = OTHER; note = 2'-O-Methyl-uridine
  modified_base 57: mod_base = OTHER; note = 2'-O-Methyl-adenosine
  modified_base 60: mod_base = OTHER; note = 2'-O-Methyl-cytidine
  modified_base 61: mod_base = OTHER; note = 2'-O-Methyl-cytidine
  modified_base 66: mod_base = OTHER; note = 2'-O-Methyl-uridine
  modified_base 67: mod_base = OTHER; note = 2'-O-Methyl-cytidine
  modified_base 70: mod_base = OTHER; note = 2'-O-Methyl-cytidine
  modified_base 71: mod_base = OTHER; note = 2'-O-Methyl-uridine
  modified_base 72: mod_base = OTHER; note = 2'-O-Methyl-uridine
  modified_base 73: mod_base = OTHER; note = 2'-O-Methyl-guanosine
  modified_base 74: mod_base = OTHER; note = 2'-O-Methyl-adenosine
  modified_base 75: mod_base = OTHER; note = 2'-O-Methyl-adenosine
  modified_base 76: mod_base = OTHER; note = 2'-O-Methyl-adenosine
  modified_base 77: mod_base = OTHER; note = 2'-O-Methyl-adenosine
  modified_base 78: mod_base = OTHER; note = 2'-O-Methyl-adenosine
  modified_base 79: mod_base = OTHER; note = 2'-O-Methyl-guanosine
  modified_base 80: mod_base = OTHER; note = 2'-O-Methyl-uridine
  modified_base 81: mod_base = OTHER; note = 2'-O-Methyl-guanosine
  modified_base 83: mod_base = OTHER; note = 2'-O-Methyl-cytidine
  modified_base 84: mod_base = OTHER; note = 2'-O-Methyl-adenosine
  modified_base 85: mod_base = OTHER; note = 2'-O-Methyl-cytidine
  modified_base 86: mod_base = OTHER; note = 2'-O-Methyl-cytidine
  modified_base 87: mod_base = OTHER; note = 2'-O-Methyl-guanosine
  modified_base 88: mod_base = OTHER; note = 2'-O-Methyl-adenosine
  modified_base 89: mod_base = OTHER; note = 2'-O-Methyl-guanosine
  modified_base 90: mod_base = OTHER; note = 2'-O-Methyl-uridine
  modified_base 91: mod_base = OTHER; note = 2'-O-Methyl-cytidine
  modified_base 92: mod_base = OTHER; note = 2'-O-Methyl-guanosine
  modified_base 93: mod_base = OTHER; note = 2'-O-Methyl-guanosine
  modified_base 94: mod_base = OTHER; note = 2'-O-Methyl-uridine
  modified_base 95: mod_base = OTHER; note = 2'-O-Methyl-guanosine
  modified_base 96: mod_base = OTHER; note = 2'-O-Methyl-cytidine
  modified_base 97: mod_base = OTHER; note = 2'-O-Methyl-uridine
  modified_base 98: mod_base = OTHER; note = 2'-O-Methyl-uridine phosphorothioate
  modified_base 99: mod_base = OTHER; note = 2'-O-Methyl-uridine phosphorothioate
  modified_base 100: mod_base = OTHER; note = 2'-O-Methyl-uridine

SEQ ID NO: 2059 - RNA, 100 nt, synthetic construct; identical to SEQ ID NO: 1898
  source 1..100: mol_type = other RNA; note = Description of Artificial Sequence: Synthetic polynucleotide
  modified_base 1: mod_base = OTHER; note = 2'-O-Methyl-cytidine phosphorothioate
  modified_base 2: mod_base = OTHER; note = 2'-O-Methyl-adenosine phosphorothioate
  modified_base 3: mod_base = OTHER; note = 2'-O-Methyl-guanosine
  modified_base 14: mod_base = OTHER; note = Nebularine - ribonebularine
  modified_base 21: mod_base = OTHER; note = 2'-O-Methyl-guanosine
  modified_base 28: mod_base = OTHER; note = 2'-O-Methyl-adenosine
  modified_base 29: mod_base = OTHER; note = 2'-O-Methyl-guanosine
  modified_base 30: mod_base = OTHER; note = 2'-O-Methyl-cytidine
  modified_base 31: mod_base = OTHER; note = 2'-O-Methyl-uridine
  modified_base 32: mod_base = OTHER; note = 2'-O-Methyl-adenosine
  modified_base 33: mod_base = OTHER; note = 2'-O-Methyl-guanosine
  modified_base 34: mod_base = OTHER; note = 2'-O-Methyl-adenosine
  modified_base 35: mod_base = OTHER; note = 2'-O-Methyl-adenosine
  modified_base 36: mod_base = OTHER; note = 2'-O-Methyl-adenosine
  modified_base 37: mod_base = OTHER; note = 2'-O-Methyl-uridine
  modified_base 38: mod_base = OTHER; note = 2'-O-Methyl-adenosine
  modified_base 39: mod_base = OTHER; note = 2'-O-Methyl-guanosine
  modified_base 40: mod_base = OTHER; note = 2'-O-Methyl-cytidine
  modified_base 41: mod_base = OTHER; note = 2'-O-Methyl-adenosine
  modified_base 42: mod_base = OTHER; note = 2'-O-Methyl-adenosine
  modified_base 46: mod_base = OTHER; note = 2'-O-Methyl-adenosine
  modified_base 48: mod_base = OTHER; note = 2'-O-Methyl-adenosine
  modified_base 50: mod_base = OTHER; note = 2'-O-Methyl-uridine
  modified_base 52: mod_base = OTHER; note = 2'-O-Methyl-adenosine
  modified_base 53: mod_base = OTHER; note = 2'-O-Methyl-guanosine
  modified_base 54: mod_base = OTHER; note = 2'-O-Methyl-guanosine
  modified_base 55: mod_base = OTHER; note = 2'-O-Methyl-cytidine
  modified_base 56: mod_base = OTHER; note = 2'-O-Methyl-uridine
  modified_base 57: mod_base = OTHER; note = 2'-O-Methyl-adenosine
  modified_base 60: mod_base = OTHER; note = 2'-O-Methyl-cytidine
  modified_base 61: mod_base = OTHER; note = 2'-O-Methyl-cytidine
  modified_base 66: mod_base = OTHER; note = 2'-O-Methyl-uridine
  modified_base 67: mod_base = OTHER; note = 2'-O-Methyl-cytidine
  modified_base 70: mod_base = OTHER; note = 2'-O-Methyl-cytidine
  modified_base 71: mod_base = OTHER; note = 2'-O-Methyl-uridine
  modified_base 72: mod_base = OTHER; note = 2'-O-Methyl-uridine
  modified_base 73: mod_base = OTHER; note = 2'-O-Methyl-guanosine
  modified_base 74: mod_base = OTHER; note = 2'-O-Methyl-adenosine
  modified_base 75: mod_base = OTHER; note = 2'-O-Methyl-adenosine
  modified_base 76: mod_base = OTHER; note = 2'-O-Methyl-adenosine
  modified_base 77: mod_base = OTHER; note = 2'-O-Methyl-adenosine
  modified_base 78: mod_base = OTHER; note = 2'-O-Methyl-adenosine
  modified_base 79: mod_base = OTHER; note = 2'-O-Methyl-guanosine
  modified_base 80: mod_base = OTHER; note = 2'-O-Methyl-uridine
  modified_base 81: mod_base = OTHER; note = 2'-O-Methyl-guanosine
  modified_base 83: mod_base = OTHER; note = 2'-O-Methyl-cytidine
  modified_base 84: mod_base = OTHER; note = 2'-O-Methyl-adenosine
  modified_base 85: mod_base = OTHER; note = 2'-O-Methyl-cytidine
  modified_base 86: mod_base = OTHER; note = 2'-O-Methyl-cytidine
  modified_base 87: mod_base = OTHER; note = 2'-O-Methyl-guanosine
  modified_base 88: mod_base = OTHER; note = 2'-O-Methyl-adenosine
  modified_base 89: mod_base = OTHER; note = 2'-O-Methyl-guanosine
  modified_base 90: mod_base = OTHER; note = 2'-O-Methyl-uridine
  modified_base 91: mod_base = OTHER; note = 2'-O-Methyl-cytidine
  modified_base 92: mod_base = OTHER; note = 2'-O-Methyl-guanosine
  modified_base 93: mod_base = OTHER; note = 2'-O-Methyl-guanosine
  modified_base 94: mod_base = OTHER; note = 2'-O-Methyl-uridine
  modified_base 95: mod_base = OTHER; note = 2'-O-Methyl-guanosine
  modified_base 96: mod_base = OTHER; note = 2'-O-Methyl-cytidine
  modified_base 97: mod_base = OTHER; note = 2'-O-Methyl-uridine
  modified_base 98: mod_base = OTHER; note = 2'-O-Methyl-uridine phosphorothioate
  modified_base 99: mod_base = OTHER; note = 2'-O-Methyl-uridine phosphorothioate
  modified_base 100: mod_base = OTHER; note = 2'-O-Methyl-uridine

SEQ ID NO: 2060 - RNA, 100 nt, synthetic construct; identical to SEQ ID NO: 1899
  source 1..100: mol_type = other RNA; note = Description of Artificial Sequence: Synthetic polynucleotide
  modified_base 1: mod_base = OTHER; note = 2'-O-Methyl-cytidine phosphorothioate
  modified_base 2: mod_base = OTHER; note = 2'-O-Methyl-adenosine phosphorothioate
  modified_base 3: mod_base = OTHER; note = 2'-O-Methyl-guanosine
  modified_base 21: mod_base = OTHER; note = 2'-O-Methyl-guanosine
  modified_base 28: mod_base = OTHER; note = 2'-O-Methyl-adenosine
  modified_base 29: mod_base = OTHER; note = 2'-O-Methyl-guanosine
  modified_base 30: mod_base = OTHER; note = 2'-O-Methyl-cytidine
  modified_base 31: mod_base = OTHER; note = 2'-O-Methyl-uridine
  modified_base 32: mod_base = OTHER; note = 2'-O-Methyl-adenosine
  modified_base 33: mod_base = OTHER; note = 2'-O-Methyl-guanosine
  modified_base 34: mod_base = OTHER; note = Nebularine - ribonebularine
  modified_base 35: mod_base = OTHER; note = 2'-O-Methyl-adenosine
  modified_base 36: mod_base = OTHER; note = 2'-O-Methyl-adenosine
  modified_base 37: mod_base = OTHER; note = 2'-O-Methyl-uridine
  modified_base 38: mod_base = OTHER; note = 2'-O-Methyl-adenosine
  modified_base 39: mod_base = OTHER; note = 2'-O-Methyl-guanosine
  modified_base 40: mod_base = OTHER; note = 2'-O-Methyl-cytidine
  modified_base 41: mod_base = OTHER; note = 2'-O-Methyl-adenosine
  modified_base 42: mod_base = OTHER; note = 2'-O-Methyl-adenosine
  modified_base 46: mod_base = OTHER; note = 2'-O-Methyl-adenosine
  modified_base 48: mod_base = OTHER; note = 2'-O-Methyl-adenosine
  modified_base 50: mod_base = OTHER; note = 2'-O-Methyl-uridine
  modified_base 52: mod_base = OTHER; note = 2'-O-Methyl-adenosine
  modified_base 53: mod_base = OTHER; note = 2'-O-Methyl-guanosine
  modified_base 54: mod_base = OTHER; note = 2'-O-Methyl-guanosine
  modified_base 55: mod_base = OTHER; note = 2'-O-Methyl-cytidine
  modified_base 56: mod_base = OTHER; note = 2'-O-Methyl-uridine
  modified_base 57: mod_base = OTHER; note = 2'-O-Methyl-adenosine
  modified_base 60: mod_base = OTHER; note = 2'-O-Methyl-cytidine
  modified_base 61: mod_base = OTHER; note = 2'-O-Methyl-cytidine
  modified_base 66: mod_base = OTHER; note = 2'-O-Methyl-uridine
  modified_base 67: mod_base = OTHER; note = 2'-O-Methyl-cytidine
  modified_base 70: mod_base = OTHER; note = 2'-O-Methyl-cytidine
  modified_base 71: mod_base = OTHER; note = 2'-O-Methyl-uridine
  modified_base 72: mod_base = OTHER; note = 2'-O-Methyl-uridine
  modified_base 73: mod_base = OTHER; note = 2'-O-Methyl-guanosine
  modified_base 74: mod_base = OTHER; note = 2'-O-Methyl-adenosine
  modified_base 75: mod_base = OTHER; note = 2'-O-Methyl-adenosine
  modified_base 76: mod_base = OTHER; note = 2'-O-Methyl-adenosine
  modified_base 77: mod_base = OTHER; note = 2'-O-Methyl-adenosine
  modified_base 78: mod_base = OTHER; note = 2'-O-Methyl-adenosine
  modified_base 79: mod_base = OTHER; note = 2'-O-Methyl-guanosine
  modified_base 80: mod_base = OTHER; note = 2'-O-Methyl-uridine
  modified_base 81: mod_base = OTHER; note = 2'-O-Methyl-guanosine
  modified_base 83: mod_base = OTHER; note = 2'-O-Methyl-cytidine
  modified_base 84: mod_base = OTHER; note = 2'-O-Methyl-adenosine
  modified_base 85: mod_base = OTHER; note = 2'-O-Methyl-cytidine
  modified_base 86: mod_base = OTHER; note = 2'-O-Methyl-cytidine
  modified_base 87: mod_base = OTHER; note = 2'-O-Methyl-guanosine
  modified_base 88: mod_base = OTHER; note = 2'-O-Methyl-adenosine
  modified_base 89: mod_base = OTHER; note = 2'-O-Methyl-guanosine
  modified_base 90: mod_base = OTHER; note = 2'-O-Methyl-uridine
  modified_base 91: mod_base = OTHER; note = 2'-O-Methyl-cytidine
  modified_base 92: mod_base = OTHER; note = 2'-O-Methyl-guanosine
  modified_base 93: mod_base = OTHER; note = 2'-O-Methyl-guanosine
  modified_base 94: mod_base = OTHER; note = 2'-O-Methyl-uridine
  modified_base 95: mod_base = OTHER; note = 2'-O-Methyl-guanosine
  modified_base 96: mod_base = OTHER; note = 2'-O-Methyl-cytidine
  modified_base 97: mod_base = OTHER; note = 2'-O-Methyl-uridine
  modified_base 98: mod_base = OTHER; note = 2'-O-Methyl-uridine phosphorothioate
  modified_base 99: mod_base = OTHER; note = 2'-O-Methyl-uridine phosphorothioate
  modified_base 100: mod_base = OTHER; note = 2'-O-Methyl-uridine

SEQ ID NO: 2061 - RNA, 100 nt, synthetic construct; identical to SEQ ID NO: 1900
  source 1..100: mol_type = other RNA; note = Description of Artificial Sequence: Synthetic polynucleotide
  modified_base 1: mod_base = OTHER; note = 2'-O-Methyl-cytidine phosphorothioate
  modified_base 2: mod_base = OTHER; note = 2'-O-Methyl-adenosine phosphorothioate
  modified_base 3: mod_base = OTHER; note = 2'-O-Methyl-guanosine
  modified_base 21: mod_base = OTHER; note = 2'-O-Methyl-guanosine
  modified_base 28: mod_base = OTHER; note = 2'-O-Methyl-adenosine
  modified_base 29: mod_base = OTHER; note = 2'-O-Methyl-guanosine
  modified_base 30: mod_base = OTHER; note = 2'-O-Methyl-cytidine
  modified_base 31: mod_base = OTHER; note = 2'-O-Methyl-uridine
  modified_base 32: mod_base = OTHER; note = 2'-O-Methyl-adenosine
  modified_base 33: mod_base = OTHER; note = 2'-O-Methyl-guanosine
  modified_base 34: mod_base = OTHER; note = Nebularine - ribonebularine
  modified_base 35: mod_base = OTHER; note = 2'-O-Methyl-adenosine
  modified_base 36: mod_base = OTHER; note = 2'-O-Methyl-adenosine
  modified_base 37: mod_base = OTHER; note = 2'-O-Methyl-uridine
  modified_base 38: mod_base = OTHER; note = 2'-O-Methyl-adenosine
  modified_base 39: mod_base = OTHER; note = 2'-O-Methyl-guanosine
  modified_base 40: mod_base = OTHER; note = 2'-O-Methyl-cytidine
  modified_base 41: mod_base = OTHER; note = 2'-O-Methyl-adenosine
  modified_base 42: mod_base = OTHER; note = 2'-O-Methyl-adenosine
  modified_base 46: mod_base = OTHER; note = 2'-O-Methyl-adenosine
  modified_base 48: mod_base = OTHER; note = 2'-O-Methyl-adenosine
  modified_base 50: mod_base = OTHER; note = 2'-O-Methyl-uridine
  modified_base 52: mod_base = OTHER; note = 2'-O-Methyl-adenosine
  modified_base 53: mod_base = OTHER; note = 2'-O-Methyl-guanosine
  modified_base 54: mod_base = OTHER; note = 2'-O-Methyl-guanosine
  modified_base 55: mod_base = OTHER; note = 2'-O-Methyl-cytidine
  modified_base 56: mod_base = OTHER; note = 2'-O-Methyl-uridine
  modified_base 57: mod_base = OTHER; note = Nebularine - ribonebularine
  modified_base 60: mod_base = OTHER; note = 2'-O-Methyl-cytidine
  modified_base 61: mod_base = OTHER; note = 2'-O-Methyl-cytidine
  modified_base 66: mod_base = OTHER; note = 2'-O-Methyl-uridine
  modified_base 67: mod_base = OTHER; note = 2'-O-Methyl-cytidine
  modified_base 70: mod_base = OTHER; note = 2'-O-Methyl-cytidine
  modified_base 71: mod_base = OTHER; note = 2'-O-Methyl-uridine
  modified_base 72: mod_base = OTHER; note = 2'-O-Methyl-uridine
  modified_base 73: mod_base = OTHER; note = 2'-O-Methyl-guanosine
  modified_base 74: mod_base = OTHER; note = 2'-O-Methyl-adenosine
  modified_base 75: mod_base = OTHER; note = 2'-O-Methyl-adenosine
  modified_base 76: mod_base = OTHER; note = 2'-O-Methyl-adenosine
  modified_base 77: mod_base = OTHER; note = 2'-O-Methyl-adenosine
  modified_base 78: mod_base = OTHER; note = 2'-O-Methyl-adenosine
  modified_base 79: mod_base = OTHER; note = 2'-O-Methyl-guanosine
  modified_base 80: mod_base = OTHER; note = 2'-O-Methyl-uridine
  modified_base 81: mod_base = OTHER; note = 2'-O-Methyl-guanosine
  modified_base 83: mod_base = OTHER; note = 2'-O-Methyl-cytidine
  modified_base 84: mod_base = OTHER; note = 2'-O-Methyl-adenosine
  modified_base 85: mod_base = OTHER; note = 2'-O-Methyl-cytidine
  modified_base 86: mod_base = OTHER; note = 2'-O-Methyl-cytidine
  modified_base 87: mod_base = OTHER; note = 2'-O-Methyl-guanosine
  modified_base 88: mod_base = OTHER; note = 2'-O-Methyl-adenosine
  modified_base 89: mod_base = OTHER; note = 2'-O-Methyl-guanosine
  modified_base 90: mod_base = OTHER; note = 2'-O-Methyl-uridine
  modified_base 91: mod_base = OTHER; note = 2'-O-Methyl-cytidine
  modified_base 92: mod_base = OTHER; note = 2'-O-Methyl-guanosine
  modified_base 93: mod_base = OTHER; note = 2'-O-Methyl-guanosine
  modified_base 94: mod_base = OTHER; note = 2'-O-Methyl-uridine
  modified_base 95: mod_base = OTHER; note = 2'-O-Methyl-guanosine
  modified_base 96: mod_base = OTHER; note = 2'-O-Methyl-cytidine
  modified_base 97: mod_base = OTHER; note = 2'-O-Methyl-uridine
  modified_base 98: mod_base = OTHER; note = 2'-O-Methyl-uridine phosphorothioate
  modified_base 99: mod_base = OTHER; note = 2'-O-Methyl-uridine phosphorothioate
  modified_base 100: mod_base = OTHER; note = 2'-O-Methyl-uridine

SEQ ID NO: 2062 - RNA, 100 nt, synthetic construct; identical to SEQ ID NO: 1901
  source 1..100: mol_type = other RNA; note = Description of Artificial Sequence: Synthetic polynucleotide
  modified_base 1: mod_base = OTHER; note = 2'-O-Methyl-cytidine phosphorothioate
  modified_base 2: mod_base = OTHER; note = 2'-O-Methyl-adenosine phosphorothioate
  modified_base 3: mod_base = OTHER; note = 2'-O-Methyl-guanosine
  modified_base 21: mod_base = OTHER; note = 2'-O-Methyl-guanosine
  modified_base 28: mod_base = OTHER; note = 2'-O-Methyl-adenosine
  modified_base 29: mod_base = OTHER; note = 2'-O-Methyl-guanosine
  modified_base 30: mod_base = OTHER; note = 2'-O-Methyl-cytidine
  modified_base 31: mod_base = OTHER; note = 2'-O-Methyl-uridine
  modified_base 32: mod_base = OTHER; note = 2'-O-Methyl-adenosine
  modified_base 33: mod_base = OTHER; note = 2'-O-Methyl-guanosine
  modified_base 34: mod_base = OTHER; note = 2'-O-Methyl-adenosine
  modified_base 35: mod_base = OTHER; note = 2'-O-Methyl-adenosine
  modified_base 36: mod_base = OTHER; note = 2'-O-Methyl-adenosine
  modified_base 37: mod_base = OTHER; note = 2'-O-Methyl-uridine
  modified_base 38: mod_base = OTHER; note = 2'-O-Methyl-adenosine
  modified_base 39: mod_base = OTHER; note = 2'-O-Methyl-guanosine
  modified_base 40: mod_base = OTHER; note = 2'-O-Methyl-cytidine
  modified_base 41: mod_base = OTHER; note = 2'-O-Methyl-adenosine
  modified_base 42: mod_base = OTHER; note = 2'-O-Methyl-adenosine
  modified_base 46: mod_base = OTHER; note = 2'-O-Methyl-adenosine
  modified_base 48: mod_base = OTHER; note = 2'-O-Methyl-adenosine
  modified_base 50: mod_base = OTHER; note = 2'-O-Methyl-uridine
  modified_base 52: mod_base = OTHER; note = 2'-O-Methyl-adenosine
  modified_base 53: mod_base = OTHER; note = 2'-O-Methyl-guanosine
  modified_base 54: mod_base = OTHER; note = 2'-O-Methyl-guanosine
  modified_base 55: mod_base = OTHER; note = 2'-O-Methyl-cytidine
  modified_base 56: mod_base = OTHER; note = 2'-O-Methyl-uridine
  modified_base 57: mod_base = OTHER; note = Nebularine - ribonebularine
  modified_base 60: mod_base = OTHER; note = 2'-O-Methyl-cytidine
  modified_base 61: mod_base = OTHER; note = 2'-O-Methyl-cytidine
  modified_base 66: mod_base = OTHER; note = 2'-O-Methyl-uridine
  modified_base 67: mod_base = OTHER; note = 2'-O-Methyl-cytidine
  modified_base 70: mod_base = OTHER; note = 2'-O-Methyl-cytidine
  modified_base 71: mod_base = OTHER; note = 2'-O-Methyl-uridine
  modified_base 72: mod_base = OTHER; note = 2'-O-Methyl-uridine
  modified_base 73: mod_base = OTHER; note = 2'-O-Methyl-guanosine
  modified_base 74: mod_base = OTHER; note = 2'-O-Methyl-adenosine
  modified_base 75: mod_base = OTHER; note = 2'-O-Methyl-adenosine
  modified_base 76: mod_base = OTHER; note = 2'-O-Methyl-adenosine
  modified_base 77: mod_base = OTHER; note = 2'-O-Methyl-adenosine
  modified_base 78: mod_base = OTHER; note = 2'-O-Methyl-adenosine
  modified_base 79: mod_base = OTHER; note = 2'-O-Methyl-guanosine
  modified_base 80: mod_base = OTHER; note = 2'-O-Methyl-uridine
  modified_base 81: mod_base = OTHER; note = 2'-O-Methyl-guanosine
  modified_base 83: mod_base = OTHER; note = 2'-O-Methyl-cytidine
  modified_base 84: mod_base = OTHER; note = 2'-O-Methyl-adenosine
  modified_base 85: mod_base = OTHER; note = 2'-O-Methyl-cytidine
  modified_base 86: mod_base = OTHER; note = 2'-O-Methyl-cytidine
  modified_base 87: mod_base = OTHER; note = 2'-O-Methyl-guanosine
  modified_base 88: mod_base = OTHER; note = 2'-O-Methyl-adenosine
  modified_base 89: mod_base = OTHER; note = 2'-O-Methyl-guanosine
  modified_base 90: mod_base = OTHER; note = 2'-O-Methyl-uridine
  modified_base 91: mod_base = OTHER; note = 2'-O-Methyl-cytidine
  modified_base 92: mod_base = OTHER; note = 2'-O-Methyl-guanosine
  modified_base 93: mod_base = OTHER; note = 2'-O-Methyl-guanosine
  modified_base 94: mod_base = OTHER; note = 2'-O-Methyl-uridine
  modified_base 95: mod_base = OTHER; note = 2'-O-Methyl-guanosine
  modified_base 96: mod_base = OTHER; note = 2'-O-Methyl-cytidine
  modified_base 97: mod_base = OTHER; note = 2'-O-Methyl-uridine
  modified_base 98: mod_base = OTHER; note = 2'-O-Methyl-uridine phosphorothioate
  modified_base 99: mod_base = OTHER; note = 2'-O-Methyl-uridine phosphorothioate
  modified_base 100: mod_base = OTHER; note = 2'-O-Methyl-uridine

SEQ ID NO: 2063 - RNA, 100 nt, synthetic construct; identical to SEQ ID NO: 1902
  source 1..100: mol_type = other RNA; note = Description of Artificial Sequence: Synthetic polynucleotide
  modified_base 1: mod_base = OTHER; note = 2'-O-Methyl-cytidine phosphorothioate
  modified_base 2: mod_base = OTHER; note = 2'-O-Methyl-adenosine phosphorothioate
  modified_base 3: mod_base = OTHER; note = 2'-O-Methyl-guanosine
  modified_base 21: mod_base = OTHER; note = 2'-O-Methyl-guanosine
  modified_base 28: mod_base = OTHER; note = 2'-O-Methyl-adenosine
  modified_base 29: mod_base = OTHER; note = 2'-O-Methyl-guanosine
  modified_base 30: mod_base = OTHER; note = 2'-O-Methyl-cytidine
  modified_base 31: mod_base = OTHER; note = 2'-O-Methyl-uridine
  modified_base 32: mod_base = OTHER; note = 2'-O-Methyl-adenosine
  modified_base 33: mod_base = OTHER; note = 2'-O-Methyl-guanosine
  modified_base 34: mod_base = OTHER; note = 2'-O-Methyl-adenosine
  modified_base 35: mod_base = OTHER; note = 2'-O-Methyl-adenosine
  modified_base 36: mod_base = OTHER; note = 2'-O-Methyl-adenosine
  modified_base 37: mod_base = OTHER; note = 2'-O-Methyl-uridine
  modified_base 38: mod_base = OTHER; note = 2'-O-Methyl-adenosine
  modified_base 39: mod_base = OTHER; note = 2'-O-Methyl-guanosine
  modified_base 40: mod_base = OTHER; note = 2'-O-Methyl-cytidine
  modified_base 41: mod_base = OTHER; note = 2'-O-Methyl-adenosine
  modified_base 42: mod_base = OTHER; note = 2'-O-Methyl-adenosine
  modified_base 46: mod_base = OTHER; note = 2'-O-Methyl-adenosine
  modified_base 48: mod_base = OTHER; note = 2'-O-Methyl-adenosine
  modified_base 50: mod_base = OTHER; note = 2'-O-Methyl-uridine
  modified_base 52: mod_base = OTHER; note = 2'-O-Methyl-adenosine
  modified_base 53: mod_base = OTHER; note = 2'-O-Methyl-guanosine
  modified_base 54: mod_base = OTHER; note = 2'-O-Methyl-guanosine
  modified_base 55: mod_base = OTHER; note = 2'-O-Methyl-cytidine
  modified_base 56: mod_base = OTHER; note = 2'-O-Methyl-uridine
  modified_base 57: mod_base = OTHER; note = 2'-O-Methyl-adenosine
  modified_base 60: mod_base = OTHER; note = 2'-O-Methyl-cytidine
  modified_base 61: mod_base = OTHER; note = 2'-O-Methyl-cytidine
  modified_base 65: mod_base = OTHER; note = Nebularine - ribonebularine
  modified_base 66: mod_base = OTHER; note = 2'-O-Methyl-uridine
  modified_base 67: mod_base = OTHER; note = 2'-O-Methyl-cytidine
  modified_base 70: mod_base = OTHER; note = 2'-O-Methyl-cytidine
  modified_base 71: mod_base = OTHER; note = 2'-O-Methyl-uridine
  modified_base 72: mod_base = OTHER; note = 2'-O-Methyl-uridine
  modified_base 73: mod_base = OTHER; note = 2'-O-Methyl-guanosine
  modified_base 74: mod_base = OTHER; note = 2'-O-Methyl-adenosine
  modified_base 75: mod_base = OTHER; note = 2'-O-Methyl-adenosine
  modified_base 76: mod_base = OTHER; note = 2'-O-Methyl-adenosine
  modified_base 77: mod_base = OTHER; note = 2'-O-Methyl-adenosine
  modified_base 78: mod_base = OTHER; note = 2'-O-Methyl-adenosine
  modified_base 79: mod_base = OTHER; note = 2'-O-Methyl-guanosine
  modified_base 80: mod_base = OTHER; note = 2'-O-Methyl-uridine
  modified_base 81: mod_base = OTHER; note = 2'-O-Methyl-guanosine
  modified_base 83: mod_base = OTHER; note = 2'-O-Methyl-cytidine
  modified_base 84: mod_base = OTHER; note = 2'-O-Methyl-adenosine
  modified_base 85: mod_base = OTHER; note = 2'-O-Methyl-cytidine
  modified_base 86: mod_base = OTHER; note = 2'-O-Methyl-cytidine
  modified_base 87: mod_base = OTHER; note = 2'-O-Methyl-guanosine
  modified_base 88: mod_base = OTHER; note = 2'-O-Methyl-adenosine
  modified_base 89: mod_base = OTHER; note = 2'-O-Methyl-guanosine
  modified_base 90: mod_base = OTHER; note = 2'-O-Methyl-uridine
  modified_base 91: mod_base = OTHER; note = 2'-O-Methyl-cytidine
  modified_base 92: mod_base = OTHER; note = 2'-O-Methyl-guanosine
  modified_base 93: mod_base = OTHER; note = 2'-O-Methyl-guanosine
  modified_base 94: mod_base = OTHER; note = 2'-O-Methyl-uridine
  modified_base 95: mod_base = OTHER; note = 2'-O-Methyl-guanosine
  modified_base 96: mod_base = OTHER; note = 2'-O-Methyl-cytidine
  modified_base 97: mod_base = OTHER; note = 2'-O-Methyl-uridine
  modified_base 98: mod_base = OTHER; note = 2'-O-Methyl-uridine phosphorothioate
  modified_base 99: mod_base = OTHER; note = 2'-O-Methyl-uridine phosphorothioate
  modified_base 100: mod_base = OTHER; note = 2'-O-Methyl-uridine

SEQ ID NO: 2064 - RNA, 100 nt, synthetic construct; identical to SEQ ID NO: 1903
  source 1..100: mol_type = other RNA; note = Description of Artificial Sequence: Synthetic polynucleotide
  modified_base 1: mod_base = OTHER; note = 2'-O-Methyl-cytidine phosphorothioate
  modified_base 2: mod_base = OTHER; note = 2'-O-Methyl-adenosine phosphorothioate
  modified_base 3: mod_base = OTHER; note = 2'-O-Methyl-guanosine
  modified_base 21: mod_base = OTHER; note = 2'-O-Methyl-guanosine
  modified_base 28: mod_base = OTHER; note = 2'-O-Methyl-adenosine
  modified_base 29: mod_base = OTHER; note = 2'-O-Methyl-guanosine
  modified_base 30: mod_base = OTHER; note = 2'-O-Methyl-cytidine
  modified_base 31: mod_base = OTHER; note = 2'-O-Methyl-uridine
  modified_base 32: mod_base = OTHER; note = 2'-O-Methyl-adenosine
  modified_base 33: mod_base = OTHER; note = 2'-O-Methyl-guanosine
  modified_base 34: mod_base = OTHER; note = Nebularine - ribonebularine
  modified_base 35: mod_base = OTHER; note = 2'-O-Methyl-adenosine
  modified_base 36: mod_base = OTHER; note = 2'-O-Methyl-adenosine
  modified_base 37: mod_base = OTHER; note = 2'-O-Methyl-uridine
  modified_base 38: mod_base = OTHER; note = 2'-O-Methyl-adenosine
  modified_base 39: mod_base = OTHER; note = 2'-O-Methyl-guanosine
  modified_base 40: mod_base = OTHER; note = 2'-O-Methyl-cytidine
  modified_base 41: mod_base = OTHER; note = 2'-O-Methyl-adenosine
  modified_base 42: mod_base = OTHER; note = 2'-O-Methyl-adenosine
  modified_base 46: mod_base = OTHER; note = 2'-O-Methyl-adenosine
  modified_base 48: mod_base = OTHER; note = 2'-O-Methyl-adenosine
  modified_base 50: mod_base = OTHER; note = 2'-O-Methyl-uridine
  modified_base 52: mod_base = OTHER; note = 2'-O-Methyl-adenosine
  modified_base 53: mod_base = OTHER; note = 2'-O-Methyl-guanosine
  modified_base 54: mod_base = OTHER; note = 2'-O-Methyl-guanosine
  modified_base 55: mod_base = OTHER; note = 2'-O-Methyl-cytidine
  modified_base 56: mod_base = OTHER; note = 2'-O-Methyl-uridine
  modified_base 57: mod_base = OTHER; note = Nebularine - ribonebularine
  modified_base 60: mod_base = OTHER; note = 2'-O-Methyl-cytidine
  modified_base 61: mod_base = OTHER; note = 2'-O-Methyl-cytidine
  modified_base 65: mod_base = OTHER; note = Nebularine - ribonebularine
  modified_base 66: mod_base = OTHER; note = 2'-O-Methyl-uridine
  modified_base 67: mod_base = OTHER; note = 2'-O-Methyl-cytidine
  modified_base 70: mod_base = OTHER; note = 2'-O-Methyl-cytidine
  modified_base 71: mod_base = OTHER; note = 2'-O-Methyl-uridine
  modified_base 72: mod_base = OTHER; note = 2'-O-Methyl-uridine
  modified_base 73: mod_base = OTHER; note = 2'-O-Methyl-guanosine
  modified_base 74: mod_base = OTHER; note = 2'-O-Methyl-adenosine
  modified_base 75: mod_base = OTHER; note = 2'-O-Methyl-adenosine
  modified_base 76: mod_base = OTHER; note = 2'-O-Methyl-adenosine
  modified_base 77: mod_base = OTHER; note = 2'-O-Methyl-adenosine
  modified_base 78: mod_base = OTHER; note = 2'-O-Methyl-adenosine
  modified_base 79: mod_base = OTHER; note = 2'-O-Methyl-guanosine
  modified_base 80: mod_base = OTHER; note = 2'-O-Methyl-uridine
  modified_base 81: mod_base = OTHER; note = 2'-O-Methyl-guanosine
  modified_base 83: mod_base = OTHER; note = 2'-O-Methyl-cytidine
  modified_base 84: mod_base = OTHER; note = 2'-O-Methyl-adenosine
  modified_base 85: mod_base = OTHER; note = 2'-O-Methyl-cytidine
  modified_base 86: mod_base = OTHER; note = 2'-O-Methyl-cytidine
  modified_base 87: mod_base = OTHER; note = 2'-O-Methyl-guanosine
  modified_base 88: mod_base = OTHER; note = 2'-O-Methyl-adenosine
  modified_base 89: mod_base = OTHER; note = 2'-O-Methyl-guanosine
  modified_base 90: mod_base = OTHER; note = 2'-O-Methyl-uridine
  modified_base 91: mod_base = OTHER; note = 2'-O-Methyl-cytidine
  modified_base 92: mod_base = OTHER; note = 2'-O-Methyl-guanosine
  modified_base 93: mod_base = OTHER; note = 2'-O-Methyl-guanosine
  modified_base 94: mod_base = OTHER; note = 2'-O-Methyl-uridine
  modified_base 95: mod_base = OTHER; note = 2'-O-Methyl-guanosine
  modified_base 96: mod_base = OTHER; note = 2'-O-Methyl-cytidine
  modified_base 97: mod_base = OTHER; note = 2'-O-Methyl-uridine
  modified_base 98: mod_base = OTHER; note = 2'-O-Methyl-uridine phosphorothioate
  modified_base 99: mod_base = OTHER; note = 2'-O-Methyl-uridine phosphorothioate
  modified_base 100: mod_base = OTHER; note = 2'-O-Methyl-uridine

SEQ ID NO: 2065 - RNA, 100 nt, synthetic construct; identical to SEQ ID NO: 1904
  source 1..100: mol_type = other RNA; note = Description of Artificial Sequence: Synthetic polynucleotide
  modified_base 1: mod_base = OTHER; note = 2'-O-Methyl-cytidine phosphorothioate
  modified_base 2: mod_base = OTHER; note = 2'-O-Methyl-adenosine phosphorothioate
  modified_base 3: mod_base = OTHER; note = 2'-O-Methyl-guanosine
  modified_base 21: mod_base = OTHER; note = 2'-O-Methyl-guanosine
  modified_base 28: mod_base = OTHER; note = Nebularine - ribonebularine
  modified_base 29: mod_base = OTHER; note = 2'-O-Methyl-guanosine
  modified_base 30: mod_base = OTHER; note = 2'-O-Methyl-cytidine
  modified_base 31: mod_base = OTHER; note = 2'-O-Methyl-uridine
  modified_base 32: mod_base = OTHER; note = 2'-O-Methyl-adenosine
  modified_base 33: mod_base = OTHER; note = 2'-O-Methyl-guanosine
  modified_base 34: mod_base = OTHER; note = Nebularine - ribonebularine
  modified_base 35: mod_base = OTHER; note = 2'-O-Methyl-adenosine
  modified_base 36: mod_base = OTHER; note = 2'-O-Methyl-adenosine
  modified_base 37: mod_base = OTHER; note = 2'-O-Methyl-uridine
  modified_base 38: mod_base = OTHER; note = 2'-O-Methyl-adenosine
  modified_base 39: mod_base = OTHER; note = 2'-O-Methyl-guanosine
  modified_base 40: mod_base = OTHER; note = 2'-O-Methyl-cytidine
  modified_base 41: mod_base = OTHER; note = 2'-O-Methyl-adenosine
  modified_base 42: mod_base = OTHER; note = Nebularine - ribonebularine
  modified_base 46: mod_base = OTHER; note = 2'-O-Methyl-adenosine
  modified_base 48: mod_base = OTHER; note = 2'-O-Methyl-adenosine
  modified_base 50: mod_base = OTHER; note = 2'-O-Methyl-uridine
  modified_base 52: mod_base = OTHER; note = 2'-O-Methyl-adenosine
  modified_base 53: mod_base = OTHER; note = 2'-O-Methyl-guanosine
  modified_base 54: mod_base = OTHER; note = 2'-O-Methyl-guanosine
  modified_base 55: mod_base = OTHER; note = 2'-O-Methyl-cytidine
  modified_base 56: mod_base = OTHER; note = 2'-O-Methyl-uridine
  modified_base 57: mod_base = OTHER; note = Nebularine - ribonebularine
  modified_base 60: mod_base = OTHER; note = 2'-O-Methyl-cytidine
  modified_base 61: mod_base = OTHER; note = 2'-O-Methyl-cytidine
  modified_base 65: mod_base = OTHER; note = Nebularine - ribonebularine
  modified_base 66: mod_base = OTHER; note = 2'-O-Methyl-uridine
  modified_base 67: mod_base = OTHER; note = 2'-O-Methyl-cytidine
  modified_base 70: mod_base = OTHER; note = 2'-O-Methyl-cytidine
  modified_base 71: mod_base = OTHER; note = 2'-O-Methyl-uridine
  modified_base 72: mod_base = OTHER; note = 2'-O-Methyl-uridine
  modified_base 73: mod_base = OTHER; note = 2'-O-Methyl-guanosine
  modified_base 74: mod_base = OTHER; note = 2'-O-Methyl-adenosine
  modified_base 75: mod_base = OTHER; note = 2'-O-Methyl-adenosine
  modified_base 76: mod_base = OTHER; note = 2'-O-Methyl-adenosine
  modified_base 77: mod_base = OTHER; note = 2'-O-Methyl-adenosine
  modified_base 78: mod_base = OTHER; note = 2'-O-Methyl-adenosine
  modified_base 79: mod_base = OTHER; note = 2'-O-Methyl-guanosine
  modified_base 80: mod_base = OTHER; note = 2'-O-Methyl-uridine
  modified_base 81: mod_base = OTHER; note = 2'-O-Methyl-guanosine
  modified_base 83: mod_base = OTHER; note = 2'-O-Methyl-cytidine
  modified_base 84: mod_base = OTHER; note = 2'-O-Methyl-adenosine
  modified_base 85: mod_base = OTHER; note = 2'-O-Methyl-cytidine
  modified_base 86: mod_base = OTHER; note = 2'-O-Methyl-cytidine
  modified_base 87: mod_base = OTHER; note = 2'-O-Methyl-guanosine
  modified_base 88: mod_base = OTHER; note = 2'-O-Methyl-adenosine
  modified_base 89: mod_base = OTHER; note = 2'-O-Methyl-guanosine
  modified_base 90: mod_base = OTHER; note = 2'-O-Methyl-uridine
  modified_base 91: mod_base = OTHER; note = 2'-O-Methyl-cytidine
  modified_base 92: mod_base = OTHER; note = 2'-O-Methyl-guanosine
  modified_base 93: mod_base = OTHER; note = 2'-O-Methyl-guanosine
  modified_base 94: mod_base = OTHER; note = 2'-O-Methyl-uridine
  modified_base 95: mod_base = OTHER; note = 2'-O-Methyl-guanosine
  modified_base 96: mod_base = OTHER; note = 2'-O-Methyl-cytidine
  modified_base 97: mod_base = OTHER; note = 2'-O-Methyl-uridine
  modified_base 98: mod_base = OTHER; note = 2'-O-Methyl-uridine phosphorothioate
  modified_base 99: mod_base = OTHER; note = 2'-O-Methyl-uridine phosphorothioate
  modified_base 100: mod_base = OTHER; note = 2'-O-Methyl-uridine

SEQ ID NO: 2066 - RNA, 100 nt, synthetic construct; identical to SEQ ID NO: 1905
  source 1..100: mol_type = other RNA; note = Description of Artificial Sequence: Synthetic polynucleotide
  modified_base 1: mod_base = OTHER; note = 2'-O-Methyl-cytidine phosphorothioate
  modified_base 2: mod_base = OTHER; note = 2'-O-Methyl-adenosine phosphorothioate
  modified_base 3: mod_base = OTHER; note = 2'-O-Methyl-guanosine
  modified_base 9: mod_base = OTHER; note = Nebularine - ribonebularine
  modified_base 14: mod_base = OTHER; note = Nebularine - ribonebularine
  modified_base 21: mod_base = OTHER; note = 2'-O-Methyl-guanosine
  modified_base 28: mod_base = OTHER; note = 2'-O-Methyl-adenosine
  modified_base 29: mod_base = OTHER; note = 2'-O-Methyl-guanosine
  modified_base 30: mod_base = OTHER; note = 2'-O-Methyl-cytidine
  modified_base 31: mod_base = OTHER; note = 2'-O-Methyl-uridine
  modified_base 32: mod_base = OTHER; note = 2'-O-Methyl-adenosine
  modified_base 33: mod_base = OTHER; note = 2'-O-Methyl-guanosine
  modified_base 34: mod_base = OTHER; note = Nebularine - ribonebularine
  modified_base 35: mod_base = OTHER; note = 2'-O-Methyl-adenosine
  modified_base 36: mod_base = OTHER; note = 2'-O-Methyl-adenosine
  modified_base 37: mod_base = OTHER; note = 2'-O-Methyl-uridine
  modified_base 38: mod_base = OTHER; note = 2'-O-Methyl-adenosine
  modified_base 39: mod_base = OTHER; note = 2'-O-Methyl-guanosine
  modified_base 40: mod_base = OTHER; note = 2'-O-Methyl-cytidine
  modified_base 41: mod_base = OTHER; note = 2'-O-Methyl-adenosine
  modified_base 42: mod_base = OTHER; note = 2'-O-Methyl-adenosine
  modified_base 46: mod_base = OTHER; note = 2'-O-Methyl-adenosine
  modified_base 48: mod_base = OTHER; note = 2'-O-Methyl-adenosine
  modified_base 50: mod_base = OTHER; note = 2'-O-Methyl-uridine
  modified_base 52: mod_base = OTHER; note = 2'-O-Methyl-adenosine
  modified_base 53: mod_base = OTHER; note = 2'-O-Methyl-guanosine
  modified_base 54: mod_base = OTHER; note = 2'-O-Methyl-guanosine
  modified_base 55: mod_base = OTHER; note = 2'-O-Methyl-cytidine
  modified_base 56: mod_base = OTHER; note = 2'-O-Methyl-uridine
  modified_base 57: mod_base = OTHER; note = 2'-O-Methyl-adenosine
  modified_base 60: mod_base = OTHER; note = 2'-O-Methyl-cytidine
  modified_base 61: mod_base = OTHER; note = 2'-O-Methyl-cytidine
  modified_base 66: mod_base = OTHER; note = 2'-O-Methyl-uridine
  modified_base 67: mod_base = OTHER; note = 2'-O-Methyl-cytidine
  modified_base 70: mod_base = OTHER; note = 2'-O-Methyl-cytidine
  modified_base 71: mod_base = OTHER; note = 2'-O-Methyl-uridine
  modified_base 72: mod_base = OTHER; note = 2'-O-Methyl-uridine
  modified_base 73: mod_base = OTHER; note = 2'-O-Methyl-guanosine
  modified_base 74: mod_base = OTHER; note = 2'-O-Methyl-adenosine
  modified_base 75: mod_base = OTHER; note = 2'-O-Methyl-adenosine
  modified_base 76: mod_base = OTHER; note = 2'-O-Methyl-adenosine
  modified_base 77: mod_base = OTHER; note = 2'-O-Methyl-adenosine
  modified_base 78: mod_base = OTHER; note = 2'-O-Methyl-adenosine
  modified_base 79: mod_base = OTHER; note = 2'-O-Methyl-guanosine
  modified_base 80: mod_base = OTHER; note = 2'-O-Methyl-uridine
  modified_base 81: mod_base = OTHER; note = 2'-O-Methyl-guanosine
  modified_base 83: mod_base = OTHER; note = 2'-O-Methyl-cytidine
  modified_base 84: mod_base = OTHER; note = 2'-O-Methyl-adenosine
  modified_base 85: mod_base = OTHER; note = 2'-O-Methyl-cytidine
  modified_base 86: mod_base = OTHER; note = 2'-O-Methyl-cytidine
  modified_base 87: mod_base = OTHER; note = 2'-O-Methyl-guanosine
  modified_base 88: mod_base = OTHER; note = 2'-O-Methyl-adenosine
  modified_base 89: mod_base = OTHER; note = 2'-O-Methyl-guanosine
  modified_base 90: mod_base = OTHER; note = 2'-O-Methyl-uridine
  modified_base 91: mod_base = OTHER; note = 2'-O-Methyl-cytidine
  modified_base 92: mod_base = OTHER; note = 2'-O-Methyl-guanosine
  modified_base 93: mod_base = OTHER; note = 2'-O-Methyl-guanosine
  modified_base 94: mod_base = OTHER; note = 2'-O-Methyl-uridine
  modified_base 95: mod_base = OTHER; note = 2'-O-Methyl-guanosine
  modified_base 96: mod_base = OTHER; note = 2'-O-Methyl-cytidine
  modified_base 97: mod_base = OTHER; note = 2'-O-Methyl-uridine
  modified_base 98: mod_base = OTHER; note = 2'-O-Methyl-uridine phosphorothioate
  modified_base 99: mod_base = OTHER; note = 2'-O-Methyl-uridine phosphorothioate
  modified_base 100: mod_base = OTHER; note = 2'-O-Methyl-uridine

SEQ ID NO: 2067 - RNA, 100 nt, synthetic construct; identical to SEQ ID NO: 1906
  source 1..100: mol_type = other RNA; note = Description of Artificial Sequence: Synthetic polynucleotide
  modified_base 1: mod_base = OTHER; note = 2'-O-Methyl-cytidine phosphorothioate
  modified_base 2: mod_base = OTHER; note = 2'-O-Methyl-adenosine phosphorothioate
  modified_base 3: mod_base = OTHER; note = 2'-O-Methyl-guanosine
  modified_base 9: mod_base = OTHER; note = Nebularine - ribonebularine
  modified_base 14: mod_base = OTHER; note = Nebularine - ribonebularine
  modified_base 21: mod_base = OTHER; note = 2'-O-Methyl-guanosine
  modified_base 28: mod_base = OTHER; note = 2'-O-Methyl-adenosine
  modified_base 29: mod_base = OTHER; note = 2'-O-Methyl-guanosine
  modified_base 30: mod_base = OTHER; note = 2'-O-Methyl-cytidine
  modified_base 31: mod_base = OTHER; note = 2'-O-Methyl-uridine
  modified_base 32: mod_base = OTHER; note = 2'-O-Methyl-adenosine
  modified_base 33: mod_base = OTHER; note = 2'-O-Methyl-guanosine
  modified_base 34: mod_base = OTHER; note = Nebularine - ribonebularine
  modified_base 35: mod_base = OTHER; note = 2'-O-Methyl-adenosine
  modified_base 36: mod_base = OTHER; note = 2'-O-Methyl-adenosine
  modified_base 37: mod_base = OTHER; note = 2'-O-Methyl-uridine
  modified_base 38: mod_base = OTHER; note = 2'-O-Methyl-adenosine
  modified_base 39: mod_base = OTHER; note = 2'-O-Methyl-guanosine
  modified_base 40: mod_base = OTHER; note = 2'-O-Methyl-cytidine
  modified_base 41: mod_base = OTHER; note = 2'-O-Methyl-adenosine
  modified_base 42: mod_base = OTHER; note = 2'-O-Methyl-adenosine
  modified_base 46: mod_base = OTHER; note = 2'-O-Methyl-adenosine
  modified_base 48: mod_base = OTHER; note = 2'-O-Methyl-adenosine
  modified_base 50: mod_base = OTHER; note = 2'-O-Methyl-uridine
  modified_base 52: mod_base = OTHER; note = 2'-O-Methyl-adenosine
  modified_base 53: mod_base = OTHER; note = 2'-O-Methyl-guanosine
  modified_base 54: mod_base = OTHER; note = 2'-O-Methyl-guanosine
  modified_base 55: mod_base = OTHER; note = 2'-O-Methyl-cytidine
  modified_base 56: mod_base = OTHER; note = 2'-O-Methyl-uridine
  modified_base 57: mod_base = OTHER; note = Nebularine - ribonebularine
  modified_base 60: mod_base = OTHER; note = 2'-O-Methyl-cytidine
  modified_base 61: mod_base = OTHER; note = 2'-O-Methyl-cytidine
  modified_base 66: mod_base = OTHER; note = 2'-O-Methyl-uridine
  modified_base 67: mod_base = OTHER; note = 2'-O-Methyl-cytidine
  modified_base 70: mod_base = OTHER; note = 2'-O-Methyl-cytidine
  modified_base 71: mod_base = OTHER; note = 2'-O-Methyl-uridine
  modified_base 72: mod_base = OTHER; note = 2'-O-Methyl-uridine
  modified_base 73: mod_base = OTHER; note = 2'-O-Methyl-guanosine
  modified_base 74: mod_base = OTHER; note = 2'-O-Methyl-adenosine
  modified_base 75: mod_base = OTHER; note = 2'-O-Methyl-adenosine
  modified_base 76: mod_base = OTHER; note = 2'-O-Methyl-adenosine
  modified_base 77: mod_base = OTHER; note = 2'-O-Methyl-adenosine
  modified_base 78: mod_base = OTHER; note = 2'-O-Methyl-adenosine
  modified_base 79: mod_base = OTHER; note = 2'-O-Methyl-guanosine
  modified_base 80: mod_base = OTHER; note = 2'-O-Methyl-uridine
  modified_base 81: mod_base = OTHER; note = 2'-O-Methyl-guanosine
  modified_base 83: mod_base = OTHER; note = 2'-O-Methyl-cytidine
  modified_base 84: mod_base = OTHER; note = 2'-O-Methyl-adenosine
  modified_base 85: mod_base = OTHER; note = 2'-O-Methyl-cytidine
  modified_base 86: mod_base = OTHER; note = 2'-O-Methyl-cytidine
  modified_base 87: mod_base = OTHER; note = 2'-O-Methyl-guanosine
  modified_base 88: mod_base = OTHER; note = 2'-O-Methyl-adenosine
  modified_base 89: mod_base = OTHER; note = 2'-O-Methyl-guanosine
  modified_base 90: mod_base = OTHER; note = 2'-O-Methyl-uridine
  modified_base 91: mod_base = OTHER; note = 2'-O-Methyl-cytidine
  modified_base 92: mod_base = OTHER; note = 2'-O-Methyl-guanosine
  modified_base 93: mod_base = OTHER; note = 2'-O-Methyl-guanosine
  modified_base 94: mod_base = OTHER; note = 2'-O-Methyl-uridine
  modified_base 95: mod_base = OTHER; note = 2'-O-Methyl-guanosine
  modified_base 96: mod_base = OTHER; note = 2'-O-Methyl-cytidine
  modified_base 97: mod_base = OTHER; note = 2'-O-Methyl-uridine
  modified_base 98: mod_base = OTHER; note = 2'-O-Methyl-uridine phosphorothioate
  modified_base 99: mod_base = OTHER; note = 2'-O-Methyl-uridine phosphorothioate
  modified_base 100: mod_base = OTHER; note = 2'-O-Methyl-uridine

SEQ ID NO: 2068 - RNA, 100 nt, synthetic construct; identical to SEQ ID NO: 1907
  source 1..100: mol_type = other RNA; note = Description of Artificial Sequence: Synthetic polynucleotide
  modified_base 1: mod_base = OTHER; note = 2'-O-Methyl-cytidine phosphorothioate
  modified_base 2: mod_base = OTHER; note = 2'-O-Methyl-adenosine phosphorothioate
  modified_base 3: mod_base = OTHER; note = 2'-O-Methyl-guanosine
  modified_base 9: mod_base = OTHER; note = Nebularine - ribonebularine
  modified_base 14: mod_base = OTHER; note = Nebularine - ribonebularine
  modified_base 21: mod_base = OTHER; note = 2'-O-Methyl-guanosine
  modified_base 28: mod_base = OTHER; note = 2'-O-Methyl-adenosine
  modified_base 29: mod_base = OTHER; note = 2'-O-Methyl-guanosine
  modified_base 30: mod_base = OTHER; note = 2'-O-Methyl-cytidine
  modified_base 31: mod_base = OTHER; note = 2'-O-Methyl-uridine
  modified_base 32: mod_base = OTHER; note = 2'-O-Methyl-adenosine
  modified_base 33: mod_base = OTHER; note = 2'-O-Methyl-guanosine
  modified_base 34: mod_base = OTHER; note = 2'-O-Methyl-adenosine
  modified_base 35: mod_base = OTHER; note = 2'-O-Methyl-adenosine
  modified_base 36: mod_base = OTHER; note = 2'-O-Methyl-adenosine
  modified_base 37: mod_base = OTHER; note = 2'-O-Methyl-uridine
  modified_base 38: mod_base = OTHER; note = 2'-O-Methyl-adenosine
  modified_base 39: mod_base = OTHER; note = 2'-O-Methyl-guanosine
  modified_base 40: mod_base = OTHER; note = 2'-O-Methyl-cytidine
  modified_base 41: mod_base = OTHER; note = 2'-O-Methyl-adenosine
  modified_base 42: mod_base = OTHER; note = 2'-O-Methyl-adenosine
  modified_base 46: mod_base = OTHER; note = 2'-O-Methyl-adenosine
  modified_base 48: mod_base = OTHER; note = 2'-O-Methyl-adenosine
  modified_base 50: mod_base = OTHER; note = 2'-O-Methyl-uridine
  modified_base 52: mod_base = OTHER; note = 2'-O-Methyl-adenosine
  modified_base 53: mod_base = OTHER; note = 2'-O-Methyl-guanosine
  modified_base 54: mod_base = OTHER; note = 2'-O-Methyl-guanosine
  modified_base 55: mod_base = OTHER; note = 2'-O-Methyl-cytidine
  modified_base 56: mod_base = OTHER; note = 2'-O-Methyl-uridine
  modified_base 57: mod_base = OTHER; note = 2'-O-Methyl-adenosine
  modified_base 60: mod_base = OTHER; note = 2'-O-Methyl-cytidine
  modified_base 61: mod_base = OTHER; note = 2'-O-Methyl-cytidine
  modified_base 65: mod_base = OTHER; note = Nebularine - ribonebularine
  modified_base 66: mod_base = OTHER; note = 2'-O-Methyl-uridine
  modified_base 67: mod_base = OTHER; note = 2'-O-Methyl-cytidine
  modified_base 70: mod_base = OTHER; note = 2'-O-Methyl-cytidine
  modified_base 71: mod_base = OTHER; note = 2'-O-Methyl-uridine
  modified_base 72: mod_base = OTHER; note = 2'-O-Methyl-uridine
  modified_base 73: mod_base = OTHER; note = 2'-O-Methyl-guanosine
  modified_base 74: mod_base = OTHER; note = 2'-O-Methyl-adenosine
  modified_base 75: mod_base = OTHER; note = 2'-O-Methyl-adenosine
  modified_base 76: mod_base = OTHER; note = 2'-O-Methyl-adenosine
  modified_base 77: mod_base = OTHER; note = 2'-O-Methyl-adenosine
  modified_base 78: mod_base = OTHER; note = 2'-O-Methyl-adenosine
  modified_base 79: mod_base = OTHER; note = 2'-O-Methyl-guanosine
  modified_base 80: mod_base = OTHER; note = 2'-O-Methyl-uridine
  modified_base 81: mod_base = OTHER; note = 2'-O-Methyl-guanosine
  modified_base 83: mod_base = OTHER; note = 2'-O-Methyl-cytidine
  modified_base 84: mod_base = OTHER; note = 2'-O-Methyl-adenosine
  modified_base 85: mod_base = OTHER; note = 2'-O-Methyl-cytidine
  modified_base 86: mod_base = OTHER; note = 2'-O-Methyl-cytidine
  modified_base 87: mod_base = OTHER; note = 2'-O-Methyl-guanosine
  modified_base 88: mod_base = OTHER; note = 2'-O-Methyl-adenosine
  modified_base 89: mod_base = OTHER; note = 2'-O-Methyl-guanosine
  modified_base 90: mod_base = OTHER; note = 2'-O-Methyl-uridine
  modified_base 91: mod_base = OTHER; note = 2'-O-Methyl-cytidine
  modified_base 92: mod_base = OTHER; note = 2'-O-Methyl-guanosine
  modified_base 93: mod_base = OTHER; note = 2'-O-Methyl-guanosine
  modified_base 94: mod_base = OTHER; note = 2'-O-Methyl-uridine
  modified_base 95: mod_base = OTHER; note = 2'-O-Methyl-guanosine
  modified_base 96: mod_base = OTHER; note = 2'-O-Methyl-cytidine
  modified_base 97: mod_base = OTHER; note = 2'-O-Methyl-uridine
  modified_base 98: mod_base = OTHER; note = 2'-O-Methyl-uridine phosphorothioate
  modified_base 99: mod_base = OTHER; note = 2'-O-Methyl-uridine phosphorothioate
  modified_base 100: mod_base = OTHER; note = 2'-O-Methyl-uridine

SEQ ID NO: 2069 - RNA, 100 nt, synthetic construct; identical to SEQ ID NO: 1908
  source 1..100: mol_type = other RNA; note = Description of Artificial Sequence: Synthetic polynucleotide
  modified_base 1: mod_base = OTHER; note = 2'-O-Methyl-cytidine phosphorothioate
  modified_base 2: mod_base = OTHER; note = 2'-O-Methyl-adenosine phosphorothioate
  modified_base 3: mod_base = OTHER; note = 2'-O-Methyl-guanosine
  modified_base 9: mod_base = OTHER; note = Nebularine - ribonebularine
  modified_base 14: mod_base = OTHER; note = Nebularine - ribonebularine
  modified_base 21: mod_base = OTHER; note = 2'-O-Methyl-guanosine
  modified_base 28: mod_base = OTHER; note = 2'-O-Methyl-adenosine
  modified_base 29: mod_base = OTHER; note = 2'-O-Methyl-guanosine
  modified_base 30: mod_base = OTHER; note = 2'-O-Methyl-cytidine
  modified_base 31: mod_base = OTHER; note = 2'-O-Methyl-uridine
  modified_base 32: mod_base = OTHER; note = 2'-O-Methyl-adenosine
  modified_base 33: mod_base = OTHER; note = 2'-O-Methyl-guanosine
  modified_base 34: mod_base = OTHER; note = Nebularine - ribonebularine
  modified_base 35: mod_base = OTHER; note = 2'-O-Methyl-adenosine
  modified_base 36: mod_base = OTHER; note = 2'-O-Methyl-adenosine
  modified_base 37: mod_base = OTHER; note = 2'-O-Methyl-uridine
  modified_base 38: mod_base = OTHER; note = 2'-O-Methyl-adenosine
  modified_base 39: mod_base = OTHER; note = 2'-O-Methyl-guanosine
  modified_base 40: mod_base = OTHER; note = 2'-O-Methyl-cytidine
  modified_base 41: mod_base = OTHER; note = 2'-O-Methyl-adenosine
  modified_base 42: mod_base = OTHER; note = 2'-O-Methyl-adenosine
  modified_base 46: mod_base = OTHER; note = 2'-O-Methyl-adenosine
  modified_base 48: mod_base = OTHER; note = 2'-O-Methyl-adenosine
  modified_base 50: mod_base = OTHER; note = 2'-O-Methyl-uridine
  modified_base 52: mod_base = OTHER; note = 2'-O-Methyl-adenosine
  modified_base 53: mod_base = OTHER; note = 2'-O-Methyl-guanosine
  modified_base 54: mod_base = OTHER; note = 2'-O-Methyl-guanosine
  modified_base 55: mod_base = OTHER; note = 2'-O-Methyl-cytidine
  modified_base 56: mod_base = OTHER; note = 2'-O-Methyl-uridine
  modified_base 57: mod_base = OTHER; note = Nebularine - ribonebularine
  modified_base 60: mod_base = OTHER; note = 2'-O-Methyl-cytidine
  modified_base 61: mod_base = OTHER; note = 2'-O-Methyl-cytidine
  modified_base 65: mod_base = OTHER; note = Nebularine - ribonebularine
  modified_base 66: mod_base = OTHER; note = 2'-O-Methyl-uridine
  modified_base 67: mod_base = OTHER; note = 2'-O-Methyl-cytidine
  modified_base 70: mod_base = OTHER; note = 2'-O-Methyl-cytidine
  modified_base 71: mod_base = OTHER; note = 2'-O-Methyl-uridine
  modified_base 72: mod_base = OTHER; note = 2'-O-Methyl-uridine
  modified_base 73: mod_base = OTHER; note = 2'-O-Methyl-guanosine
  modified_base 74: mod_base = OTHER; note = 2'-O-Methyl-adenosine
  modified_base 75: mod_base = OTHER; note = 2'-O-Methyl-adenosine
  modified_base 76: mod_base = OTHER; note = 2'-O-Methyl-adenosine
  modified_base 77: mod_base = OTHER; note = 2'-O-Methyl-adenosine
  modified_base 78: mod_base = OTHER; note = 2'-O-Methyl-adenosine
  modified_base 79: mod_base = OTHER; note = 2'-O-Methyl-guanosine
  modified_base 80: mod_base = OTHER; note = 2'-O-Methyl-uridine
  modified_base 81: mod_base = OTHER; note = 2'-O-Methyl-guanosine
  modified_base 83: mod_base = OTHER; note = 2'-O-Methyl-cytidine
  modified_base 84: mod_base = OTHER; note = 2'-O-Methyl-adenosine
  modified_base 85: mod_base = OTHER; note = 2'-O-Methyl-cytidine
  modified_base 86: mod_base = OTHER; note = 2'-O-Methyl-cytidine
  modified_base 87: mod_base = OTHER; note = 2'-O-Methyl-guanosine
  modified_base 88: mod_base = OTHER; note = 2'-O-Methyl-adenosine
  modified_base 89: mod_base = OTHER; note = 2'-O-Methyl-guanosine
  modified_base 90: mod_base = OTHER; note = 2'-O-Methyl-uridine
  modified_base 91: mod_base = OTHER; note = 2'-O-Methyl-cytidine
  modified_base 92: mod_base = OTHER; note = 2'-O-Methyl-guanosine
  modified_base 93: mod_base = OTHER; note = 2'-O-Methyl-guanosine
  modified_base 94: mod_base = OTHER; note = 2'-O-Methyl-uridine
  modified_base 95: mod_base = OTHER; note = 2'-O-Methyl-guanosine
  modified_base 96: mod_base = OTHER; note = 2'-O-Methyl-cytidine
  modified_base 97: mod_base = OTHER; note = 2'-O-Methyl-uridine
  modified_base 98: mod_base = OTHER; note = 2'-O-Methyl-uridine phosphorothioate
  modified_base 99: mod_base = OTHER; note = 2'-O-Methyl-uridine phosphorothioate
  modified_base 100: mod_base = OTHER; note = 2'-O-Methyl-uridine

SEQ ID NO: 2070 - RNA, 100 nt, synthetic construct; identical to SEQ ID NO: 1909
  source 1..100: mol_type = other RNA; note = Description of Artificial Sequence: Synthetic polynucleotide
  modified_base 1: mod_base = OTHER; note = 2'-O-Methyl-cytidine phosphorothioate
  modified_base 2: mod_base = OTHER; note = 2'-O-Methyl-adenosine phosphorothioate
  modified_base 3: mod_base = OTHER; note = 2'-O-Methyl-guanosine
  modified_base 9: mod_base = OTHER; note = Nebularine - ribonebularine
  modified_base 14: mod_base = OTHER; note = Nebularine - ribonebularine
  modified_base 21: mod_base = OTHER; note = 2'-O-Methyl-guanosine
  modified_base 28: mod_base = OTHER; note = Nebularine - ribonebularine
  modified_base 29: mod_base = OTHER; note = 2'-O-Methyl-guanosine
  modified_base 30: mod_base = OTHER; note = 2'-O-Methyl-cytidine
  modified_base 31: mod_base = OTHER; note = 2'-O-Methyl-uridine
  modified_base 32: mod_base = OTHER; note = 2'-O-Methyl-adenosine
  modified_base 33: mod_base = OTHER; note = 2'-O-Methyl-guanosine
  modified_base 34: mod_base = OTHER; note = Nebularine - ribonebularine
  modified_base 35: mod_base = OTHER; note = 2'-O-Methyl-adenosine
  modified_base 36: mod_base = OTHER; note = 2'-O-Methyl-adenosine
  modified_base 37: mod_base = OTHER; note = 2'-O-Methyl-uridine
  modified_base 38: mod_base = OTHER; note = 2'-O-Methyl-adenosine
  modified_base 39: mod_base = OTHER; note = 2'-O-Methyl-guanosine
  modified_base 40: mod_base = OTHER; note = 2'-O-Methyl-cytidine
  modified_base 41: mod_base = OTHER; note = 2'-O-Methyl-adenosine
  modified_base 42: mod_base = OTHER; note = Nebularine - ribonebularine
  modified_base 46: mod_base = OTHER; note = 2'-O-Methyl-adenosine
  modified_base 48: mod_base = OTHER; note = 2'-O-Methyl-adenosine
  modified_base 50: mod_base = OTHER; note = 2'-O-Methyl-uridine
  modified_base 52: mod_base = OTHER; note = 2'-O-Methyl-adenosine
  modified_base 53: mod_base = OTHER; note = 2'-O-Methyl-guanosine
  modified_base 54: mod_base = OTHER; note = 2'-O-Methyl-guanosine
  modified_base 55: mod_base = OTHER; note = 2'-O-Methyl-cytidine
  modified_base 56: mod_base = OTHER; note = 2'-O-Methyl-uridine
  modified_base 57: mod_base = OTHER; note = Nebularine - ribonebularine
  modified_base 60: mod_base = OTHER; note = 2'-O-Methyl-cytidine
  modified_base 61: mod_base = OTHER; note = 2'-O-Methyl-cytidine
  modified_base 65: mod_base = OTHER; note = Nebularine - ribonebularine
  modified_base 66: mod_base = OTHER; note = 2'-O-Methyl-uridine
  modified_base 67: mod_base = OTHER; note = 2'-O-Methyl-cytidine
  modified_base 70: mod_base = OTHER; note = 2'-O-Methyl-cytidine
  modified_base 71: mod_base = OTHER; note = 2'-O-Methyl-uridine
  modified_base 72: mod_base = OTHER; note = 2'-O-Methyl-uridine
  modified_base 73: mod_base = OTHER; note = 2'-O-Methyl-guanosine
  modified_base 74: mod_base = OTHER; note = 2'-O-Methyl-adenosine
  modified_base 75: mod_base = OTHER; note = 2'-O-Methyl-adenosine
  modified_base 76: mod_base = OTHER; note = 2'-O-Methyl-adenosine
  modified_base 77: mod_base = OTHER; note = 2'-O-Methyl-adenosine
  modified_base 78: mod_base = OTHER; note = 2'-O-Methyl-adenosine
  modified_base 79: mod_base = OTHER; note = 2'-O-Methyl-guanosine
  modified_base 80: mod_base = OTHER; note = 2'-O-Methyl-uridine
  modified_base 81: mod_base = OTHER; note = 2'-O-Methyl-guanosine
  modified_base 83: mod_base = OTHER; note = 2'-O-Methyl-cytidine
  modified_base 84: mod_base = OTHER; note = 2'-O-Methyl-adenosine
  modified_base 85: mod_base = OTHER; note = 2'-O-Methyl-cytidine
  modified_base 86: mod_base = OTHER; note = 2'-O-Methyl-cytidine
  modified_base 87: mod_base = OTHER; note = 2'-O-Methyl-guanosine
  modified_base 88: mod_base = OTHER; note = 2'-O-Methyl-adenosine
  modified_base 89: mod_base = OTHER; note = 2'-O-Methyl-guanosine
  modified_base 90: mod_base = OTHER; note = 2'-O-Methyl-uridine
  modified_base 91: mod_base = OTHER; note = 2'-O-Methyl-cytidine
  modified_base 92: mod_base = OTHER; note = 2'-O-Methyl-guanosine
  modified_base 93: mod_base = OTHER; note = 2'-O-Methyl-guanosine
  modified_base 94: mod_base = OTHER; note = 2'-O-Methyl-uridine
  modified_base 95: mod_base = OTHER; note = 2'-O-Methyl-guanosine
  modified_base 96: mod_base = OTHER; note = 2'-O-Methyl-cytidine
  modified_base 97: mod_base = OTHER; note = 2'-O-Methyl-uridine
  modified_base 98: mod_base = OTHER; note = 2'-O-Methyl-uridine phosphorothioate
  modified_base 99: mod_base = OTHER; note = 2'-O-Methyl-uridine phosphorothioate
  modified_base 100: mod_base = OTHER; note = 2'-O-Methyl-uridine

SEQ ID NO: 2071 - RNA, 100 nt, synthetic construct; identical to SEQ ID NO: 1910
  source 1..100: mol_type = other RNA; note = Description of Artificial Sequence: Synthetic polynucleotide
  modified_base 1: mod_base = OTHER; note = 2'-O-Methyl-cytidine phosphorothioate
  modified_base 2: mod_base = OTHER; note = 2'-O-Methyl-adenosine phosphorothioate
  modified_base 3: mod_base = OTHER; note = 2'-O-Methyl-guanosine
  modified_base 9: mod_base = OTHER; note = Nebularine - ribonebularine
  modified_base 21: mod_base = OTHER; note = 2'-O-Methyl-guanosine
  modified_base 28: mod_base = OTHER; note = 2'-O-Methyl-adenosine
  modified_base 29: mod_base = OTHER; note = 2'-O-Methyl-guanosine
  modified_base 30: mod_base = OTHER; note = 2'-O-Methyl-cytidine
  modified_base 31: mod_base = OTHER; note = 2'-O-Methyl-uridine
  modified_base 32: mod_base = OTHER; note = 2'-O-Methyl-adenosine
  modified_base 33: mod_base = OTHER; note = 2'-O-Methyl-guanosine
  modified_base 34: mod_base = OTHER; note = Nebularine - ribonebularine
  modified_base 35: mod_base = OTHER; note = 2'-O-Methyl-adenosine
  modified_base 36: mod_base = OTHER; note = 2'-O-Methyl-adenosine
  modified_base 37: mod_base = OTHER; note = 2'-O-Methyl-uridine
  modified_base 38: mod_base = OTHER; note = 2'-O-Methyl-adenosine
  modified_base 39: mod_base = OTHER; note = 2'-O-Methyl-guanosine
  modified_base 40: mod_base = OTHER; note = 2'-O-Methyl-cytidine
  modified_base 41: mod_base = OTHER; note = 2'-O-Methyl-adenosine
  modified_base 42: mod_base = OTHER; note = 2'-O-Methyl-adenosine
  modified_base 46: mod_base = OTHER; note = 2'-O-Methyl-adenosine
  modified_base 48: mod_base = OTHER; note = 2'-O-Methyl-adenosine
  modified_base 50: mod_base = OTHER; note = 2'-O-Methyl-uridine
  modified_base 52: mod_base = OTHER; note = 2'-O-Methyl-adenosine
  modified_base 53: mod_base = OTHER; note = 2'-O-Methyl-guanosine
  modified_base 54: mod_base = OTHER; note = 2'-O-Methyl-guanosine
  modified_base 55: mod_base = OTHER; note = 2'-O-Methyl-cytidine
  modified_base 56: mod_base = OTHER; note = 2'-O-Methyl-uridine
  modified_base 57: mod_base = OTHER; note = Nebularine - ribonebularine
  modified_base 60: mod_base = OTHER; note = 2'-O-Methyl-cytidine
  modified_base 61: mod_base = OTHER; note = 2'-O-Methyl-cytidine
  modified_base 66: mod_base = OTHER; note = 2'-O-Methyl-uridine
  modified_base 67: mod_base = OTHER; note = 2'-O-Methyl-cytidine
  modified_base 70: mod_base = OTHER; note = 2'-O-Methyl-cytidine
  modified_base 71: mod_base = OTHER; note = 2'-O-Methyl-uridine
  modified_base 72: mod_base = OTHER; note = 2'-O-Methyl-uridine
  modified_base 73: mod_base = OTHER; note = 2'-O-Methyl-guanosine
  modified_base 74: mod_base = OTHER; note = 2'-O-Methyl-adenosine
  modified_base 75: mod_base = OTHER; note = 2'-O-Methyl-adenosine
  modified_base 76: mod_base = OTHER; note = 2'-O-Methyl-adenosine
  modified_base 77: mod_base = OTHER; note = 2'-O-Methyl-adenosine
  modified_base 78: mod_base = OTHER; note = 2'-O-Methyl-adenosine
  modified_base 79: mod_base = OTHER; note = 2'-O-Methyl-guanosine
  modified_base 80: mod_base = OTHER; note = 2'-O-Methyl-uridine
  modified_base 81: mod_base = OTHER; note = 2'-O-Methyl-guanosine
  modified_base 83: mod_base = OTHER; note = 2'-O-Methyl-cytidine
  modified_base 84: mod_base = OTHER; note = 2'-O-Methyl-adenosine
  modified_base 85: mod_base = OTHER; note = 2'-O-Methyl-cytidine
  modified_base 86: mod_base = OTHER; note = 2'-O-Methyl-cytidine
  modified_base 87: mod_base = OTHER; note = 2'-O-Methyl-guanosine
  modified_base 88: mod_base = OTHER; note = 2'-O-Methyl-adenosine
  modified_base 89: mod_base = OTHER; note = 2'-O-Methyl-guanosine
  modified_base 90: mod_base = OTHER; note = 2'-O-Methyl-uridine
  modified_base 91: mod_base = OTHER; note = 2'-O-Methyl-cytidine
  modified_base 92: mod_base = OTHER; note = 2'-O-Methyl-guanosine
  modified_base 93: mod_base = OTHER; note = 2'-O-Methyl-guanosine
  modified_base 94: mod_base = OTHER; note = 2'-O-Methyl-uridine
  modified_base 95: mod_base = OTHER; note = 2'-O-Methyl-guanosine
  modified_base 96: mod_base = OTHER; note = 2'-O-Methyl-cytidine
  modified_base 97: mod_base = OTHER; note = 2'-O-Methyl-uridine
  modified_base 98: mod_base = OTHER; note = 2'-O-Methyl-uridine phosphorothioate
  modified_base 99: mod_base = OTHER; note = 2'-O-Methyl-uridine phosphorothioate
  modified_base 100: mod_base = OTHER; note = 2'-O-Methyl-uridine

SEQ ID NO: 2072 - RNA, 100 nt, synthetic construct; identical to SEQ ID NO: 1911
  source 1..100: mol_type = other RNA; note = Description of Artificial Sequence: Synthetic polynucleotide
  modified_base 1: mod_base = OTHER; note = 2'-O-Methyl-cytidine phosphorothioate
  modified_base 2: mod_base = OTHER; note = 2'-O-Methyl-adenosine phosphorothioate
  modified_base 3: mod_base = OTHER; note = 2'-O-Methyl-guanosine
  modified_base 9: mod_base = OTHER; note = Nebularine - ribonebularine
  modified_base 21: mod_base = OTHER; note = 2'-O-Methyl-guanosine
  modified_base 28: mod_base = OTHER; note = 2'-O-Methyl-adenosine
  modified_base 29: mod_base = OTHER; note = 2'-O-Methyl-guanosine
  modified_base 30: mod_base = OTHER; note = 2'-O-Methyl-cytidine
  modified_base 31: mod_base = OTHER; note = 2'-O-Methyl-uridine
  modified_base 32: mod_base = OTHER; note = 2'-O-Methyl-adenosine
  modified_base 33: mod_base = OTHER; note = 2'-O-Methyl-guanosine
  modified_base 34: mod_base = OTHER; note = 2'-O-Methyl-adenosine
  modified_base 35: mod_base = OTHER; note = 2'-O-Methyl-adenosine
  modified_base 36: mod_base = OTHER; note = 2'-O-Methyl-adenosine
  modified_base 37: mod_base = OTHER; note = 2'-O-Methyl-uridine
  modified_base 38: mod_base = OTHER; note = 2'-O-Methyl-adenosine
  modified_base 39: mod_base = OTHER; note = 2'-O-Methyl-guanosine
  modified_base 40: mod_base = OTHER; note = 2'-O-Methyl-cytidine
  modified_base 41: mod_base = OTHER; note = 2'-O-Methyl-adenosine
  modified_base 42: mod_base = OTHER; note = 2'-O-Methyl-adenosine
  modified_base 46: mod_base = OTHER; note = 2'-O-Methyl-adenosine
  modified_base 48: mod_base = OTHER; note = 2'-O-Methyl-adenosine
  modified_base 50: mod_base = OTHER; note = 2'-O-Methyl-uridine
  modified_base 52: mod_base = OTHER; note = 2'-O-Methyl-adenosine
  modified_base 53: mod_base = OTHER; note = 2'-O-Methyl-guanosine
  modified_base 54: mod_base = OTHER; note = 2'-O-Methyl-guanosine
  modified_base 55: mod_base = OTHER; note = 2'-O-Methyl-cytidine
  modified_base 56: mod_base = OTHER; note = 2'-O-Methyl-uridine
  modified_base 57: mod_base = OTHER; note = Nebularine - ribonebularine
  modified_base 60: mod_base = OTHER; note = 2'-O-Methyl-cytidine
  modified_base 61: mod_base = OTHER; note = 2'-O-Methyl-cytidine
  modified_base 66: mod_base = OTHER; note = 2'-O-Methyl-uridine
  modified_base 67: mod_base = OTHER; note = 2'-O-Methyl-cytidine
  modified_base 70: mod_base = OTHER; note = 2'-O-Methyl-cytidine
  modified_base 71: mod_base = OTHER; note = 2'-O-Methyl-uridine
  modified_base 72: mod_base = OTHER; note = 2'-O-Methyl-uridine
  modified_base 73: mod_base = OTHER; note = 2'-O-Methyl-guanosine
  modified_base 74: mod_base = OTHER; note = 2'-O-Methyl-adenosine
  modified_base 75: mod_base = OTHER; note = 2'-O-Methyl-adenosine
  modified_base 76: mod_base = OTHER; note = 2'-O-Methyl-adenosine
  modified_base 77: mod_base = OTHER; note = 2'-O-Methyl-adenosine
  modified_base 78: mod_base = OTHER; note = 2'-O-Methyl-adenosine
  modified_base 79: mod_base = OTHER; note = 2'-O-Methyl-guanosine
  modified_base 80: mod_base = OTHER; note = 2'-O-Methyl-uridine
  modified_base 81: mod_base = OTHER; note = 2'-O-Methyl-guanosine
  modified_base 83: mod_base = OTHER; note = 2'-O-Methyl-cytidine
  modified_base 84: mod_base = OTHER; note = 2'-O-Methyl-adenosine
  modified_base 85: mod_base = OTHER; note = 2'-O-Methyl-cytidine
  modified_base 86: mod_base = OTHER; note = 2'-O-Methyl-cytidine
  modified_base 87: mod_base = OTHER; note = 2'-O-Methyl-guanosine
  modified_base 88: mod_base = OTHER; note = 2'-O-Methyl-adenosine
  modified_base 89: mod_base = OTHER; note = 2'-O-Methyl-guanosine
  modified_base 90: mod_base = OTHER; note = 2'-O-Methyl-uridine
  modified_base 91: mod_base = OTHER; note = 2'-O-Methyl-cytidine
  modified_base 92: mod_base = OTHER; note = 2'-O-Methyl-guanosine
  modified_base 93: mod_base = OTHER; note = 2'-O-Methyl-guanosine
  modified_base 94: mod_base = OTHER; note = 2'-O-Methyl-uridine
  modified_base 95: mod_base = OTHER; note = 2'-O-Methyl-guanosine
  modified_base 96: mod_base = OTHER; note = 2'-O-Methyl-cytidine
  modified_base 97: mod_base = OTHER; note = 2'-O-Methyl-uridine
  modified_base 98: mod_base = OTHER; note = 2'-O-Methyl-uridine phosphorothioate
  modified_base 99: mod_base = OTHER; note = 2'-O-Methyl-uridine phosphorothioate
  modified_base 100: mod_base = OTHER; note = 2'-O-Methyl-uridine

SEQ ID NO: 2073 - RNA, 100 nt, synthetic construct; identical to SEQ ID NO: 1912
  source 1..100: mol_type = other RNA; note = Description of Artificial Sequence: Synthetic polynucleotide
  modified_base 1: mod_base = OTHER; note = 2'-O-Methyl-cytidine phosphorothioate
  modified_base 2: mod_base = OTHER; note = 2'-O-Methyl-adenosine phosphorothioate
  modified_base 3: mod_base = OTHER; note = 2'-O-Methyl-guanosine
  modified_base 9: mod_base = OTHER; note = Nebularine - ribonebularine
  modified_base 21: mod_base = OTHER; note = 2'-O-Methyl-guanosine
  modified_base 28: mod_base = OTHER; note = 2'-O-Methyl-adenosine
  modified_base 29: mod_base = OTHER; note = 2'-O-Methyl-guanosine
  modified_base 30: mod_base = OTHER; note = 2'-O-Methyl-cytidine
  modified_base 31: mod_base = OTHER; note = 2'-O-Methyl-uridine
  modified_base 32: mod_base = OTHER; note = 2'-O-Methyl-adenosine
  modified_base 33: mod_base = OTHER; note = 2'-O-Methyl-guanosine
  modified_base 34: mod_base = OTHER; note = 2'-O-Methyl-adenosine
  modified_base 35: mod_base = OTHER; note = 2'-O-Methyl-adenosine
  modified_base 36: mod_base = OTHER; note = 2'-O-Methyl-adenosine
  modified_base 37: mod_base = OTHER; note = 2'-O-Methyl-uridine
  modified_base 38: mod_base = OTHER; note = 2'-O-Methyl-adenosine
  modified_base 39: mod_base = OTHER; note = 2'-O-Methyl-guanosine
  modified_base 40: mod_base = OTHER; note = 2'-O-Methyl-cytidine
  modified_base 41: mod_base = OTHER; note = 2'-O-Methyl-adenosine
  modified_base 42: mod_base = OTHER; note = 2'-O-Methyl-adenosine
  modified_base 46: mod_base = OTHER; note = 2'-O-Methyl-adenosine
  modified_base 48: mod_base = OTHER; note = 2'-O-Methyl-adenosine
  modified_base 50: mod_base = OTHER; note = 2'-O-Methyl-uridine
  modified_base 52: mod_base = OTHER; note = 2'-O-Methyl-adenosine
  modified_base 53: mod_base = OTHER; note = 2'-O-Methyl-guanosine
  modified_base 54: mod_base = OTHER; note = 2'-O-Methyl-guanosine
  modified_base 55: mod_base = OTHER; note = 2'-O-Methyl-cytidine
  modified_base 56: mod_base = OTHER; note = 2'-O-Methyl-uridine
  modified_base 57: mod_base = OTHER; note = 2'-O-Methyl-adenosine
  modified_base 60: mod_base = OTHER; note = 2'-O-Methyl-cytidine
  modified_base 61: mod_base = OTHER; note = 2'-O-Methyl-cytidine
  modified_base 65: mod_base = OTHER; note = Nebularine - ribonebularine
  modified_base 66: mod_base = OTHER; note = 2'-O-Methyl-uridine
  modified_base 67: mod_base = OTHER; note = 2'-O-Methyl-cytidine
  modified_base 70: mod_base = OTHER; note = 2'-O-Methyl-cytidine
  modified_base 71: mod_base = OTHER; note = 2'-O-Methyl-uridine
  modified_base 72: mod_base = OTHER; note = 2'-O-Methyl-uridine
  modified_base 73: mod_base = OTHER; note = 2'-O-Methyl-guanosine
  modified_base 74: mod_base = OTHER; note = 2'-O-Methyl-adenosine
  modified_base 75: mod_base = OTHER; note = 2'-O-Methyl-adenosine
  modified_base 76: mod_base = OTHER; note = 2'-O-Methyl-adenosine
  modified_base 77: mod_base = OTHER; note = 2'-O-Methyl-adenosine
  modified_base 78: mod_base = OTHER; note = 2'-O-Methyl-adenosine
  modified_base 79: mod_base = OTHER; note = 2'-O-Methyl-guanosine
  modified_base 80: mod_base = OTHER; note = 2'-O-Methyl-uridine
  modified_base 81: mod_base = OTHER; note = 2'-O-Methyl-guanosine
  modified_base 83: mod_base = OTHER; note = 2'-O-Methyl-cytidine
  modified_base 84: mod_base = OTHER; note = 2'-O-Methyl-adenosine
  modified_base 85: mod_base = OTHER; note = 2'-O-Methyl-cytidine
  modified_base 86: mod_base = OTHER; note = 2'-O-Methyl-cytidine
  modified_base 87: mod_base = OTHER; note = 2'-O-Methyl-guanosine
  modified_base 88: mod_base = OTHER; note = 2'-O-Methyl-adenosine
  modified_base 89: mod_base = OTHER; note = 2'-O-Methyl-guanosine
  modified_base 90: mod_base = OTHER; note = 2'-O-Methyl-uridine
  modified_base 91: mod_base = OTHER; note = 2'-O-Methyl-cytidine
  modified_base 92: mod_base = OTHER; note = 2'-O-Methyl-guanosine
  modified_base 93: mod_base = OTHER; note = 2'-O-Methyl-guanosine
  modified_base 94: mod_base = OTHER; note = 2'-O-Methyl-uridine
  modified_base 95: mod_base = OTHER; note = 2'-O-Methyl-guanosine
  modified_base 96: mod_base = OTHER; note = 2'-O-Methyl-cytidine
  modified_base 97: mod_base = OTHER; note = 2'-O-Methyl-uridine
  modified_base 98: mod_base = OTHER; note = 2'-O-Methyl-uridine phosphorothioate
  modified_base 99: mod_base = OTHER; note = 2'-O-Methyl-uridine phosphorothioate
  modified_base 100: mod_base = OTHER; note = 2'-O-Methyl-uridine

SEQ ID NO: 2074 - RNA, 100 nt, synthetic construct; identical to SEQ ID NO: 1913
  source 1..100: mol_type = other RNA; note = Description of Artificial Sequence: Synthetic polynucleotide
  modified_base 1: mod_base = OTHER; note = 2'-O-Methyl-cytidine phosphorothioate
  modified_base 2: mod_base = OTHER; note = 2'-O-Methyl-adenosine phosphorothioate
  modified_base 3: mod_base = OTHER; note = 2'-O-Methyl-guanosine
  modified_base 9: mod_base = OTHER; note = Nebularine - ribonebularine
  modified_base 21: mod_base = OTHER; note = 2'-O-Methyl-guanosine
  modified_base 28: mod_base = OTHER; note = 2'-O-Methyl-adenosine
  modified_base 29: mod_base = OTHER; note = 2'-O-Methyl-guanosine
  modified_base 30: mod_base = OTHER; note = 2'-O-Methyl-cytidine
  modified_base 31: mod_base = OTHER; note = 2'-O-Methyl-uridine
  modified_base 32: mod_base = OTHER; note = 2'-O-Methyl-adenosine
  modified_base 33: mod_base = OTHER; note = 2'-O-Methyl-guanosine
  modified_base 34: mod_base = OTHER; note = Nebularine - ribonebularine
  modified_base 35: mod_base = OTHER; note = 2'-O-Methyl-adenosine
  modified_base 36: mod_base = OTHER; note = 2'-O-Methyl-adenosine
  modified_base 37: mod_base = OTHER; note = 2'-O-Methyl-uridine
  modified_base 38: mod_base = OTHER; note = 2'-O-Methyl-adenosine
  modified_base 39: mod_base = OTHER; note = 2'-O-Methyl-guanosine
  modified_base 40: mod_base = OTHER; note = 2'-O-Methyl-cytidine
  modified_base 41: mod_base = OTHER; note = 2'-O-Methyl-adenosine
  modified_base 42: mod_base = OTHER; note = 2'-O-Methyl-adenosine
  modified_base 46: mod_base = OTHER; note = 2'-O-Methyl-adenosine
  modified_base 48: mod_base = OTHER; note = 2'-O-Methyl-adenosine
  modified_base 50: mod_base = OTHER; note = 2'-O-Methyl-uridine
  modified_base 52: mod_base = OTHER; note = 2'-O-Methyl-adenosine
  modified_base 53: mod_base = OTHER; note = 2'-O-Methyl-guanosine
  modified_base 54: mod_base = OTHER; note = 2'-O-Methyl-guanosine
  modified_base 55: mod_base = OTHER; note = 2'-O-Methyl-cytidine
  modified_base 56: mod_base = OTHER; note = 2'-O-Methyl-uridine
  modified_base 57: mod_base = OTHER; note = Nebularine - ribonebularine
  modified_base 60: mod_base = OTHER; note = 2'-O-Methyl-cytidine
  modified_base 61: mod_base = OTHER; note = 2'-O-Methyl-cytidine
  modified_base 65: mod_base = OTHER; note = Nebularine - ribonebularine
  modified_base 66: mod_base = OTHER; note = 2'-O-Methyl-uridine
  modified_base 67: mod_base = OTHER; note = 2'-O-Methyl-cytidine
  modified_base 70: mod_base = OTHER; note = 2'-O-Methyl-cytidine
  modified_base 71: mod_base = OTHER; note = 2'-O-Methyl-uridine
  modified_base 72: mod_base = OTHER; note = 2'-O-Methyl-uridine
  modified_base 73: mod_base = OTHER; note = 2'-O-Methyl-guanosine
  modified_base 74: mod_base = OTHER; note = 2'-O-Methyl-adenosine
  modified_base 75: mod_base = OTHER; note = 2'-O-Methyl-adenosine
  modified_base 76: mod_base = OTHER; note = 2'-O-Methyl-adenosine
  modified_base 77: mod_base = OTHER; note = 2'-O-Methyl-adenosine
  modified_base 78: mod_base = OTHER; note = 2'-O-Methyl-adenosine
  modified_base 79: mod_base = OTHER; note = 2'-O-Methyl-guanosine
  modified_base 80: mod_base = OTHER; note = 2'-O-Methyl-uridine
  modified_base 81: mod_base = OTHER; note = 2'-O-Methyl-guanosine
  modified_base 83: mod_base = OTHER; note = 2'-O-Methyl-cytidine
  modified_base 84: mod_base = OTHER; note = 2'-O-Methyl-adenosine
  modified_base 85: mod_base = OTHER; note = 2'-O-Methyl-cytidine
  modified_base 86: mod_base = OTHER; note = 2'-O-Methyl-cytidine
  modified_base 87: mod_base = OTHER; note = 2'-O-Methyl-guanosine
  modified_base 88: mod_base = OTHER; note = 2'-O-Methyl-adenosine
  modified_base 89: mod_base = OTHER; note = 2'-O-Methyl-guanosine
  modified_base 90: mod_base = OTHER; note = 2'-O-Methyl-uridine
  modified_base 91: mod_base = OTHER; note = 2'-O-Methyl-cytidine
  modified_base 92: mod_base = OTHER; note = 2'-O-Methyl-guanosine
  modified_base 93: mod_base = OTHER; note = 2'-O-Methyl-guanosine
  modified_base 94: mod_base = OTHER; note = 2'-O-Methyl-uridine
  modified_base 95: mod_base = OTHER; note = 2'-O-Methyl-guanosine
  modified_base 96: mod_base = OTHER; note = 2'-O-Methyl-cytidine
  modified_base 97: mod_base = OTHER; note = 2'-O-Methyl-uridine
  modified_base 98: mod_base = OTHER; note = 2'-O-Methyl-uridine phosphorothioate
  modified_base 99: mod_base = OTHER; note = 2'-O-Methyl-uridine phosphorothioate
  modified_base 100: mod_base = OTHER; note = 2'-O-Methyl-uridine

SEQ ID NO: 2075 - RNA, 100 nt, synthetic construct; identical to SEQ ID NO: 1914
  source 1..100: mol_type = other RNA; note = Description of Artificial Sequence: Synthetic polynucleotide
  modified_base 1: mod_base = OTHER; note = 2'-O-Methyl-cytidine phosphorothioate
  modified_base 2: mod_base = OTHER; note = 2'-O-Methyl-adenosine phosphorothioate
  modified_base 3: mod_base = OTHER; note = 2'-O-Methyl-guanosine
  modified_base 9: mod_base = OTHER; note = Nebularine - ribonebularine
  modified_base 21: mod_base = OTHER; note = 2'-O-Methyl-guanosine
  modified_base 28: mod_base = OTHER; note = Nebularine - ribonebularine
  modified_base 29: mod_base = OTHER; note = 2'-O-Methyl-guanosine
  modified_base 30: mod_base = OTHER; note = 2'-O-Methyl-cytidine
  modified_base 31: mod_base = OTHER; note = 2'-O-Methyl-uridine
  modified_base 32: mod_base = OTHER; note = 2'-O-Methyl-adenosine
  modified_base 33: mod_base = OTHER; note = 2'-O-Methyl-guanosine
  modified_base 34: mod_base = OTHER; note = Nebularine - ribonebularine
  modified_base 35: mod_base = OTHER; note = 2'-O-Methyl-adenosine
  modified_base 36: mod_base = OTHER; note = 2'-O-Methyl-adenosine
  modified_base 37: mod_base = OTHER; note = 2'-O-Methyl-uridine
  modified_base 38: mod_base = OTHER; note = 2'-O-Methyl-adenosine
  modified_base 39: mod_base = OTHER; note = 2'-O-Methyl-guanosine
  modified_base 40: mod_base = OTHER; note = 2'-O-Methyl-cytidine
  modified_base 41: mod_base = OTHER; note = 2'-O-Methyl-adenosine
  modified_base 42: mod_base = OTHER; note = Nebularine - ribonebularine
  modified_base 46: mod_base = OTHER; note = 2'-O-Methyl-adenosine
  modified_base 48: mod_base = OTHER; note = 2'-O-Methyl-adenosine
  modified_base 50: mod_base = OTHER; note = 2'-O-Methyl-uridine
  modified_base 52: mod_base = OTHER; note = 2'-O-Methyl-adenosine
  modified_base 53: mod_base = OTHER; note = 2'-O-Methyl-guanosine
  modified_base 54: mod_base = OTHER; note = 2'-O-Methyl-guanosine
  modified_base 55: mod_base = OTHER; note = 2'-O-Methyl-cytidine
  modified_base 56: mod_base = OTHER; note = 2'-O-Methyl-uridine
  modified_base 57: mod_base = OTHER; note = Nebularine - ribonebularine
  modified_base 60: mod_base = OTHER; note = 2'-O-Methyl-cytidine
  modified_base 61: mod_base = OTHER; note = 2'-O-Methyl-cytidine
  modified_base 65: mod_base = OTHER; note = Nebularine - ribonebularine
  modified_base 66: mod_base = OTHER; note = 2'-O-Methyl-uridine
  modified_base 67: mod_base = OTHER; note = 2'-O-Methyl-cytidine
  modified_base 70: mod_base = OTHER; note = 2'-O-Methyl-cytidine
  modified_base 71: mod_base = OTHER; note = 2'-O-Methyl-uridine
  modified_base 72: mod_base = OTHER; note = 2'-O-Methyl-uridine
  modified_base 73: mod_base = OTHER; note = 2'-O-Methyl-guanosine
  modified_base 74: mod_base = OTHER; note = 2'-O-Methyl-adenosine
  modified_base 75: mod_base = OTHER; note = 2'-O-Methyl-adenosine
  modified_base 76: mod_base = OTHER; note = 2'-O-Methyl-adenosine
  modified_base 77: mod_base = OTHER; note = 2'-O-Methyl-adenosine
  modified_base 78: mod_base = OTHER; note = 2'-O-Methyl-adenosine
  modified_base 79: mod_base = OTHER; note = 2'-O-Methyl-guanosine
  modified_base 80: mod_base = OTHER; note = 2'-O-Methyl-uridine
  modified_base 81: mod_base = OTHER; note = 2'-O-Methyl-guanosine
  modified_base 83: mod_base = OTHER; note = 2'-O-Methyl-cytidine
  modified_base 84: mod_base = OTHER; note = 2'-O-Methyl-adenosine
  modified_base 85: mod_base = OTHER; note = 2'-O-Methyl-cytidine
  modified_base 86: mod_base = OTHER; note = 2'-O-Methyl-cytidine
  modified_base 87: mod_base = OTHER; note = 2'-O-Methyl-guanosine
  modified_base 88: mod_base = OTHER; note = 2'-O-Methyl-adenosine
  modified_base 89: mod_base = OTHER; note = 2'-O-Methyl-guanosine
  modified_base 90: mod_base = OTHER; note = 2'-O-Methyl-uridine
  modified_base 91: mod_base = OTHER; note = 2'-O-Methyl-cytidine
  modified_base 92: mod_base = OTHER; note = 2'-O-Methyl-guanosine
  modified_base 93: mod_base = OTHER; note = 2'-O-Methyl-guanosine
  modified_base 94: mod_base = OTHER; note = 2'-O-Methyl-uridine
  modified_base 95: mod_base = OTHER; note = 2'-O-Methyl-guanosine
  modified_base 96: mod_base = OTHER; note = 2'-O-Methyl-cytidine
  modified_base 97: mod_base = OTHER; note = 2'-O-Methyl-uridine
  modified_base 98: mod_base = OTHER; note = 2'-O-Methyl-uridine phosphorothioate
  modified_base 99: mod_base = OTHER; note = 2'-O-Methyl-uridine phosphorothioate
  modified_base 100: mod_base = OTHER; note = 2'-O-Methyl-uridine

SEQ ID NO: 2076 - RNA, 100 nt, synthetic construct; identical to SEQ ID NO: 1915
  source 1..100: mol_type = other RNA; note = Description of Artificial Sequence: Synthetic polynucleotide
  modified_base 1: mod_base = OTHER; note = 2'-O-Methyl-cytidine phosphorothioate
  modified_base 2: mod_base = OTHER; note = 2'-O-Methyl-adenosine phosphorothioate
  modified_base 3: mod_base = OTHER; note = 2'-O-Methyl-guanosine
  modified_base 14: mod_base = OTHER; note = Nebularine - ribonebularine
  modified_base 21: mod_base = OTHER; note = 2'-O-Methyl-guanosine
  modified_base 28: mod_base = OTHER; note = 2'-O-Methyl-adenosine
  modified_base 29: mod_base = OTHER; note = 2'-O-Methyl-guanosine
  modified_base 30: mod_base = OTHER; note = 2'-O-Methyl-cytidine
  modified_base 31: mod_base = OTHER; note = 2'-O-Methyl-uridine
  modified_base 32: mod_base = OTHER; note = 2'-O-Methyl-adenosine
  modified_base 33: mod_base = OTHER; note = 2'-O-Methyl-guanosine
  modified_base 34: mod_base = OTHER; note = Nebularine - ribonebularine
  modified_base 35: mod_base = OTHER; note = 2'-O-Methyl-adenosine
  modified_base 36: mod_base = OTHER; note = 2'-O-Methyl-adenosine
  modified_base 37: mod_base = OTHER; note = 2'-O-Methyl-uridine
  modified_base 38: mod_base = OTHER; note = 2'-O-Methyl-adenosine
  modified_base 39: mod_base = OTHER; note = 2'-O-Methyl-guanosine
  modified_base 40: mod_base = OTHER; note = 2'-O-Methyl-cytidine
  modified_base 41: mod_base = OTHER; note = 2'-O-Methyl-adenosine
  modified_base 42: mod_base = OTHER; note = 2'-O-Methyl-adenosine
  modified_base 46: mod_base = OTHER; note = 2'-O-Methyl-adenosine
  modified_base 48: mod_base = OTHER; note = 2'-O-Methyl-adenosine
  modified_base 50: mod_base = OTHER; note = 2'-O-Methyl-uridine
  modified_base 52: mod_base = OTHER; note = 2'-O-Methyl-adenosine
  modified_base 53: mod_base = OTHER; note = 2'-O-Methyl-guanosine
  modified_base 54: mod_base = OTHER; note = 2'-O-Methyl-guanosine
  modified_base 55: mod_base = OTHER; note = 2'-O-Methyl-cytidine
  modified_base 56: mod_base = OTHER; note = 2'-O-Methyl-uridine
  modified_base 57: mod_base = OTHER; note = 2'-O-Methyl-adenosine
  modified_base 60: mod_base = OTHER; note = 2'-O-Methyl-cytidine
  modified_base 61: mod_base = OTHER; note = 2'-O-Methyl-cytidine
  modified_base 66: mod_base = OTHER; note = 2'-O-Methyl-uridine
  modified_base 67: mod_base = OTHER; note = 2'-O-Methyl-cytidine
  modified_base 70: mod_base = OTHER; note = 2'-O-Methyl-cytidine
  modified_base 71: mod_base = OTHER; note = 2'-O-Methyl-uridine
  modified_base 72: mod_base = OTHER; note = 2'-O-Methyl-uridine
  modified_base 73: mod_base = OTHER; note = 2'-O-Methyl-guanosine
  modified_base 74: mod_base = OTHER; note = 2'-O-Methyl-adenosine
  modified_base 75: mod_base = OTHER; note = 2'-O-Methyl-adenosine
  modified_base 76: mod_base = OTHER; note = 2'-O-Methyl-adenosine
  modified_base 77: mod_base = OTHER; note = 2'-O-Methyl-adenosine
  modified_base 78: mod_base = OTHER; note = 2'-O-Methyl-adenosine
  modified_base 79: mod_base = OTHER; note = 2'-O-Methyl-guanosine
  modified_base 80: mod_base = OTHER; note = 2'-O-Methyl-uridine
  modified_base 81: mod_base = OTHER; note = 2'-O-Methyl-guanosine
  modified_base 83: mod_base = OTHER; note = 2'-O-Methyl-cytidine
  modified_base 84: mod_base = OTHER; note = 2'-O-Methyl-adenosine
  modified_base 85: mod_base = OTHER; note = 2'-O-Methyl-cytidine
  modified_base 86: mod_base = OTHER; note = 2'-O-Methyl-cytidine
  modified_base 87: mod_base = OTHER; note = 2'-O-Methyl-guanosine
  modified_base 88: mod_base = OTHER; note = 2'-O-Methyl-adenosine
  modified_base 89: mod_base = OTHER; note = 2'-O-Methyl-guanosine
  modified_base 90: mod_base = OTHER; note = 2'-O-Methyl-uridine
  modified_base 91: mod_base = OTHER; note = 2'-O-Methyl-cytidine
  modified_base 92: mod_base = OTHER; note = 2'-O-Methyl-guanosine
  modified_base 93: mod_base = OTHER; note = 2'-O-Methyl-guanosine
  modified_base 94: mod_base = OTHER; note = 2'-O-Methyl-uridine
  modified_base 95: mod_base = OTHER; note = 2'-O-Methyl-guanosine
  modified_base 96: mod_base = OTHER; note = 2'-O-Methyl-cytidine
  modified_base 97: mod_base = OTHER; note = 2'-O-Methyl-uridine
  modified_base 98: mod_base = OTHER; note = 2'-O-Methyl-uridine phosphorothioate
  modified_base 99: mod_base = OTHER; note = 2'-O-Methyl-uridine phosphorothioate
  modified_base 100: mod_base = OTHER; note = 2'-O-Methyl-uridine

SEQ ID NO: 2077 - RNA, 100 nt, synthetic construct; identical to SEQ ID NO: 1916
  source 1..100: mol_type = other RNA; note = Description of Artificial Sequence: Synthetic polynucleotide
  modified_base 1: mod_base = OTHER; note = 2'-O-Methyl-cytidine phosphorothioate
  modified_base 2: mod_base = OTHER; note = 2'-O-Methyl-adenosine phosphorothioate
  modified_base 3: mod_base = OTHER; note = 2'-O-Methyl-guanosine
  modified_base 14: mod_base = OTHER; note = Nebularine - ribonebularine
  modified_base 21: mod_base = OTHER; note = 2'-O-Methyl-guanosine
  modified_base 28: mod_base = OTHER; note = 2'-O-Methyl-adenosine
  modified_base 29: mod_base = OTHER; note = 2'-O-Methyl-guanosine
  modified_base 30: mod_base = OTHER; note = 2'-O-Methyl-cytidine
  modified_base 31: mod_base = OTHER; note = 2'-O-Methyl-uridine
  modified_base 32: mod_base = OTHER; note = 2'-O-Methyl-adenosine
  modified_base 33: mod_base = OTHER; note = 2'-O-Methyl-guanosine
  modified_base 34: mod_base = OTHER; note = Nebularine - ribonebularine
  modified_base 35: mod_base = OTHER; note = 2'-O-Methyl-adenosine
  modified_base 36: mod_base = OTHER; note = 2'-O-Methyl-adenosine
  modified_base 37: mod_base = OTHER; note = 2'-O-Methyl-uridine
  modified_base 38: mod_base = OTHER; note = 2'-O-Methyl-adenosine
  modified_base 39: mod_base = OTHER; note = 2'-O-Methyl-guanosine
  modified_base 40: mod_base = OTHER; note = 2'-O-Methyl-cytidine
  modified_base 41: mod_base = OTHER; note = 2'-O-Methyl-adenosine
  modified_base 42: mod_base = OTHER; note = 2'-O-Methyl-adenosine
  modified_base 46: mod_base = OTHER; note = 2'-O-Methyl-adenosine
  modified_base 48: mod_base = OTHER; note = 2'-O-Methyl-adenosine
  modified_base 50: mod_base = OTHER; note = 2'-O-Methyl-uridine
  modified_base 52: mod_base = OTHER; note = 2'-O-Methyl-adenosine
  modified_base 53: mod_base = OTHER; note = 2'-O-Methyl-guanosine
  modified_base 54: mod_base = OTHER; note = 2'-O-Methyl-guanosine
  modified_base 55: mod_base = OTHER; note = 2'-O-Methyl-cytidine
  modified_base 56: mod_base = OTHER; note = 2'-O-Methyl-uridine
  modified_base 57: mod_base = OTHER; note = Nebularine - ribonebularine
  modified_base 60: mod_base = OTHER; note = 2'-O-Methyl-cytidine
  modified_base 61: mod_base = OTHER; note = 2'-O-Methyl-cytidine
  modified_base 66: mod_base = OTHER; note = 2'-O-Methyl-uridine
  modified_base 67: mod_base = OTHER; note = 2'-O-Methyl-cytidine
  modified_base 70: mod_base = OTHER; note = 2'-O-Methyl-cytidine
  modified_base 71: mod_base = OTHER; note = 2'-O-Methyl-uridine
  modified_base 72: mod_base = OTHER; note = 2'-O-Methyl-uridine
  modified_base 73: mod_base = OTHER; note = 2'-O-Methyl-guanosine
  modified_base 74: mod_base = OTHER; note = 2'-O-Methyl-adenosine
  modified_base 75: mod_base = OTHER; note = 2'-O-Methyl-adenosine
  modified_base 76: mod_base = OTHER; note = 2'-O-Methyl-adenosine
  modified_base 77: mod_base = OTHER; note = 2'-O-Methyl-adenosine
  modified_base 78: mod_base = OTHER; note = 2'-O-Methyl-adenosine
  modified_base 79: mod_base = OTHER; note = 2'-O-Methyl-guanosine
  modified_base 80: mod_base = OTHER; note = 2'-O-Methyl-uridine
  modified_base 81: mod_base = OTHER; note = 2'-O-Methyl-guanosine
  modified_base 83: mod_base = OTHER; note = 2'-O-Methyl-cytidine
  modified_base 84: mod_base = OTHER; note = 2'-O-Methyl-adenosine
  modified_base 85: mod_base = OTHER; note = 2'-O-Methyl-cytidine
  modified_base 86: mod_base = OTHER; note = 2'-O-Methyl-cytidine
  modified_base 87: mod_base = OTHER; note = 2'-O-Methyl-guanosine
  modified_base 88: mod_base = OTHER; note = 2'-O-Methyl-adenosine
  modified_base 89: mod_base = OTHER; note = 2'-O-Methyl-guanosine
  modified_base 90: mod_base = OTHER; note = 2'-O-Methyl-uridine
  modified_base 91: mod_base = OTHER; note = 2'-O-Methyl-cytidine
  modified_base 92: mod_base = OTHER; note = 2'-O-Methyl-guanosine
  modified_base 93: mod_base = OTHER; note = 2'-O-Methyl-guanosine
  modified_base 94: mod_base = OTHER; note = 2'-O-Methyl-uridine
  modified_base 95: mod_base = OTHER; note = 2'-O-Methyl-guanosine
  modified_base 96: mod_base = OTHER; note = 2'-O-Methyl-cytidine
  modified_base 97: mod_base = OTHER; note = 2'-O-Methyl-uridine
  modified_base 98: mod_base = OTHER; note = 2'-O-Methyl-uridine phosphorothioate
  modified_base 99: mod_base = OTHER; note = 2'-O-Methyl-uridine phosphorothioate
  modified_base 100: mod_base = OTHER; note = 2'-O-Methyl-uridine

SEQ ID NO: 2078 - RNA, 100 nt, synthetic construct; identical to SEQ ID NO: 1917
  source 1..100: mol_type = other RNA; note = Description of Artificial Sequence: Synthetic polynucleotide
  modified_base 1: mod_base = OTHER; note = 2'-O-Methyl-cytidine phosphorothioate
  modified_base 2: mod_base = OTHER; note = 2'-O-Methyl-adenosine phosphorothioate
  modified_base 3: mod_base = OTHER; note = 2'-O-Methyl-guanosine
  modified_base 14: mod_base = OTHER; note = Nebularine - ribonebularine
  modified_base 21: mod_base = OTHER; note = 2'-O-Methyl-guanosine
  modified_base 28: mod_base = OTHER; note = 2'-O-Methyl-adenosine
  modified_base 29: mod_base = OTHER; note = 2'-O-Methyl-guanosine
  modified_base 30: mod_base = OTHER; note = 2'-O-Methyl-cytidine
  modified_base 31: mod_base = OTHER; note = 2'-O-Methyl-uridine
  modified_base 32: mod_base = OTHER; note = 2'-O-Methyl-adenosine
  modified_base 33: mod_base = OTHER; note = 2'-O-Methyl-guanosine
  modified_base 34: mod_base = OTHER; note = 2'-O-Methyl-adenosine
  modified_base 35: mod_base = OTHER; note = 2'-O-Methyl-adenosine
  modified_base 36: mod_base = OTHER; note = 2'-O-Methyl-adenosine
  modified_base 37: mod_base = OTHER; note = 2'-O-Methyl-uridine
  modified_base 38: mod_base = OTHER; note = 2'-O-Methyl-adenosine
  modified_base 39: mod_base = OTHER; note = 2'-O-Methyl-guanosine
  modified_base 40: mod_base = OTHER; note = 2'-O-Methyl-cytidine
  modified_base 41: mod_base = OTHER; note = 2'-O-Methyl-adenosine
  modified_base 42: mod_base = OTHER; note = 2'-O-Methyl-adenosine
  modified_base 46: mod_base = OTHER; note = 2'-O-Methyl-adenosine
  modified_base 48: mod_base = OTHER; note = 2'-O-Methyl-adenosine
  modified_base 50: mod_base = OTHER; note = 2'-O-Methyl-uridine
  modified_base 52: mod_base = OTHER; note = 2'-O-Methyl-adenosine
  modified_base 53: mod_base = OTHER; note = 2'-O-Methyl-guanosine
  modified_base 54: mod_base = OTHER; note = 2'-O-Methyl-guanosine
  modified_base 55: mod_base = OTHER; note = 2'-O-Methyl-cytidine
  modified_base 56: mod_base = OTHER; note = 2'-O-Methyl-uridine
  modified_base 57: mod_base = OTHER; note = Nebularine - ribonebularine
  modified_base 60: mod_base = OTHER; note = 2'-O-Methyl-cytidine
  modified_base 61: mod_base = OTHER; note = 2'-O-Methyl-cytidine
  modified_base 66: mod_base = OTHER; note = 2'-O-Methyl-uridine
  modified_base 67: mod_base = OTHER; note = 2'-O-Methyl-cytidine
  modified_base 70: mod_base = OTHER; note = 2'-O-Methyl-cytidine
  modified_base 71: mod_base = OTHER; note = 2'-O-Methyl-uridine
  modified_base 72: mod_base = OTHER; note = 2'-O-Methyl-uridine
  modified_base 73: mod_base = OTHER; note = 2'-O-Methyl-guanosine
  modified_base 74: mod_base = OTHER; note = 2'-O-Methyl-adenosine
  modified_base 75: mod_base = OTHER; note = 2'-O-Methyl-adenosine
  modified_base 76: mod_base = OTHER; note = 2'-O-Methyl-adenosine
  modified_base 77: mod_base = OTHER; note = 2'-O-Methyl-adenosine
  modified_base 78: mod_base = OTHER; note = 2'-O-Methyl-adenosine
  modified_base 79: mod_base = OTHER; note = 2'-O-Methyl-guanosine
  modified_base 80: mod_base = OTHER; note = 2'-O-Methyl-uridine
  modified_base 81: mod_base = OTHER; note = 2'-O-Methyl-guanosine
  modified_base 83: mod_base = OTHER; note = 2'-O-Methyl-cytidine
  modified_base 84: mod_base = OTHER; note = 2'-O-Methyl-adenosine
  modified_base 85: mod_base = OTHER; note = 2'-O-Methyl-cytidine
  modified_base 86: mod_base = OTHER; note = 2'-O-Methyl-cytidine
  modified_base 87: mod_base = OTHER; note = 2'-O-Methyl-guanosine
  modified_base 88: mod_base = OTHER; note = 2'-O-Methyl-adenosine
  modified_base 89: mod_base = OTHER; note = 2'-O-Methyl-guanosine
  modified_base 90: mod_base = OTHER; note = 2'-O-Methyl-uridine
  modified_base 91: mod_base = OTHER; note = 2'-O-Methyl-cytidine
  modified_base 92: mod_base = OTHER; note = 2'-O-Methyl-guanosine
  modified_base 93: mod_base = OTHER; note = 2'-O-Methyl-guanosine
  modified_base 94: mod_base = OTHER; note = 2'-O-Methyl-uridine
  modified_base 95: mod_base = OTHER; note = 2'-O-Methyl-guanosine
  modified_base 96: mod_base = OTHER; note = 2'-O-Methyl-cytidine
  modified_base 97: mod_base = OTHER; note = 2'-O-Methyl-uridine
  modified_base 98: mod_base = OTHER; note = 2'-O-Methyl-uridine phosphorothioate
  modified_base 99: mod_base = OTHER; note = 2'-O-Methyl-uridine phosphorothioate
  modified_base 100: mod_base = OTHER; note = 2'-O-Methyl-uridine

SEQ ID NO: 2079 - RNA, 100 nt, synthetic construct; identical to SEQ ID NO: 1918
  source 1..100: mol_type = other RNA; note = Description of Artificial Sequence: Synthetic polynucleotide
  modified_base 1: mod_base = OTHER; note = 2'-O-Methyl-cytidine phosphorothioate
  modified_base 2: mod_base = OTHER; note = 2'-O-Methyl-adenosine phosphorothioate
  modified_base 3: mod_base = OTHER; note = 2'-O-Methyl-guanosine
  modified_base 14: mod_base = OTHER; note = Nebularine - ribonebularine
  modified_base 21: mod_base = OTHER; note = 2'-O-Methyl-guanosine
  modified_base 28: mod_base = OTHER; note = 2'-O-Methyl-adenosine
  modified_base 29: mod_base = OTHER; note = 2'-O-Methyl-guanosine
  modified_base 30: mod_base = OTHER; note = 2'-O-Methyl-cytidine
  modified_base 31: mod_base = OTHER; note = 2'-O-Methyl-uridine
  modified_base 32: mod_base = OTHER; note = 2'-O-Methyl-adenosine
  modified_base 33: mod_base = OTHER; note = 2'-O-Methyl-guanosine
  modified_base 34: mod_base = OTHER; note = 2'-O-Methyl-adenosine
  modified_base 35: mod_base = OTHER; note = 2'-O-Methyl-adenosine
  modified_base 36: mod_base = OTHER; note = 2'-O-Methyl-adenosine
  modified_base 37: mod_base = OTHER; note = 2'-O-Methyl-uridine
  modified_base 38: mod_base = OTHER; note = 2'-O-Methyl-adenosine
  modified_base 39: mod_base = OTHER; note = 2'-O-Methyl-guanosine
  modified_base 40: mod_base = OTHER; note = 2'-O-Methyl-cytidine
  modified_base 41: mod_base = OTHER; note = 2'-O-Methyl-adenosine
  modified_base 42: mod_base = OTHER; note = 2'-O-Methyl-adenosine
  modified_base 46: mod_base = OTHER; note = 2'-O-Methyl-adenosine
  modified_base 48: mod_base = OTHER; note = 2'-O-Methyl-adenosine
  modified_base 50: mod_base = OTHER; note = 2'-O-Methyl-uridine
  modified_base 52: mod_base = OTHER; note = 2'-O-Methyl-adenosine
  modified_base 53: mod_base = OTHER; note = 2'-O-Methyl-guanosine
  modified_base 54: mod_base = OTHER; note = 2'-O-Methyl-guanosine
  modified_base 55: mod_base = OTHER; note = 2'-O-Methyl-cytidine
  modified_base 56: mod_base = OTHER; note = 2'-O-Methyl-uridine
  modified_base 57: mod_base = OTHER; note = 2'-O-Methyl-adenosine
  modified_base 60: mod_base = OTHER; note = 2'-O-Methyl-cytidine
  modified_base 61: mod_base = OTHER; note = 2'-O-Methyl-cytidine
  modified_base 65: mod_base = OTHER; note = Nebularine - ribonebularine
  modified_base 66: mod_base = OTHER; note = 2'-O-Methyl-uridine
  modified_base 67: mod_base = OTHER; note = 2'-O-Methyl-cytidine
  modified_base 70: mod_base = OTHER; note = 2'-O-Methyl-cytidine
  modified_base 71: mod_base = OTHER; note = 2'-O-Methyl-uridine
  modified_base 72: mod_base = OTHER; note = 2'-O-Methyl-uridine
  modified_base 73: mod_base = OTHER; note = 2'-O-Methyl-guanosine
  modified_base 74: mod_base = OTHER; note = 2'-O-Methyl-adenosine
  modified_base 75: mod_base = OTHER; note = 2'-O-Methyl-adenosine
  modified_base 76: mod_base = OTHER; note = 2'-O-Methyl-adenosine
  modified_base 77: mod_base = OTHER; note = 2'-O-Methyl-adenosine
  modified_base 78: mod_base = OTHER; note = 2'-O-Methyl-adenosine
  modified_base 79: mod_base = OTHER; note = 2'-O-Methyl-guanosine
  modified_base 80: mod_base = OTHER; note = 2'-O-Methyl-uridine
  modified_base 81: mod_base = OTHER; note = 2'-O-Methyl-guanosine
  modified_base 83: mod_base = OTHER; note = 2'-O-Methyl-cytidine
  modified_base 84: mod_base = OTHER; note = 2'-O-Methyl-adenosine
  modified_base 85: mod_base = OTHER; note = 2'-O-Methyl-cytidine
  modified_base 86: mod_base = OTHER; note = 2'-O-Methyl-cytidine
  modified_base 87: mod_base = OTHER; note = 2'-O-Methyl-guanosine
  modified_base 88: mod_base = OTHER; note = 2'-O-Methyl-adenosine
  modified_base 89: mod_base = OTHER; note = 2'-O-Methyl-guanosine
  modified_base 90: mod_base = OTHER; note = 2'-O-Methyl-uridine
  modified_base 91: mod_base = OTHER; note = 2'-O-Methyl-cytidine
  modified_base 92: mod_base = OTHER; note = 2'-O-Methyl-guanosine
  modified_base 93: mod_base = OTHER; note = 2'-O-Methyl-guanosine
  modified_base 94: mod_base = OTHER; note = 2'-O-Methyl-uridine
  modified_base 95: mod_base = OTHER; note = 2'-O-Methyl-guanosine
  modified_base 96: mod_base = OTHER; note = 2'-O-Methyl-cytidine
  modified_base 97: mod_base = OTHER; note = 2'-O-Methyl-uridine
  modified_base 98: mod_base = OTHER; note = 2'-O-Methyl-uridine phosphorothioate
  modified_base 99: mod_base = OTHER; note = 2'-O-Methyl-uridine phosphorothioate
  modified_base 100: mod_base = OTHER; note = 2'-O-Methyl-uridine

SEQ ID NO: 2080 - RNA, 100 nt, synthetic construct; identical to SEQ ID NO: 1919
  source 1..100: mol_type = other RNA; note = Description of Artificial Sequence: Synthetic polynucleotide
  modified_base 1: mod_base = OTHER; note = 2'-O-Methyl-cytidine phosphorothioate
  modified_base 2: mod_base = OTHER; note = 2'-O-Methyl-adenosine phosphorothioate
  modified_base 3: mod_base = OTHER; note = 2'-O-Methyl-guanosine
  modified_base 14: mod_base = OTHER; note = Nebularine - ribonebularine
  modified_base 21: mod_base = OTHER; note = 2'-O-Methyl-guanosine
  modified_base 28: mod_base = OTHER; note = 2'-O-Methyl-adenosine
  modified_base 29: mod_base = OTHER; note = 2'-O-Methyl-guanosine
  modified_base 30: mod_base = OTHER; note = 2'-O-Methyl-cytidine
  modified_base 31: mod_base = OTHER; note = 2'-O-Methyl-uridine
  modified_base 32: mod_base = OTHER; note = 2'-O-Methyl-adenosine
  modified_base 33: mod_base = OTHER; note = 2'-O-Methyl-guanosine
  modified_base 34: mod_base = OTHER; note = Nebularine - ribonebularine
  modified_base 35: mod_base = OTHER; note = 2'-O-Methyl-adenosine
  modified_base 36: mod_base = OTHER; note = 2'-O-Methyl-adenosine
  modified_base 37: mod_base = OTHER; note = 2'-O-Methyl-uridine
  modified_base 38: mod_base = OTHER; note = 2'-O-Methyl-adenosine
  modified_base 39: mod_base = OTHER; note = 2'-O-Methyl-guanosine
  modified_base 40: mod_base = OTHER; note = 2'-O-Methyl-cytidine
  modified_base 41: mod_base = OTHER; note = 2'-O-Methyl-adenosine
  modified_base 42: mod_base = OTHER; note = 2'-O-Methyl-adenosine
  modified_base 46: mod_base = OTHER; note = 2'-O-Methyl-adenosine
  modified_base 48: mod_base = OTHER; note = 2'-O-Methyl-adenosine
  modified_base 50: mod_base = OTHER; note = 2'-O-Methyl-uridine
  modified_base 52: mod_base = OTHER; note = 2'-O-Methyl-adenosine
  modified_base 53: mod_base = OTHER; note = 2'-O-Methyl-guanosine
  modified_base 54: mod_base = OTHER; note = 2'-O-Methyl-guanosine
  modified_base 55: mod_base = OTHER; note = 2'-O-Methyl-cytidine
  modified_base 56: mod_base = OTHER; note = 2'-O-Methyl-uridine
  modified_base 57: mod_base = OTHER; note = Nebularine - ribonebularine
  modified_base 60: mod_base = OTHER; note = 2'-O-Methyl-cytidine
  modified_base 61: mod_base = OTHER; note = 2'-O-Methyl-cytidine
  modified_base 65: mod_base = OTHER; note = Nebularine - ribonebularine
  modified_base 66: mod_base = OTHER; note = 2'-O-Methyl-uridine
  modified_base 67: mod_base = OTHER; note = 2'-O-Methyl-cytidine
  modified_base 70: mod_base = OTHER; note = 2'-O-Methyl-cytidine
  modified_base 71: mod_base = OTHER; note = 2'-O-Methyl-uridine
  modified_base 72: mod_base = OTHER; note = 2'-O-Methyl-uridine
  modified_base 73: mod_base = OTHER; note = 2'-O-Methyl-guanosine
  modified_base 74: mod_base = OTHER; note = 2'-O-Methyl-adenosine
  modified_base 75: mod_base = OTHER; note = 2'-O-Methyl-adenosine
  modified_base 76: mod_base = OTHER; note = 2'-O-Methyl-adenosine
  modified_base 77: mod_base = OTHER; note = 2'-O-Methyl-adenosine
  modified_base 78: mod_base = OTHER; note = 2'-O-Methyl-adenosine
  modified_base 79: mod_base = OTHER; note = 2'-O-Methyl-guanosine
  modified_base 80: mod_base = OTHER; note = 2'-O-Methyl-uridine
  modified_base 81: mod_base = OTHER; note = 2'-O-Methyl-guanosine
  modified_base 83: mod_base = OTHER; note = 2'-O-Methyl-cytidine
  modified_base 84: mod_base = OTHER; note = 2'-O-Methyl-adenosine
  modified_base 85: mod_base = OTHER; note = 2'-O-Methyl-cytidine
  modified_base 86: mod_base = OTHER; note = 2'-O-Methyl-cytidine
  modified_base 87: mod_base = OTHER; note = 2'-O-Methyl-guanosine
  modified_base 88: mod_base = OTHER; note = 2'-O-Methyl-adenosine
  modified_base 89: mod_base = OTHER; note = 2'-O-Methyl-guanosine
  modified_base 90: mod_base = OTHER; note = 2'-O-Methyl-uridine
  modified_base 91: mod_base = OTHER; note = 2'-O-Methyl-cytidine
  modified_base 92: mod_base = OTHER; note = 2'-O-Methyl-guanosine
  modified_base 93: mod_base = OTHER; note = 2'-O-Methyl-guanosine
  modified_base 94: mod_base = OTHER; note = 2'-O-Methyl-uridine
  modified_base 95: mod_base = OTHER; note = 2'-O-Methyl-guanosine
  modified_base 96: mod_base = OTHER; note = 2'-O-Methyl-cytidine
  modified_base 97: mod_base = OTHER; note = 2'-O-Methyl-uridine
  modified_base 98: mod_base = OTHER; note = 2'-O-Methyl-uridine phosphorothioate
  modified_base 99: mod_base = OTHER; note = 2'-O-Methyl-uridine phosphorothioate
  modified_base 100: mod_base = OTHER; note = 2'-O-Methyl-uridine

SEQ ID NO: 2081 - RNA, 100 nt, synthetic construct; identical to SEQ ID NO: 1920
  source 1..100: mol_type = other RNA; note = Description of Artificial Sequence: Synthetic polynucleotide
  modified_base 1: mod_base = OTHER; note = 2'-O-Methyl-cytidine phosphorothioate
  modified_base 2: mod_base = OTHER; note = 2'-O-Methyl-adenosine phosphorothioate
  modified_base 3: mod_base = OTHER; note = 2'-O-Methyl-guanosine
  modified_base 14: mod_base = OTHER; note = Nebularine - ribonebularine
  modified_base 21: mod_base = OTHER; note = 2'-O-Methyl-guanosine
  modified_base 28: mod_base = OTHER; note = Nebularine - ribonebularine
  modified_base 29: mod_base = OTHER; note = 2'-O-Methyl-guanosine
  modified_base 30: mod_base = OTHER; note = 2'-O-Methyl-cytidine
  modified_base 31: mod_base = OTHER; note = 2'-O-Methyl-uridine
  modified_base 32: mod_base = OTHER; note = 2'-O-Methyl-adenosine
  modified_base 33: mod_base = OTHER; note = 2'-O-Methyl-guanosine
  modified_base 34: mod_base = OTHER; note = Nebularine - ribonebularine
  modified_base 35: mod_base = OTHER; note = 2'-O-Methyl-adenosine
  modified_base 36: mod_base = OTHER; note = 2'-O-Methyl-adenosine
  modified_base 37: mod_base = OTHER; note = 2'-O-Methyl-uridine
  modified_base 38: mod_base = OTHER; note = 2'-O-Methyl-adenosine
  modified_base 39: mod_base = OTHER; note = 2'-O-Methyl-guanosine
  modified_base 40: mod_base = OTHER; note = 2'-O-Methyl-cytidine
  modified_base 41: mod_base = OTHER; note = 2'-O-Methyl-adenosine
  modified_base 42: mod_base = OTHER; note = Nebularine - ribonebularine
  modified_base 46: mod_base = OTHER; note = 2'-O-Methyl-adenosine
  modified_base 48: mod_base = OTHER; note = 2'-O-Methyl-adenosine
  modified_base 50: mod_base = OTHER; note = 2'-O-Methyl-uridine
  modified_base 52: mod_base = OTHER; note = 2'-O-Methyl-adenosine
  modified_base 53: mod_base = OTHER; note = 2'-O-Methyl-guanosine
  modified_base 54: mod_base = OTHER; note = 2'-O-Methyl-guanosine
  modified_base 55: mod_base = OTHER; note = 2'-O-Methyl-cytidine
  modified_base 56: mod_base = OTHER; note = 2'-O-Methyl-uridine
  modified_base 57: mod_base = OTHER; note = Nebularine - ribonebularine
  modified_base 60: mod_base = OTHER; note = 2'-O-Methyl-cytidine
  modified_base 61: mod_base = OTHER; note = 2'-O-Methyl-cytidine
  modified_base 65: mod_base = OTHER; note = Nebularine - ribonebularine
  modified_base 66: mod_base = OTHER; note = 2'-O-Methyl-uridine
  modified_base 67: mod_base = OTHER; note = 2'-O-Methyl-cytidine
  modified_base 70: mod_base = OTHER; note = 2'-O-Methyl-cytidine
  modified_base 71: mod_base = OTHER; note = 2'-O-Methyl-uridine
  modified_base 72: mod_base = OTHER; note = 2'-O-Methyl-uridine
  modified_base 73: mod_base = OTHER; note = 2'-O-Methyl-guanosine
  modified_base 74: mod_base = OTHER; note = 2'-O-Methyl-adenosine
  modified_base 75: mod_base = OTHER; note = 2'-O-Methyl-adenosine
  modified_base 76: mod_base = OTHER; note = 2'-O-Methyl-adenosine
  modified_base 77: mod_base = OTHER; note = 2'-O-Methyl-adenosine
  modified_base 78: mod_base = OTHER; note = 2'-O-Methyl-adenosine
  modified_base 79: mod_base = OTHER; note = 2'-O-Methyl-guanosine
  modified_base 80: mod_base = OTHER; note = 2'-O-Methyl-uridine
  modified_base 81: mod_base = OTHER; note = 2'-O-Methyl-guanosine
  modified_base 83: mod_base = OTHER; note = 2'-O-Methyl-cytidine
  modified_base 84: mod_base = OTHER; note = 2'-O-Methyl-adenosine
  modified_base 85: mod_base = OTHER; note = 2'-O-Methyl-cytidine
  modified_base 86: mod_base = OTHER; note = 2'-O-Methyl-cytidine
  modified_base 87: mod_base = OTHER; note = 2'-O-Methyl-guanosine
  modified_base 88: mod_base = OTHER; note = 2'-O-Methyl-adenosine
  modified_base 89: mod_base = OTHER; note = 2'-O-Methyl-guanosine
  modified_base 90: mod_base = OTHER; note = 2'-O-Methyl-uridine
  modified_base 91: mod_base = OTHER; note = 2'-O-Methyl-cytidine
  modified_base 92: mod_base = OTHER; note = 2'-O-Methyl-guanosine
  modified_base 93: mod_base = OTHER; note = 2'-O-Methyl-guanosine
  modified_base 94: mod_base = OTHER; note = 2'-O-Methyl-uridine
  modified_base 95: mod_base = OTHER; note = 2'-O-Methyl-guanosine
  modified_base 96: mod_base = OTHER; note = 2'-O-Methyl-cytidine
  modified_base 97: mod_base = OTHER; note = 2'-O-Methyl-uridine
  modified_base 98: mod_base = OTHER; note = 2'-O-Methyl-uridine phosphorothioate
  modified_base 99: mod_base = OTHER; note = 2'-O-Methyl-uridine phosphorothioate
  modified_base 100: mod_base = OTHER; note = 2'-O-Methyl-uridine

SEQ ID NO: 2082 - RNA, 100 nt, synthetic construct; identical to SEQ ID NO: 1921
  source 1..100: mol_type = other RNA; note = Description of Artificial Sequence: Synthetic polynucleotide
  modified_base 1: mod_base = OTHER; note = 2'-O-Methyl-cytidine phosphorothioate
  modified_base 2: mod_base = OTHER; note = 2'-O-Methyl-adenosine phosphorothioate
  modified_base 3: mod_base = OTHER; note = 2'-O-Methyl-guanosine
  modified_base 9: mod_base = OTHER; note = Nebularine - ribonebularine
  modified_base 14: mod_base = OTHER; note = Nebularine - ribonebularine
  modified_base 21: mod_base = OTHER; note = 2'-O-Methyl-guanosine
  modified_base 28: mod_base = OTHER; note = Nebularine - 2'-O-methylnebularine
  modified_base 29: mod_base = OTHER; note = 2'-O-Methyl-guanosine
  modified_base 30: mod_base = OTHER; note = 2'-O-Methyl-cytidine
  modified_base 31: mod_base = OTHER; note = 2'-O-Methyl-uridine
  modified_base 32: mod_base = OTHER; note = 2'-O-Methyl-adenosine
  modified_base 33: mod_base = OTHER; note = 2'-O-Methyl-guanosine
  modified_base 34: mod_base = OTHER; note = Nebularine - 2'-O-methylnebularine
  modified_base 35: mod_base = OTHER; note = 2'-O-Methyl-adenosine
  modified_base 36: mod_base = OTHER; note = 2'-O-Methyl-adenosine
  modified_base 37: mod_base = OTHER; note = 2'-O-Methyl-uridine
  modified_base 38: mod_base = OTHER; note = 2'-O-Methyl-adenosine
  modified_base 39: mod_base = OTHER; note = 2'-O-Methyl-guanosine
  modified_base 40: mod_base = OTHER; note = 2'-O-Methyl-cytidine
  modified_base 41: mod_base = OTHER; note = 2'-O-Methyl-adenosine
  modified_base 42: mod_base = OTHER; note = Nebularine - 2'-O-methylnebularine
  modified_base 46: mod_base = OTHER; note = 2'-O-Methyl-adenosine
  modified_base 48: mod_base = OTHER; note = 2'-O-Methyl-adenosine
  modified_base 50: mod_base = OTHER; note = 2'-O-Methyl-uridine
  modified_base 52: mod_base = OTHER; note = 2'-O-Methyl-adenosine
  modified_base 53: mod_base = OTHER; note = 2'-O-Methyl-guanosine
  modified_base 54: mod_base = OTHER; note = 2'-O-Methyl-guanosine
  modified_base 55: mod_base = OTHER; note = 2'-O-Methyl-cytidine
  modified_base 56: mod_base = OTHER; note = 2'-O-Methyl-uridine
  modified_base 57: mod_base = OTHER; note = Nebularine - 2'-O-methylnebularine
  modified_base 60: mod_base = OTHER; note = 2'-O-Methyl-cytidine
  modified_base 61: mod_base = OTHER; note = 2'-O-Methyl-cytidine
  modified_base 66: mod_base = OTHER; note = 2'-O-Methyl-uridine
  modified_base 67: mod_base = OTHER; note = 2'-O-Methyl-cytidine
  modified_base 70: mod_base = OTHER; note = 2'-O-Methyl-cytidine
  modified_base 71: mod_base = OTHER; note = 2'-O-Methyl-uridine
  modified_base 72: mod_base = OTHER; note = 2'-O-Methyl-uridine
  modified_base 73: mod_base = OTHER; note = 2'-O-Methyl-guanosine
  modified_base 74: mod_base = OTHER; note = 2'-O-Methyl-adenosine
  modified_base 75: mod_base = OTHER; note = 2'-O-Methyl-adenosine
  modified_base 76: mod_base = OTHER; note = 2'-O-Methyl-adenosine
  modified_base 77: mod_base = OTHER; note = 2'-O-Methyl-adenosine
  modified_base 78: mod_base = OTHER; note = 2'-O-Methyl-adenosine
  modified_base 79: mod_base = OTHER; note = 2'-O-Methyl-guanosine
  modified_base 80: mod_base = OTHER; note = 2'-O-Methyl-uridine
  modified_base 81: mod_base = OTHER; note = 2'-O-Methyl-guanosine
  modified_base 83: mod_base = OTHER; note = 2'-O-Methyl-cytidine
  modified_base 84: mod_base = OTHER; note = 2'-O-Methyl-adenosine
  modified_base 85: mod_base = OTHER; note = 2'-O-Methyl-cytidine
  modified_base 86: mod_base = OTHER; note = 2'-O-Methyl-cytidine
  modified_base 87: mod_base = OTHER; note = 2'-O-Methyl-guanosine
  modified_base 88: mod_base = OTHER; note = 2'-O-Methyl-adenosine
  modified_base 89: mod_base = OTHER; note = 2'-O-Methyl-guanosine
  modified_base 90: mod_base = OTHER; note = 2'-O-Methyl-uridine
  modified_base 91: mod_base = OTHER; note = 2'-O-Methyl-cytidine
  modified_base 92: mod_base = OTHER; note = 2'-O-Methyl-guanosine
  modified_base 93: mod_base = OTHER; note = 2'-O-Methyl-guanosine
  modified_base 94: mod_base = OTHER; note = 2'-O-Methyl-uridine
  modified_base 95: mod_base = OTHER; note = 2'-O-Methyl-guanosine
  modified_base 96: mod_base = OTHER; note = 2'-O-Methyl-cytidine
  modified_base 97: mod_base = OTHER; note = 2'-O-Methyl-uridine
  modified_base 98: mod_base = OTHER; note = 2'-O-Methyl-uridine phosphorothioate
  modified_base 99: mod_base = OTHER; note = 2'-O-Methyl-uridine phosphorothioate
  modified_base 100: mod_base = OTHER; note = 2'-O-Methyl-uridine

SEQ ID NO: 2083 - RNA, 100 nt, synthetic construct; identical to SEQ ID NO: 1922
  source 1..100: mol_type = other RNA; note = Description of Artificial Sequence: Synthetic polynucleotide
  modified_base 1: mod_base = OTHER; note = 2'-O-Methyl-cytidine phosphorothioate
  modified_base 2: mod_base = OTHER; note = 2'-O-Methyl-adenosine phosphorothioate
  modified_base 3: mod_base = OTHER; note = 2'-O-Methyl-guanosine
  modified_base 9: mod_base = OTHER; note = Nebularine - ribonebularine
  modified_base 14: mod_base = OTHER; note = Nebularine - ribonebularine
  modified_base 21: mod_base = OTHER; note = 2'-O-Methyl-guanosine
  modified_base 28: mod_base = OTHER; note = 2'-O-Methyl-adenosine
  modified_base 29: mod_base = OTHER; note = 2'-O-Methyl-guanosine
  modified_base 30: mod_base = OTHER; note = 2'-O-Methyl-cytidine
  modified_base 31: mod_base = OTHER; note = 2'-O-Methyl-uridine
  modified_base 32: mod_base = OTHER; note = 2'-O-Methyl-adenosine
  modified_base 33: mod_base = OTHER; note = 2'-O-Methyl-guanosine
  modified_base 34: mod_base = OTHER; note = Nebularine - 2'-O-methylnebularine
  modified_base 35: mod_base = OTHER; note = 2'-O-Methyl-adenosine
  modified_base 36: mod_base = OTHER; note = 2'-O-Methyl-adenosine
  modified_base 37: mod_base = OTHER; note = 2'-O-Methyl-uridine
  modified_base 38: mod_base = OTHER; note = 2'-O-Methyl-adenosine
  modified_base 39: mod_base = OTHER; note = 2'-O-Methyl-guanosine
  modified_base 40: mod_base = OTHER; note = 2'-O-Methyl-cytidine
  modified_base 41: mod_base = OTHER; note = 2'-O-Methyl-adenosine
  modified_base 42: mod_base = OTHER; note = Nebularine - 2'-O-methylnebularine
  modified_base 46: mod_base = OTHER; note = 2'-O-Methyl-adenosine
  modified_base 48: mod_base = OTHER; note = 2'-O-Methyl-adenosine
  modified_base 50: mod_base = OTHER; note = 2'-O-Methyl-uridine
  modified_base 52: mod_base = OTHER; note = 2'-O-Methyl-adenosine
  modified_base 53: mod_base = OTHER; note = 2'-O-Methyl-guanosine
  modified_base 54: mod_base = OTHER; note = 2'-O-Methyl-guanosine
  modified_base 55: mod_base = OTHER; note = 2'-O-Methyl-cytidine
  modified_base 56: mod_base = OTHER; note = 2'-O-Methyl-uridine
  modified_base 57: mod_base = OTHER; note = Nebularine - 2'-O-methylnebularine
  modified_base 60: mod_base = OTHER; note = 2'-O-Methyl-cytidine
  modified_base 61: mod_base = OTHER; note = 2'-O-Methyl-cytidine
  modified_base 66: mod_base = OTHER; note = 2'-O-Methyl-uridine
  modified_base 67: mod_base = OTHER; note = 2'-O-Methyl-cytidine
  modified_base 70: mod_base = OTHER; note = 2'-O-Methyl-cytidine
  modified_base 71: mod_base = OTHER; note = 2'-O-Methyl-uridine
  modified_base 72: mod_base = OTHER; note = 2'-O-Methyl-uridine
  modified_base 73: mod_base = OTHER; note = 2'-O-Methyl-guanosine
  modified_base 74: mod_base = OTHER; note = 2'-O-Methyl-adenosine
  modified_base 75: mod_base = OTHER; note = 2'-O-Methyl-adenosine
  modified_base 76: mod_base = OTHER; note = 2'-O-Methyl-adenosine
  modified_base 77: mod_base = OTHER; note = 2'-O-Methyl-adenosine
  modified_base 78: mod_base = OTHER; note = 2'-O-Methyl-adenosine
  modified_base 79: mod_base = OTHER; note = 2'-O-Methyl-guanosine
  modified_base 80: mod_base = OTHER; note = 2'-O-Methyl-uridine
  modified_base 81: mod_base = OTHER; note = 2'-O-Methyl-guanosine
  modified_base 83: mod_base = OTHER; note = 2'-O-Methyl-cytidine
  modified_base 84: mod_base = OTHER; note = 2'-O-Methyl-adenosine
  modified_base 85: mod_base = OTHER; note = 2'-O-Methyl-cytidine
  modified_base 86: mod_base = OTHER; note = 2'-O-Methyl-cytidine
  modified_base 87: mod_base = OTHER; note = 2'-O-Methyl-guanosine
  modified_base 88: mod_base = OTHER; note = 2'-O-Methyl-adenosine
  modified_base 89: mod_base = OTHER; note = 2'-O-Methyl-guanosine
  modified_base 90: mod_base = OTHER; note = 2'-O-Methyl-uridine
  modified_base 91: mod_base = OTHER; note = 2'-O-Methyl-cytidine
  modified_base 92: mod_base = OTHER; note = 2'-O-Methyl-guanosine
  modified_base 93: mod_base = OTHER; note = 2'-O-Methyl-guanosine
  modified_base 94: mod_base = OTHER; note = 2'-O-Methyl-uridine
  modified_base 95: mod_base = OTHER; note = 2'-O-Methyl-guanosine
  modified_base 96: mod_base = OTHER; note = 2'-O-Methyl-cytidine
  modified_base 97: mod_base = OTHER; note = 2'-O-Methyl-uridine
  modified_base 98: mod_base = OTHER; note = 2'-O-Methyl-uridine phosphorothioate
  modified_base 99: mod_base = OTHER; note = 2'-O-Methyl-uridine phosphorothioate
  modified_base 100: mod_base = OTHER; note = 2'-O-Methyl-uridine

SEQ ID NO: 2084 - RNA, 100 nt, synthetic construct; identical to SEQ ID NO: 1923
  source 1..100: mol_type = other RNA; note = Description of Artificial Sequence: Synthetic polynucleotide
  modified_base 1: mod_base = OTHER; note = 2'-O-Methyl-cytidine phosphorothioate
  modified_base 2: mod_base = OTHER; note = 2'-O-Methyl-adenosine phosphorothioate
  modified_base 3: mod_base = OTHER; note = 2'-O-Methyl-guanosine
  modified_base 9: mod_base = OTHER; note = Nebularine - ribonebularine
  modified_base 14: mod_base = OTHER; note = Nebularine - ribonebularine
  modified_base 21: mod_base = OTHER; note = 2'-O-Methyl-guanosine
  modified_base 28: mod_base = OTHER; note = 2'-O-Methyl-adenosine
  modified_base 29: mod_base = OTHER; note = 2'-O-Methyl-guanosine
  modified_base 30: mod_base = OTHER; note = 2'-O-Methyl-cytidine
  modified_base 31: mod_base = OTHER; note = 2'-O-Methyl-uridine
  modified_base 32: mod_base = OTHER; note = 2'-O-Methyl-adenosine
  modified_base 33: mod_base = OTHER; note = 2'-O-Methyl-guanosine
  modified_base 34: mod_base = OTHER; note = 2'-O-Methyl-adenosine
  modified_base 35: mod_base = OTHER; note = 2'-O-Methyl-adenosine
  modified_base 36: mod_base = OTHER; note = 2'-O-Methyl-adenosine
  modified_base 37: mod_base = OTHER; note = 2'-O-Methyl-uridine
  modified_base 38: mod_base = OTHER; note = 2'-O-Methyl-adenosine
  modified_base 39: mod_base = OTHER; note = 2'-O-Methyl-guanosine
  modified_base 40: mod_base = OTHER; note = 2'-O-Methyl-cytidine
  modified_base 41: mod_base = OTHER; note = 2'-O-Methyl-adenosine
  modified_base 42: mod_base = OTHER; note = Nebularine - 2'-O-methylnebularine
  modified_base 46: mod_base = OTHER; note = 2'-O-Methyl-adenosine
  modified_base 48: mod_base = OTHER; note = 2'-O-Methyl-adenosine
  modified_base 50: mod_base = OTHER; note = 2'-O-Methyl-uridine
  modified_base 52: mod_base = OTHER; note = 2'-O-Methyl-adenosine
  modified_base 53: mod_base = OTHER; note = 2'-O-Methyl-guanosine
  modified_base 54: mod_base = OTHER; note = 2'-O-Methyl-guanosine
  modified_base 55: mod_base = OTHER; note = 2'-O-Methyl-cytidine
  modified_base 56: mod_base = OTHER; note = 2'-O-Methyl-uridine
  modified_base 57: mod_base = OTHER; note = Nebularine - 2'-O-methylnebularine
  modified_base 60: mod_base = OTHER; note = 2'-O-Methyl-cytidine
  modified_base 61: mod_base = OTHER; note = 2'-O-Methyl-cytidine
  modified_base 66: mod_base = OTHER; note = 2'-O-Methyl-uridine
  modified_base 67: mod_base = OTHER; note = 2'-O-Methyl-cytidine
  modified_base 70: mod_base = OTHER; note = 2'-O-Methyl-cytidine
  modified_base 71: mod_base = OTHER; note = 2'-O-Methyl-uridine
  modified_base 72: mod_base = OTHER; note = 2'-O-Methyl-uridine
  modified_base 73: mod_base = OTHER; note = 2'-O-Methyl-guanosine
  modified_base 74: mod_base = OTHER; note = 2'-O-Methyl-adenosine
  modified_base 75: mod_base = OTHER; note = 2'-O-Methyl-adenosine
  modified_base 76: mod_base = OTHER; note = 2'-O-Methyl-adenosine
  modified_base 77: mod_base = OTHER; note = 2'-O-Methyl-adenosine
  modified_base 78: mod_base = OTHER; note = 2'-O-Methyl-adenosine
  modified_base 79: mod_base = OTHER; note = 2'-O-Methyl-guanosine
  modified_base 80: mod_base = OTHER; note = 2'-O-Methyl-uridine
  modified_base 81: mod_base = OTHER; note = 2'-O-Methyl-guanosine
  modified_base 83: mod_base = OTHER; note = 2'-O-Methyl-cytidine
  modified_base 84: mod_base = OTHER; note = 2'-O-Methyl-adenosine
  modified_base 85: mod_base = OTHER; note = 2'-O-Methyl-cytidine
  modified_base 86: mod_base = OTHER; note = 2'-O-Methyl-cytidine
  modified_base 87: mod_base = OTHER; note = 2'-O-Methyl-guanosine
  modified_base 88: mod_base = OTHER; note = 2'-O-Methyl-adenosine
  modified_base 89: mod_base = OTHER; note = 2'-O-Methyl-guanosine
  modified_base 90: mod_base = OTHER; note = 2'-O-Methyl-uridine
  modified_base 91: mod_base = OTHER; note = 2'-O-Methyl-cytidine
  modified_base 92: mod_base = OTHER; note = 2'-O-Methyl-guanosine
  modified_base 93: mod_base = OTHER; note = 2'-O-Methyl-guanosine
  modified_base 94: mod_base = OTHER; note = 2'-O-Methyl-uridine
  modified_base 95: mod_base = OTHER; note = 2'-O-Methyl-guanosine
  modified_base 96: mod_base = OTHER; note = 2'-O-Methyl-cytidine
  modified_base 97: mod_base = OTHER; note = 2'-O-Methyl-uridine
  modified_base 98: mod_base = OTHER; note = 2'-O-Methyl-uridine phosphorothioate
  modified_base 99: mod_base = OTHER; note = 2'-O-Methyl-uridine phosphorothioate
  modified_base 100: mod_base = OTHER; note = 2'-O-Methyl-uridine

SEQ ID NO: 2085 - RNA, 100 nt, synthetic construct; identical to SEQ ID NO: 1924
  source 1..100: mol_type = other RNA; note = Description of Artificial Sequence: Synthetic polynucleotide
  modified_base 1: mod_base = OTHER; note = 2'-O-Methyl-cytidine phosphorothioate
  modified_base 2: mod_base = OTHER; note = 2'-O-Methyl-adenosine phosphorothioate
  modified_base 3: mod_base = OTHER; note = 2'-O-Methyl-guanosine
  modified_base 9: mod_base = OTHER; note = Nebularine - ribonebularine
  modified_base 14: mod_base = OTHER; note = Nebularine - ribonebularine
  modified_base 21: mod_base = OTHER; note = 2'-O-Methyl-guanosine
  modified_base 28: mod_base = OTHER; note = 2'-O-Methyl-adenosine
  modified_base 29: mod_base = OTHER; note = 2'-O-Methyl-guanosine
  modified_base 30: mod_base = OTHER; note = 2'-O-Methyl-cytidine
  modified_base 31: mod_base = OTHER; note = 2'-O-Methyl-uridine
  modified_base 32: mod_base = OTHER; note = 2'-O-Methyl-adenosine
  modified_base 33: mod_base = OTHER; note = 2'-O-Methyl-guanosine
  modified_base 34: mod_base = OTHER; note = 2'-O-Methyl-adenosine
  modified_base 35: mod_base = OTHER; note = 2'-O-Methyl-adenosine
  modified_base 36: mod_base = OTHER; note = 2'-O-Methyl-adenosine
  modified_base 37: mod_base = OTHER; note = 2'-O-Methyl-uridine
  modified_base 38: mod_base = OTHER; note = 2'-O-Methyl-adenosine
  modified_base 39: mod_base = OTHER; note = 2'-O-Methyl-guanosine
  modified_base 40: mod_base = OTHER; note = 2'-O-Methyl-cytidine
  modified_base 41: mod_base = OTHER; note = 2'-O-Methyl-adenosine
  modified_base 42: mod_base = OTHER; note = 2'-O-Methyl-adenosine
  modified_base 46: mod_base = OTHER; note = 2'-O-Methyl-adenosine
  modified_base 48: mod_base = OTHER; note = 2'-O-Methyl-adenosine
  modified_base 50: mod_base = OTHER; note = 2'-O-Methyl-uridine
  modified_base 52: mod_base = OTHER; note = 2'-O-Methyl-adenosine
  modified_base 53: mod_base = OTHER; note = 2'-O-Methyl-guanosine
  modified_base 54: mod_base = OTHER; note = 2'-O-Methyl-guanosine
  modified_base 55: mod_base = OTHER; note = 2'-O-Methyl-cytidine
  modified_base 56: mod_base = OTHER; note = 2'-O-Methyl-uridine
  modified_base 57: mod_base = OTHER; note = Nebularine - 2'-O-methylnebularine
  modified_base 60: mod_base = OTHER; note = 2'-O-Methyl-cytidine
  modified_base 61: mod_base = OTHER; note = 2'-O-Methyl-cytidine
  modified_base 66: mod_base = OTHER; note = 2'-O-Methyl-uridine
  modified_base 67: mod_base = OTHER; note = 2'-O-Methyl-cytidine
  modified_base 70: mod_base = OTHER; note = 2'-O-Methyl-cytidine
  modified_base 71: mod_base = OTHER; note = 2'-O-Methyl-uridine
  modified_base 72: mod_base = OTHER; note = 2'-O-Methyl-uridine
  modified_base 73: mod_base = OTHER; note = 2'-O-Methyl-guanosine
  modified_base 74: mod_base = OTHER; note = 2'-O-Methyl-adenosine
  modified_base 75: mod_base = OTHER; note = 2'-O-Methyl-adenosine
  modified_base 76: mod_base = OTHER; note = 2'-O-Methyl-adenosine
  modified_base 77: mod_base = OTHER; note = 2'-O-Methyl-adenosine
  modified_base 78: mod_base = OTHER; note = 2'-O-Methyl-adenosine
  modified_base 79: mod_base = OTHER; note = 2'-O-Methyl-guanosine
  modified_base 80: mod_base = OTHER; note = 2'-O-Methyl-uridine
  modified_base 81: mod_base = OTHER; note = 2'-O-Methyl-guanosine
  modified_base 83: mod_base = OTHER; note = 2'-O-Methyl-cytidine
  modified_base 84: mod_base = OTHER; note = 2'-O-Methyl-adenosine
  modified_base 85: mod_base = OTHER; note = 2'-O-Methyl-cytidine
  modified_base 86: mod_base = OTHER; note = 2'-O-Methyl-cytidine
  modified_base 87: mod_base = OTHER; note = 2'-O-Methyl-guanosine
  modified_base 88: mod_base = OTHER; note = 2'-O-Methyl-adenosine
  modified_base 89: mod_base = OTHER; note = 2'-O-Methyl-guanosine
  modified_base 90: mod_base = OTHER; note = 2'-O-Methyl-uridine
  modified_base 91: mod_base = OTHER; note = 2'-O-Methyl-cytidine
  modified_base 92: mod_base = OTHER; note = 2'-O-Methyl-guanosine
  modified_base 93: mod_base = OTHER; note = 2'-O-Methyl-guanosine
  modified_base 94: mod_base = OTHER; note = 2'-O-Methyl-uridine
  modified_base 95: mod_base = OTHER; note = 2'-O-Methyl-guanosine
  modified_base 96: mod_base = OTHER; note = 2'-O-Methyl-cytidine
  modified_base 97: mod_base = OTHER; note = 2'-O-Methyl-uridine
  modified_base 98: mod_base = OTHER; note = 2'-O-Methyl-uridine phosphorothioate
  modified_base 99: mod_base = OTHER; note = 2'-O-Methyl-uridine phosphorothioate
  modified_base 100: mod_base = OTHER; note = 2'-O-Methyl-uridine

SEQ ID NO: 2086 - RNA, 100 nt, synthetic construct; identical to SEQ ID NO: 1925
  source 1..100: mol_type = other RNA; note = Description of Artificial Sequence: Synthetic polynucleotide
  modified_base 1: mod_base = OTHER; note = 2'-O-Methyl-cytidine phosphorothioate
  modified_base 2: mod_base = OTHER; note = 2'-O-Methyl-adenosine phosphorothioate
  modified_base 3: mod_base = OTHER; note = 2'-O-Methyl-guanosine
  modified_base 9: mod_base = OTHER; note = Nebularine - ribonebularine
  modified_base 14: mod_base = OTHER; note = Nebularine - ribonebularine
  modified_base 21: mod_base = OTHER; note = 2'-O-Methyl-guanosine
  modified_base 28: mod_base = OTHER; note = Nebularine - 2'-O-methylnebularine
  modified_base 29: mod_base = OTHER; note = 2'-O-Methyl-guanosine
  modified_base 30: mod_base = OTHER; note = 2'-O-Methyl-cytidine
  modified_base 31: mod_base = OTHER; note = 2'-O-Methyl-uridine
  modified_base 32: mod_base = OTHER; note = 2'-O-Methyl-adenosine
  modified_base 33: mod_base = OTHER; note = 2'-O-Methyl-guanosine
  modified_base 34: mod_base = OTHER; note = 2'-O-Methyl-adenosine
  modified_base 35: mod_base = OTHER; note = 2'-O-Methyl-adenosine
  modified_base 36: mod_base = OTHER; note = 2'-O-Methyl-adenosine
  modified_base 37: mod_base = OTHER; note = 2'-O-Methyl-uridine
  modified_base 38: mod_base = OTHER; note = 2'-O-Methyl-adenosine
  modified_base 39: mod_base = OTHER; note = 2'-O-Methyl-guanosine
  modified_base 40: mod_base = OTHER; note = 2'-O-Methyl-cytidine
  modified_base 41: mod_base = OTHER; note = 2'-O-Methyl-adenosine
  modified_base 42: mod_base = OTHER; note = 2'-O-Methyl-adenosine
  modified_base 46: mod_base = OTHER; note = 2'-O-Methyl-adenosine
  modified_base 48: mod_base = OTHER; note = 2'-O-Methyl-adenosine
  modified_base 50: mod_base = OTHER; note = 2'-O-Methyl-uridine
  modified_base 52: mod_base = OTHER; note = 2'-O-Methyl-adenosine
  modified_base 53: mod_base = OTHER; note = 2'-O-Methyl-guanosine
  modified_base 54: mod_base = OTHER; note = 2'-O-Methyl-guanosine
  modified_base 55: mod_base = OTHER; note = 2'-O-Methyl-cytidine
  modified_base 56: mod_base = OTHER; note = 2'-O-Methyl-uridine
  modified_base 57: mod_base = OTHER; note = 2'-O-Methyl-adenosine
  modified_base 60: mod_base = OTHER; note = 2'-O-Methyl-cytidine
  modified_base 61: mod_base = OTHER; note = 2'-O-Methyl-cytidine
  modified_base 66: mod_base = OTHER; note = 2'-O-Methyl-uridine
  modified_base 67: mod_base = OTHER; note = 2'-O-Methyl-cytidine
  modified_base 70: mod_base = OTHER; note = 2'-O-Methyl-cytidine
  modified_base 71: mod_base = OTHER; note = 2'-O-Methyl-uridine
  modified_base 72: mod_base = OTHER; note = 2'-O-Methyl-uridine
  modified_base 73: mod_base = OTHER; note = 2'-O-Methyl-guanosine
  modified_base 74: mod_base = OTHER; note = 2'-O-Methyl-adenosine
  modified_base 75: mod_base = OTHER; note = 2'-O-Methyl-adenosine
  modified_base 76: mod_base = OTHER; note = 2'-O-Methyl-adenosine
  modified_base 77: mod_base = OTHER; note = 2'-O-Methyl-adenosine
  modified_base 78: mod_base = OTHER; note = 2'-O-Methyl-adenosine
  modified_base 79: mod_base = OTHER; note = 2'-O-Methyl-guanosine
  modified_base 80: mod_base = OTHER; note = 2'-O-Methyl-uridine
  modified_base 81: mod_base = OTHER; note = 2'-O-Methyl-guanosine
  modified_base 83: mod_base = OTHER; note = 2'-O-Methyl-cytidine
  modified_base 84: mod_base = OTHER; note = 2'-O-Methyl-adenosine
  modified_base 85: mod_base = OTHER; note = 2'-O-Methyl-cytidine
  modified_base 86: mod_base = OTHER; note = 2'-O-Methyl-cytidine
  modified_base 87: mod_base = OTHER; note = 2'-O-Methyl-guanosine
  modified_base 88: mod_base = OTHER; note = 2'-O-Methyl-adenosine
  modified_base 89: mod_base = OTHER; note = 2'-O-Methyl-guanosine
  modified_base 90: mod_base = OTHER; note = 2'-O-Methyl-uridine
  modified_base 91: mod_base = OTHER; note = 2'-O-Methyl-cytidine
  modified_base 92: mod_base = OTHER; note = 2'-O-Methyl-guanosine
  modified_base 93: mod_base = OTHER; note = 2'-O-Methyl-guanosine
  modified_base 94: mod_base = OTHER; note = 2'-O-Methyl-uridine
  modified_base 95: mod_base = OTHER; note = 2'-O-Methyl-guanosine
  modified_base 96: mod_base = OTHER; note = 2'-O-Methyl-cytidine
  modified_base 97: mod_base = OTHER; note = 2'-O-Methyl-uridine
  modified_base 98: mod_base = OTHER; note = 2'-O-Methyl-uridine phosphorothioate
  modified_base 99: mod_base = OTHER; note = 2'-O-Methyl-uridine phosphorothioate
  modified_base 100: mod_base = OTHER; note = 2'-O-Methyl-uridine

SEQ ID NO: 2087 - RNA, 100 nt, synthetic construct; identical to SEQ ID NO: 1927
  source 1..100: mol_type = other RNA; note = Description of Artificial Sequence: Synthetic polynucleotide
  modified_base 1: mod_base = OTHER; note = 2'-O-Methyl-cytidine phosphorothioate
  modified_base 2: mod_base = OTHER; note = 2'-O-Methyl-adenosine phosphorothioate
  modified_base 3: mod_base = OTHER; note = 2'-O-Methyl-guanosine
  modified_base 9: mod_base = OTHER; note = Nebularine - ribonebularine
  modified_base 14: mod_base = OTHER; note = Nebularine - ribonebularine
  modified_base 21: mod_base = OTHER; note = 2'-O-Methyl-guanosine
  modified_base 28: mod_base = OTHER; note = 2'-O-Methyl-adenosine
  modified_base 29: mod_base = OTHER; note = 2'-O-Methyl-guanosine
  modified_base 30: mod_base = OTHER; note = 2'-O-Methyl-cytidine
  modified_base 31: mod_base = OTHER; note = 2'-O-Methyl-uridine
  modified_base 32: mod_base = OTHER; note = 2'-O-Methyl-adenosine
  modified_base 33: mod_base = OTHER; note = 2'-O-Methyl-guanosine
  modified_base 34: mod_base = OTHER; note = Nebularine - 2'-O-methylnebularine
  modified_base 35: mod_base = OTHER; note = 2'-O-Methyl-adenosine
  modified_base 36: mod_base = OTHER; note = 2'-O-Methyl-adenosine
  modified_base 37: mod_base = OTHER; note = 2'-O-Methyl-uridine
  modified_base 38: mod_base = OTHER; note = 2'-O-Methyl-adenosine
  modified_base 39: mod_base = OTHER; note = 2'-O-Methyl-guanosine
  modified_base 40: mod_base = OTHER; note = 2'-O-Methyl-cytidine
  modified_base 41: mod_base = OTHER; note = 2'-O-Methyl-adenosine
  modified_base 42: mod_base = OTHER; note = Nebularine - 2'-O-methylnebularine
  modified_base 46: mod_base = OTHER; note = 2'-O-Methyl-adenosine
  modified_base 48: mod_base = OTHER; note = 2'-O-Methyl-adenosine
  modified_base 50: mod_base = OTHER; note = 2'-O-Methyl-uridine
  modified_base 52: mod_base = OTHER; note = 2'-O-Methyl-adenosine
  modified_base 53: mod_base = OTHER; note = 2'-O-Methyl-guanosine
  modified_base 54: mod_base = OTHER; note = 2'-O-Methyl-guanosine
  modified_base 55: mod_base = OTHER; note = 2'-O-Methyl-cytidine
  modified_base 56: mod_base = OTHER; note = 2'-O-Methyl-uridine
  modified_base 57: mod_base = OTHER; note = 2'-O-Methyl-adenosine
  modified_base 60: mod_base = OTHER; note = 2'-O-Methyl-cytidine
  modified_base 61: mod_base = OTHER; note = 2'-O-Methyl-cytidine
  modified_base 66: mod_base = OTHER; note = 2'-O-Methyl-uridine
  modified_base 67: mod_base = OTHER; note = 2'-O-Methyl-cytidine
  modified_base 70: mod_base = OTHER; note = 2'-O-Methyl-cytidine
  modified_base 71: mod_base = OTHER; note = 2'-O-Methyl-uridine
  modified_base 72: mod_base = OTHER; note = 2'-O-Methyl-uridine
  modified_base 73: mod_base = OTHER; note = 2'-O-Methyl-guanosine
  modified_base 74: mod_base = OTHER; note = 2'-O-Methyl-adenosine
  modified_base 75: mod_base = OTHER; note = 2'-O-Methyl-adenosine
  modified_base 76: mod_base = OTHER; note = 2'-O-Methyl-adenosine
  modified_base 77: mod_base = OTHER; note = 2'-O-Methyl-adenosine
  modified_base 78: mod_base = OTHER; note = 2'-O-Methyl-adenosine
  modified_base 79: mod_base = OTHER; note = 2'-O-Methyl-guanosine
  modified_base 80: mod_base = OTHER; note = 2'-O-Methyl-uridine
  modified_base 81: mod_base = OTHER; note = 2'-O-Methyl-guanosine
  modified_base 83: mod_base = OTHER; note = 2'-O-Methyl-cytidine
  modified_base 84: mod_base = OTHER; note = 2'-O-Methyl-adenosine
  modified_base 85: mod_base = OTHER; note = 2'-O-Methyl-cytidine
  modified_base 86: mod_base = OTHER; note = 2'-O-Methyl-cytidine
  modified_base 87: mod_base = OTHER; note = 2'-O-Methyl-guanosine
  modified_base 88: mod_base = OTHER; note = 2'-O-Methyl-adenosine
  modified_base 89: mod_base = OTHER; note = 2'-O-Methyl-guanosine
  modified_base 90: mod_base = OTHER; note = 2'-O-Methyl-uridine
  modified_base 91: mod_base = OTHER; note = 2'-O-Methyl-cytidine
  modified_base 92: mod_base = OTHER; note = 2'-O-Methyl-guanosine
  modified_base 93: mod_base = OTHER; note = 2'-O-Methyl-guanosine
  modified_base 94: mod_base = OTHER; note = 2'-O-Methyl-uridine
  modified_base 95: mod_base = OTHER; note = 2'-O-Methyl-guanosine
  modified_base 96: mod_base = OTHER; note = 2'-O-Methyl-cytidine
  modified_base 97: mod_base = OTHER; note = 2'-O-Methyl-uridine
  modified_base 98: mod_base = OTHER; note = 2'-O-Methyl-uridine phosphorothioate
  modified_base 99: mod_base = OTHER; note = 2'-O-Methyl-uridine phosphorothioate
  modified_base 100: mod_base = OTHER; note = 2'-O-Methyl-uridine

SEQ ID NO: 2088 - RNA, 100 nt, synthetic construct; identical to SEQ ID NO: 1928
  source 1..100: mol_type = other RNA; note = Description of Artificial Sequence: Synthetic polynucleotide
  modified_base 1: mod_base = OTHER; note = 2'-O-Methyl-cytidine phosphorothioate
  modified_base 2: mod_base = OTHER; note = 2'-O-Methyl-adenosine phosphorothioate
  modified_base 3: mod_base = OTHER; note = 2'-O-Methyl-guanosine
  modified_base 14: mod_base = OTHER; note = Nebularine - ribonebularine
  modified_base 21: mod_base = OTHER; note = 2'-O-Methyl-guanosine
  modified_base 28: mod_base = OTHER; note = Nebularine - 2'-O-methylnebularine
  modified_base 29: mod_base = OTHER; note = 2'-O-Methyl-guanosine
  modified_base 30: mod_base = OTHER; note = 2'-O-Methyl-cytidine
  modified_base 31: mod_base = OTHER; note = 2'-O-Methyl-uridine
  modified_base 32: mod_base = OTHER; note = 2'-O-Methyl-adenosine
  modified_base 33: mod_base = OTHER; note = 2'-O-Methyl-guanosine
  modified_base 34: mod_base = OTHER; note = Nebularine - 2'-O-methylnebularine
  modified_base 35: mod_base = OTHER; note = 2'-O-Methyl-adenosine
  modified_base 36: mod_base = OTHER; note = 2'-O-Methyl-adenosine
  modified_base 37: mod_base = OTHER; note = 2'-O-Methyl-uridine
  modified_base 38: mod_base = OTHER; note = 2'-O-Methyl-adenosine
  modified_base 39: mod_base = OTHER; note = 2'-O-Methyl-guanosine
  modified_base 40: mod_base = OTHER; note = 2'-O-Methyl-cytidine
  modified_base 41: mod_base = OTHER; note = 2'-O-Methyl-adenosine
  modified_base 42: mod_base = OTHER; note = Nebularine - 2'-O-methylnebularine
  modified_base 46: mod_base = OTHER; note = 2'-O-Methyl-adenosine
  modified_base 48: mod_base = OTHER; note = 2'-O-Methyl-adenosine
  modified_base 50: mod_base = OTHER; note = 2'-O-Methyl-uridine
  modified_base 52: mod_base = OTHER; note = 2'-O-Methyl-adenosine
  modified_base 53: mod_base = OTHER; note = 2'-O-Methyl-guanosine
  modified_base 54: mod_base = OTHER; note = 2'-O-Methyl-guanosine
  modified_base 55: mod_base = OTHER; note = 2'-O-Methyl-cytidine
  modified_base 56: mod_base = OTHER; note = 2'-O-Methyl-uridine
  modified_base 57: mod_base = OTHER; note = Nebularine - 2'-O-methylnebularine
  modified_base 60: mod_base = OTHER; note = 2'-O-Methyl-cytidine
  modified_base 61: mod_base = OTHER; note = 2'-O-Methyl-cytidine
  modified_base 66: mod_base = OTHER; note = 2'-O-Methyl-uridine
  modified_base 67: mod_base = OTHER; note = 2'-O-Methyl-cytidine
  modified_base 70: mod_base = OTHER; note = 2'-O-Methyl-cytidine
  modified_base 71: mod_base = OTHER; note = 2'-O-Methyl-uridine
  modified_base 72: mod_base = OTHER; note = 2'-O-Methyl-uridine
  modified_base 73: mod_base = OTHER; note = 2'-O-Methyl-guanosine
  modified_base 74: mod_base = OTHER; note = 2'-O-Methyl-adenosine
  modified_base 75: mod_base = OTHER; note = 2'-O-Methyl-adenosine
  modified_base 76: mod_base = OTHER; note = 2'-O-Methyl-adenosine
  modified_base 77: mod_base = OTHER; note = 2'-O-Methyl-adenosine
  modified_base 78: mod_base = OTHER; note = 2'-O-Methyl-adenosine
  modified_base 79: mod_base = OTHER; note = 2'-O-Methyl-guanosine
  modified_base 80: mod_base = OTHER; note = 2'-O-Methyl-uridine
  modified_base 81: mod_base = OTHER; note = 2'-O-Methyl-guanosine
  modified_base 83: mod_base = OTHER; note = 2'-O-Methyl-cytidine
  modified_base 84: mod_base = OTHER; note = 2'-O-Methyl-adenosine
  modified_base 85: mod_base = OTHER; note = 2'-O-Methyl-cytidine
  modified_base 86: mod_base = OTHER; note = 2'-O-Methyl-cytidine
  modified_base 87: mod_base = OTHER; note = 2'-O-Methyl-guanosine
  modified_base 88: mod_base = OTHER; note = 2'-O-Methyl-adenosine
  modified_base 89: mod_base = OTHER; note = 2'-O-Methyl-guanosine
  modified_base 90: mod_base = OTHER; note = 2'-O-Methyl-uridine
  modified_base 91: mod_base = OTHER; note = 2'-O-Methyl-cytidine
  modified_base 92: mod_base = OTHER; note = 2'-O-Methyl-guanosine
  modified_base 93: mod_base = OTHER; note = 2'-O-Methyl-guanosine
  modified_base 94: mod_base = OTHER; note = 2'-O-Methyl-uridine
  modified_base 95: mod_base = OTHER; note = 2'-O-Methyl-guanosine
  modified_base 96: mod_base = OTHER; note = 2'-O-Methyl-cytidine
  modified_base 97: mod_base = OTHER; note = 2'-O-Methyl-uridine
  modified_base 98: mod_base = OTHER; note = 2'-O-Methyl-uridine phosphorothioate
  modified_base 99: mod_base = OTHER; note = 2'-O-Methyl-uridine phosphorothioate
  modified_base 100: mod_base = OTHER; note = 2'-O-Methyl-uridine

SEQ ID NO: 2089 - RNA, 100 nt, synthetic construct; identical to SEQ ID NO: 1930
  source 1..100: mol_type = other RNA; note = Description of Artificial Sequence: Synthetic polynucleotide
  modified_base 1: mod_base = OTHER; note = 2'-O-Methyl-cytidine phosphorothioate
  modified_base 2: mod_base = OTHER; note = 2'-O-Methyl-adenosine phosphorothioate
  modified_base 3: mod_base = OTHER; note = 2'-O-Methyl-guanosine
  modified_base 14: mod_base = OTHER; note = Nebularine - ribonebularine
  modified_base 21: mod_base = OTHER; note = 2'-O-Methyl-guanosine
  modified_base 28: mod_base = OTHER; note = 2'-O-Methyl-adenosine
  modified_base 29: mod_base = OTHER; note = 2'-O-Methyl-guanosine
  modified_base 30: mod_base = OTHER; note = 2'-O-Methyl-cytidine
  modified_base 31: mod_base = OTHER; note = 2'-O-Methyl-uridine
  modified_base 32: mod_base = OTHER; note = 2'-O-Methyl-adenosine
  modified_base 33: mod_base = OTHER; note = 2'-O-Methyl-guanosine
  modified_base 34: mod_base = OTHER; note = 2'-O-Methyl-adenosine
  modified_base 35: mod_base = OTHER; note = 2'-O-Methyl-adenosine
  modified_base 36: mod_base = OTHER; note = 2'-O-Methyl-adenosine
  modified_base 37: mod_base = OTHER; note = 2'-O-Methyl-uridine
  modified_base 38: mod_base = OTHER; note = 2'-O-Methyl-adenosine
  modified_base 39: mod_base = OTHER; note = 2'-O-Methyl-guanosine
  modified_base 40: mod_base = OTHER; note = 2'-O-Methyl-cytidine
  modified_base 41: mod_base = OTHER; note = 2'-O-Methyl-adenosine
  modified_base 42: mod_base = OTHER; note = Nebularine - 2'-O-methylnebularine
  modified_base 46: mod_base = OTHER; note = 2'-O-Methyl-adenosine
  modified_base 48: mod_base = OTHER; note = 2'-O-Methyl-adenosine
  modified_base 50: mod_base = OTHER; note = 2'-O-Methyl-uridine
  modified_base 52: mod_base = OTHER; note = 2'-O-Methyl-adenosine
  modified_base 53: mod_base = OTHER; note = 2'-O-Methyl-guanosine
  modified_base 54: mod_base = OTHER; note = 2'-O-Methyl-guanosine
  modified_base 55: mod_base = OTHER; note = 2'-O-Methyl-cytidine
  modified_base 56: mod_base = OTHER; note = 2'-O-Methyl-uridine
  modified_base 57: mod_base = OTHER; note = Nebularine - 2'-O-methylnebularine
  modified_base 60: mod_base = OTHER; note = 2'-O-Methyl-cytidine
  modified_base 61: mod_base = OTHER; note = 2'-O-Methyl-cytidine
  modified_base 66: mod_base = OTHER; note = 2'-O-Methyl-uridine
  modified_base 67: mod_base = OTHER; note = 2'-O-Methyl-cytidine
  modified_base 70: mod_base = OTHER; note = 2'-O-Methyl-cytidine
  modified_base 71: mod_base = OTHER; note = 2'-O-Methyl-uridine
  modified_base 72: mod_base = OTHER; note = 2'-O-Methyl-uridine
  modified_base 73: mod_base = OTHER; note = 2'-O-Methyl-guanosine
  modified_base 74: mod_base = OTHER; note = 2'-O-Methyl-adenosine
  modified_base 75: mod_base = OTHER; note = 2'-O-Methyl-adenosine
  modified_base 76: mod_base = OTHER; note = 2'-O-Methyl-adenosine
  modified_base 77: mod_base = OTHER; note = 2'-O-Methyl-adenosine
  modified_base 78: mod_base = OTHER; note = 2'-O-Methyl-adenosine
  modified_base 79: mod_base = OTHER; note = 2'-O-Methyl-guanosine
  modified_base 80: mod_base = OTHER; note = 2'-O-Methyl-uridine
  modified_base 81: mod_base = OTHER; note = 2'-O-Methyl-guanosine
  modified_base 83: mod_base = OTHER; note = 2'-O-Methyl-cytidine
  modified_base 84: mod_base = OTHER; note = 2'-O-Methyl-adenosine
  modified_base 85: mod_base = OTHER; note = 2'-O-Methyl-cytidine
  modified_base 86: mod_base = OTHER; note = 2'-O-Methyl-cytidine
  modified_base 87: mod_base = OTHER; note = 2'-O-Methyl-guanosine
  modified_base 88: mod_base = OTHER; note = 2'-O-Methyl-adenosine
  modified_base 89: mod_base = OTHER; note = 2'-O-Methyl-guanosine
  modified_base 90: mod_base = OTHER; note = 2'-O-Methyl-uridine
  modified_base 91: mod_base = OTHER; note = 2'-O-Methyl-cytidine
  modified_base 92: mod_base = OTHER; note = 2'-O-Methyl-guanosine
  modified_base 93: mod_base = OTHER; note = 2'-O-Methyl-guanosine
  modified_base 94: mod_base = OTHER; note = 2'-O-Methyl-uridine
  modified_base 95: mod_base = OTHER; note = 2'-O-Methyl-guanosine
  modified_base 96: mod_base = OTHER; note = 2'-O-Methyl-cytidine
  modified_base 97: mod_base = OTHER; note = 2'-O-Methyl-uridine
  modified_base 98: mod_base = OTHER; note = 2'-O-Methyl-uridine phosphorothioate
  modified_base 99: mod_base = OTHER; note = 2'-O-Methyl-uridine phosphorothioate
  modified_base 100: mod_base = OTHER; note = 2'-O-Methyl-uridine

SEQ ID NO: 2090 - RNA, 100 nt, synthetic construct; identical to SEQ ID NO: 1931
  source 1..100: mol_type = other RNA; note = Description of Artificial Sequence: Synthetic polynucleotide
  modified_base 1: mod_base = OTHER; note = 2'-O-Methyl-cytidine phosphorothioate
  modified_base 2: mod_base = OTHER; note = 2'-O-Methyl-adenosine phosphorothioate
  modified_base 3: mod_base = OTHER; note = 2'-O-Methyl-guanosine
  modified_base 14: mod_base = OTHER; note = Nebularine - ribonebularine
  modified_base 21: mod_base = OTHER; note = 2'-O-Methyl-guanosine
  modified_base 28: mod_base = OTHER; note = Nebularine - 2'-O-methylnebularine
  modified_base 29: mod_base = OTHER; note = 2'-O-Methyl-guanosine
  modified_base 30: mod_base = OTHER; note = 2'-O-Methyl-cytidine
  modified_base 31: mod_base = OTHER; note = 2'-O-Methyl-uridine
  modified_base 32: mod_base = OTHER; note = 2'-O-Methyl-adenosine
  modified_base 33: mod_base = OTHER; note = 2'-O-Methyl-guanosine
  modified_base 34: mod_base = OTHER; note = 2'-O-Methyl-adenosine
  modified_base 35: mod_base = OTHER; note = 2'-O-Methyl-adenosine
  modified_base 36: mod_base = OTHER; note = 2'-O-Methyl-adenosine
  modified_base 37: mod_base = OTHER; note = 2'-O-Methyl-uridine
  modified_base 38: mod_base = OTHER; note = 2'-O-Methyl-adenosine
  modified_base 39: mod_base = OTHER; note = 2'-O-Methyl-guanosine
  modified_base 40: mod_base = OTHER; note = 2'-O-Methyl-cytidine
  modified_base 41: mod_base = OTHER; note = 2'-O-Methyl-adenosine
  modified_base 42: mod_base = OTHER; note = 2'-O-Methyl-adenosine
  modified_base 46: mod_base = OTHER; note = 2'-O-Methyl-adenosine
  modified_base 48: mod_base = OTHER; note = 2'-O-Methyl-adenosine
  modified_base 50: mod_base = OTHER; note = 2'-O-Methyl-uridine
  modified_base 52: mod_base = OTHER; note = 2'-O-Methyl-adenosine
  modified_base 53: mod_base = OTHER; note = 2'-O-Methyl-guanosine
  modified_base 54: mod_base = OTHER; note = 2'-O-Methyl-guanosine
  modified_base 55: mod_base = OTHER; note = 2'-O-Methyl-cytidine
  modified_base 56: mod_base = OTHER; note = 2'-O-Methyl-uridine
  modified_base 57: mod_base = OTHER; note = 2'-O-Methyl-adenosine
  modified_base 60: mod_base = OTHER; note = 2'-O-Methyl-cytidine
  modified_base 61: mod_base = OTHER; note = 2'-O-Methyl-cytidine
  modified_base 66: mod_base = OTHER; note = 2'-O-Methyl-uridine
  modified_base 67: mod_base = OTHER; note = 2'-O-Methyl-cytidine
  modified_base 70: mod_base = OTHER; note = 2'-O-Methyl-cytidine
  modified_base 71: mod_base = OTHER; note = 2'-O-Methyl-uridine
  modified_base 72: mod_base = OTHER; note = 2'-O-Methyl-uridine
  modified_base 73: mod_base = OTHER; note = 2'-O-Methyl-guanosine
  modified_base 74: mod_base = OTHER; note = 2'-O-Methyl-adenosine
  modified_base 75: mod_base = OTHER; note = 2'-O-Methyl-adenosine
  modified_base 76: mod_base = OTHER; note = 2'-O-Methyl-adenosine
  modified_base 77: mod_base = OTHER; note = 2'-O-Methyl-adenosine
  modified_base 78: mod_base = OTHER; note = 2'-O-Methyl-adenosine
  modified_base 79: mod_base = OTHER; note = 2'-O-Methyl-guanosine
  modified_base 80: mod_base = OTHER; note = 2'-O-Methyl-uridine
  modified_base 81: mod_base = OTHER; note = 2'-O-Methyl-guanosine
  modified_base 83: mod_base = OTHER; note = 2'-O-Methyl-cytidine
  modified_base 84: mod_base = OTHER; note = 2'-O-Methyl-adenosine
  modified_base 85: mod_base = OTHER; note = 2'-O-Methyl-cytidine
  modified_base 86: mod_base = OTHER; note = 2'-O-Methyl-cytidine
  modified_base 87: mod_base = OTHER; note = 2'-O-Methyl-guanosine
  modified_base 88: mod_base = OTHER; note = 2'-O-Methyl-adenosine
  modified_base 89: mod_base = OTHER; note = 2'-O-Methyl-guanosine
  modified_base 90: mod_base = OTHER; note = 2'-O-Methyl-uridine
  modified_base 91: mod_base = OTHER; note = 2'-O-Methyl-cytidine
  modified_base 92: mod_base = OTHER; note = 2'-O-Methyl-guanosine
  modified_base 93: mod_base = OTHER; note = 2'-O-Methyl-guanosine
  modified_base 94: mod_base = OTHER; note = 2'-O-Methyl-uridine
  modified_base 95: mod_base = OTHER; note = 2'-O-Methyl-guanosine
  modified_base 96: mod_base = OTHER; note = 2'-O-Methyl-cytidine
  modified_base 97: mod_base = OTHER; note = 2'-O-Methyl-uridine
  modified_base 98: mod_base = OTHER; note = 2'-O-Methyl-uridine phosphorothioate
  modified_base 99: mod_base = OTHER; note = 2'-O-Methyl-uridine phosphorothioate
  modified_base 100: mod_base = OTHER; note = 2'-O-Methyl-uridine

SEQ ID NO: 2091 - RNA, 100 nt, synthetic construct; identical to SEQ ID NO: 1932
  source 1..100: mol_type = other RNA; note = Description of Artificial Sequence: Synthetic polynucleotide
  modified_base 1: mod_base = OTHER; note = 2'-O-Methyl-cytidine phosphorothioate
  modified_base 2: mod_base = OTHER; note = 2'-O-Methyl-adenosine phosphorothioate
  modified_base 3: mod_base = OTHER; note = 2'-O-Methyl-guanosine
  modified_base 14: mod_base = OTHER; note = Nebularine - ribonebularine
  modified_base 21: mod_base = OTHER; note = 2'-O-Methyl-guanosine
  modified_base 28: mod_base = OTHER; note = 2'-O-Methyl-adenosine
  modified_base 29: mod_base = OTHER; note = 2'-O-Methyl-guanosine
  modified_base 30: mod_base = OTHER; note = 2'-O-Methyl-cytidine
  modified_base 31: mod_base = OTHER; note = 2'-O-Methyl-uridine
  modified_base 32: mod_base = OTHER; note = 2'-O-Methyl-adenosine
  modified_base 33: mod_base = OTHER; note = 2'-O-Methyl-guanosine
  modified_base 34: mod_base = OTHER; note = 2'-O-Methyl-adenosine
  modified_base 35: mod_base = OTHER; note = 2'-O-Methyl-adenosine
  modified_base 36: mod_base = OTHER; note = 2'-O-Methyl-adenosine
  modified_base 37: mod_base = OTHER; note = 2'-O-Methyl-uridine
  modified_base 38: mod_base = OTHER; note = 2'-O-Methyl-adenosine
  modified_base 39: mod_base = OTHER; note = 2'-O-Methyl-guanosine
  modified_base 40: mod_base = OTHER; note = 2'-O-Methyl-cytidine
  modified_base 41: mod_base = OTHER; note = 2'-O-Methyl-adenosine
  modified_base 42: mod_base = OTHER; note = Nebularine - 2'-O-methylnebularine
  modified_base 46: mod_base = OTHER; note = 2'-O-Methyl-adenosine
  modified_base 48: mod_base = OTHER; note = 2'-O-Methyl-adenosine
  modified_base 50: mod_base = OTHER; note = 2'-O-Methyl-uridine
  modified_base 52: mod_base = OTHER; note = 2'-O-Methyl-adenosine
  modified_base 53: mod_base = OTHER; note = 2'-O-Methyl-guanosine
  modified_base 54: mod_base = OTHER; note = 2'-O-Methyl-guanosine
  modified_base 55: mod_base = OTHER; note = 2'-O-Methyl-cytidine
  modified_base 56: mod_base = OTHER; note = 2'-O-Methyl-uridine
  modified_base 57: mod_base = OTHER; note = 2'-O-Methyl-adenosine
  modified_base 60: mod_base = OTHER; note = 2'-O-Methyl-cytidine
  modified_base 61: mod_base = OTHER; note = 2'-O-Methyl-cytidine
  modified_base 66: mod_base = OTHER; note = 2'-O-Methyl-uridine
  modified_base 67: mod_base = OTHER; note = 2'-O-Methyl-cytidine
  modified_base 70: mod_base = OTHER; note = 2'-O-Methyl-cytidine
  modified_base 71: mod_base = OTHER; note = 2'-O-Methyl-uridine
  modified_base 72: mod_base = OTHER; note = 2'-O-Methyl-uridine
  modified_base 73: mod_base = OTHER; note = 2'-O-Methyl-guanosine
  modified_base 74: mod_base = OTHER; note = 2'-O-Methyl-adenosine
  modified_base 75: mod_base = OTHER; note = 2'-O-Methyl-adenosine
  modified_base 76: mod_base = OTHER; note = 2'-O-Methyl-adenosine
  modified_base 77: mod_base = OTHER; note = 2'-O-Methyl-adenosine
  modified_base 78: mod_base = OTHER; note = 2'-O-Methyl-adenosine
  modified_base 79: mod_base = OTHER; note = 2'-O-Methyl-guanosine
  modified_base 80: mod_base = OTHER; note = 2'-O-Methyl-uridine
  modified_base 81: mod_base = OTHER; note = 2'-O-Methyl-guanosine
  modified_base 83: mod_base = OTHER; note = 2'-O-Methyl-cytidine
  modified_base 84: mod_base = OTHER; note = 2'-O-Methyl-adenosine
  modified_base 85: mod_base = OTHER; note = 2'-O-Methyl-cytidine
  modified_base 86: mod_base = OTHER; note = 2'-O-Methyl-cytidine
  modified_base 87: mod_base = OTHER; note = 2'-O-Methyl-guanosine
  modified_base 88: mod_base = OTHER; note = 2'-O-Methyl-adenosine
  modified_base 89: mod_base = OTHER; note = 2'-O-Methyl-guanosine
  modified_base 90: mod_base = OTHER; note = 2'-O-Methyl-uridine
  modified_base 91: mod_base = OTHER; note = 2'-O-Methyl-cytidine
  modified_base 92: mod_base = OTHER; note = 2'-O-Methyl-guanosine
  modified_base 93: mod_base = OTHER; note = 2'-O-Methyl-guanosine
  modified_base 94: mod_base = OTHER; note = 2'-O-Methyl-uridine
  modified_base 95: mod_base = OTHER; note = 2'-O-Methyl-guanosine
  modified_base 96: mod_base = OTHER; note = 2'-O-Methyl-cytidine
  modified_base 97: mod_base = OTHER; note = 2'-O-Methyl-uridine
  modified_base 98: mod_base = OTHER; note = 2'-O-Methyl-uridine phosphorothioate
  modified_base 99: mod_base = OTHER; note = 2'-O-Methyl-uridine phosphorothioate
  modified_base 100: mod_base = OTHER; note = 2'-O-Methyl-uridine

SEQ ID NO: 2092 - RNA, 100 nt, synthetic construct; identical to SEQ ID NO: 1933
  source 1..100: mol_type = other RNA; note = Description of Artificial Sequence: Synthetic polynucleotide
  modified_base 1: mod_base = OTHER; note = 2'-O-Methyl-cytidine phosphorothioate
  modified_base 2: mod_base = OTHER; note = 2'-O-Methyl-adenosine phosphorothioate
  modified_base 3: mod_base = OTHER; note = 2'-O-Methyl-guanosine
  modified_base 14: mod_base = OTHER; note = Nebularine - ribonebularine
  modified_base 21: mod_base = OTHER; note = 2'-O-Methyl-guanosine
  modified_base 28: mod_base = OTHER; note = 2'-O-Methyl-adenosine
  modified_base 29: mod_base = OTHER; note = 2'-O-Methyl-guanosine
  modified_base 30: mod_base = OTHER; note = 2'-O-Methyl-cytidine
  modified_base 31: mod_base = OTHER; note = 2'-O-Methyl-uridine
  modified_base 32: mod_base = OTHER; note = 2'-O-Methyl-adenosine
  modified_base 33: mod_base = OTHER; note = 2'-O-Methyl-guanosine
  modified_base 34: mod_base = OTHER; note = Nebularine - 2'-O-methylnebularine
  modified_base 35: mod_base = OTHER; note = 2'-O-Methyl-adenosine
  modified_base 36: mod_base = OTHER; note = 2'-O-Methyl-adenosine
  modified_base 37: mod_base = OTHER; note = 2'-O-Methyl-uridine
  modified_base 38: mod_base = OTHER; note = 2'-O-Methyl-adenosine
  modified_base 39: mod_base = OTHER; note = 2'-O-Methyl-guanosine
  modified_base 40: mod_base = OTHER; note = 2'-O-Methyl-cytidine
  modified_base 41: mod_base = OTHER; note = 2'-O-Methyl-adenosine
  modified_base 42: mod_base = OTHER; note = Nebularine - 2'-O-methylnebularine
  modified_base 46: mod_base = OTHER; note = 2'-O-Methyl-adenosine
  modified_base 48: mod_base = OTHER; note = 2'-O-Methyl-adenosine
  modified_base 50: mod_base = OTHER; note = 2'-O-Methyl-uridine
  modified_base 52: mod_base = OTHER; note = 2'-O-Methyl-adenosine
  modified_base 53: mod_base = OTHER; note = 2'-O-Methyl-guanosine
  modified_base 54: mod_base = OTHER; note = 2'-O-Methyl-guanosine
  modified_base 55: mod_base = OTHER; note = 2'-O-Methyl-cytidine
  modified_base 56: mod_base = OTHER; note = 2'-O-Methyl-uridine
  modified_base 57: mod_base = OTHER; note = 2'-O-Methyl-adenosine
  modified_base 60: mod_base = OTHER; note = 2'-O-Methyl-cytidine
  modified_base 61: mod_base = OTHER; note = 2'-O-Methyl-cytidine
  modified_base 66: mod_base = OTHER; note = 2'-O-Methyl-uridine
  modified_base 67: mod_base = OTHER; note = 2'-O-Methyl-cytidine
  modified_base 70: mod_base = OTHER; note = 2'-O-Methyl-cytidine
  modified_base 71: mod_base = OTHER; note = 2'-O-Methyl-uridine
  modified_base 72: mod_base = OTHER; note = 2'-O-Methyl-uridine
  modified_base 73: mod_base = OTHER; note = 2'-O-Methyl-guanosine
  modified_base 74: mod_base = OTHER; note = 2'-O-Methyl-adenosine
  modified_base 75: mod_base = OTHER; note = 2'-O-Methyl-adenosine
  modified_base 76: mod_base = OTHER; note = 2'-O-Methyl-adenosine
  modified_base 77: mod_base = OTHER; note = 2'-O-Methyl-adenosine
  modified_base 78: mod_base = OTHER; note = 2'-O-Methyl-adenosine
  modified_base 79: mod_base = OTHER; note = 2'-O-Methyl-guanosine
  modified_base 80: mod_base = OTHER; note = 2'-O-Methyl-uridine
  modified_base 81: mod_base = OTHER; note = 2'-O-Methyl-guanosine
  modified_base 83: mod_base = OTHER; note = 2'-O-Methyl-cytidine
  modified_base 84: mod_base = OTHER; note = 2'-O-Methyl-adenosine
  modified_base 85: mod_base = OTHER; note = 2'-O-Methyl-cytidine
  modified_base 86: mod_base = OTHER; note = 2'-O-Methyl-cytidine
  modified_base 87: mod_base = OTHER; note = 2'-O-Methyl-guanosine
  modified_base 88: mod_base = OTHER; note = 2'-O-Methyl-adenosine
  modified_base 89: mod_base = OTHER; note = 2'-O-Methyl-guanosine
  modified_base 90: mod_base = OTHER; note = 2'-O-Methyl-uridine
  modified_base 91: mod_base = OTHER; note = 2'-O-Methyl-cytidine
  modified_base 92: mod_base = OTHER; note = 2'-O-Methyl-guanosine
  modified_base 93: mod_base = OTHER; note = 2'-O-Methyl-guanosine
  modified_base 94: mod_base = OTHER; note = 2'-O-Methyl-uridine
  modified_base 95: mod_base = OTHER; note = 2'-O-Methyl-guanosine
  modified_base 96: mod_base = OTHER; note = 2'-O-Methyl-cytidine
  modified_base 97: mod_base = OTHER; note = 2'-O-Methyl-uridine
  modified_base 98: mod_base = OTHER; note = 2'-O-Methyl-uridine phosphorothioate
  modified_base 99: mod_base = OTHER; note = 2'-O-Methyl-uridine phosphorothioate
  modified_base 100: mod_base = OTHER; note = 2'-O-Methyl-uridine

SEQ ID NO: 2093 - RNA, 100 nt, synthetic construct; identical to SEQ ID NO: 1934
  source 1..100: mol_type = other RNA; note = Description of Artificial Sequence: Synthetic polynucleotide
  modified_base 1: mod_base = OTHER; note = 2'-O-Methyl-cytidine phosphorothioate
  modified_base 2: mod_base = OTHER; note = 2'-O-Methyl-adenosine phosphorothioate
  modified_base 3: mod_base = OTHER; note = 2'-O-Methyl-guanosine
  modified_base 9: mod_base = OTHER; note = Nebularine - ribonebularine
  modified_base 21: mod_base = OTHER; note = 2'-O-Methyl-guanosine
  modified_base 28: mod_base = OTHER; note = Nebularine - 2'-O-methylnebularine
  modified_base 29: mod_base = OTHER; note = 2'-O-Methyl-guanosine
  modified_base 30: mod_base = OTHER; note = 2'-O-Methyl-cytidine
  modified_base 31: mod_base = OTHER; note = 2'-O-Methyl-uridine
  modified_base 32: mod_base = OTHER; note = 2'-O-Methyl-adenosine
  modified_base 33: mod_base = OTHER; note = 2'-O-Methyl-guanosine
  modified_base 34: mod_base = OTHER; note = Nebularine - 2'-O-methylnebularine
  modified_base 35: mod_base = OTHER; note = 2'-O-Methyl-adenosine
  modified_base 36: mod_base = OTHER; note = 2'-O-Methyl-adenosine
  modified_base 37: mod_base = OTHER; note = 2'-O-Methyl-uridine
  modified_base 38: mod_base = OTHER; note = 2'-O-Methyl-adenosine
  modified_base 39: mod_base = OTHER; note = 2'-O-Methyl-guanosine
  modified_base 40: mod_base = OTHER; note = 2'-O-Methyl-cytidine
  modified_base 41: mod_base = OTHER; note = 2'-O-Methyl-adenosine
  modified_base 42: mod_base = OTHER; note = Nebularine - 2'-O-methylnebularine
  modified_base 46: mod_base = OTHER; note = 2'-O-Methyl-adenosine
  modified_base 48: mod_base = OTHER; note = 2'-O-Methyl-adenosine
  modified_base 50: mod_base = OTHER; note = 2'-O-Methyl-uridine
  modified_base 52: mod_base = OTHER; note = 2'-O-Methyl-adenosine
  modified_base 53: mod_base = OTHER; note = 2'-O-Methyl-guanosine
  modified_base 54: mod_base = OTHER; note = 2'-O-Methyl-guanosine
  modified_base 55: mod_base = OTHER; note = 2'-O-Methyl-cytidine
  modified_base 56: mod_base = OTHER; note = 2'-O-Methyl-uridine
  modified_base 57: mod_base = OTHER; note = Nebularine - 2'-O-methylnebularine
  modified_base 60: mod_base = OTHER; note = 2'-O-Methyl-cytidine
  modified_base 61: mod_base = OTHER; note = 2'-O-Methyl-cytidine
  modified_base 66: mod_base = OTHER; note = 2'-O-Methyl-uridine
  modified_base 67: mod_base = OTHER; note = 2'-O-Methyl-cytidine
  modified_base 70: mod_base = OTHER; note = 2'-O-Methyl-cytidine
  modified_base 71: mod_base = OTHER; note = 2'-O-Methyl-uridine
  modified_base 72: mod_base = OTHER; note = 2'-O-Methyl-uridine
  modified_base 73: mod_base = OTHER; note = 2'-O-Methyl-guanosine
  modified_base 74: mod_base = OTHER; note = 2'-O-Methyl-adenosine
  modified_base 75: mod_base = OTHER; note = 2'-O-Methyl-adenosine
  modified_base 76: mod_base = OTHER; note = 2'-O-Methyl-adenosine
  modified_base 77: mod_base = OTHER; note = 2'-O-Methyl-adenosine
  modified_base 78: mod_base = OTHER; note = 2'-O-Methyl-adenosine
  modified_base 79: mod_base = OTHER; note = 2'-O-Methyl-guanosine
  modified_base 80: mod_base = OTHER; note = 2'-O-Methyl-uridine
  modified_base 81: mod_base = OTHER; note = 2'-O-Methyl-guanosine
  modified_base 83: mod_base = OTHER; note = 2'-O-Methyl-cytidine
  modified_base 84: mod_base = OTHER; note = 2'-O-Methyl-adenosine
  modified_base 85: mod_base = OTHER; note = 2'-O-Methyl-cytidine
  modified_base 86: mod_base = OTHER; note = 2'-O-Methyl-cytidine
  modified_base 87: mod_base = OTHER; note = 2'-O-Methyl-guanosine
  modified_base 88: mod_base = OTHER; note = 2'-O-Methyl-adenosine
  modified_base 89: mod_base = OTHER; note = 2'-O-Methyl-guanosine
  modified_base 90: mod_base = OTHER; note = 2'-O-Methyl-uridine
  modified_base 91: mod_base = OTHER; note = 2'-O-Methyl-cytidine
  modified_base 92: mod_base = OTHER; note = 2'-O-Methyl-guanosine
  modified_base 93: mod_base = OTHER; note = 2'-O-Methyl-guanosine
  modified_base 94: mod_base = OTHER; note = 2'-O-Methyl-uridine
  modified_base 95: mod_base = OTHER; note = 2'-O-Methyl-guanosine
  modified_base 96: mod_base = OTHER; note = 2'-O-Methyl-cytidine
  modified_base 97: mod_base = OTHER; note = 2'-O-Methyl-uridine
  modified_base 98: mod_base = OTHER; note = 2'-O-Methyl-uridine phosphorothioate
  modified_base 99: mod_base = OTHER; note = 2'-O-Methyl-uridine phosphorothioate
  modified_base 100: mod_base = OTHER; note = 2'-O-Methyl-uridine

SEQ ID NO: 2094 - RNA, 100 nt, synthetic construct; identical to SEQ ID NO: 1935
  source 1..100: mol_type = other RNA; note = Description of Artificial Sequence: Synthetic polynucleotide
  modified_base 1: mod_base = OTHER; note = 2'-O-Methyl-cytidine phosphorothioate
  modified_base 2: mod_base = OTHER; note = 2'-O-Methyl-adenosine phosphorothioate
  modified_base 3: mod_base = OTHER; note = 2'-O-Methyl-guanosine
  modified_base 9: mod_base = OTHER; note = Nebularine - ribonebularine
  modified_base 21: mod_base = OTHER; note = 2'-O-Methyl-guanosine
  modified_base 28: mod_base = OTHER; note = 2'-O-Methyl-adenosine
  modified_base 29: mod_base = OTHER; note = 2'-O-Methyl-guanosine
  modified_base 30: mod_base = OTHER; note = 2'-O-Methyl-cytidine
  modified_base 31: mod_base = OTHER; note = 2'-O-Methyl-uridine
  modified_base 32: mod_base = OTHER; note = 2'-O-Methyl-adenosine
  modified_base 33: mod_base = OTHER; note = 2'-O-Methyl-guanosine
  modified_base 34: mod_base = OTHER; note = Nebularine - 2'-O-methylnebularine
  modified_base 35: mod_base = OTHER; note = 2'-O-Methyl-adenosine
  modified_base 36: mod_base = OTHER; note = 2'-O-Methyl-adenosine
  modified_base 37: mod_base = OTHER; note = 2'-O-Methyl-uridine
  modified_base 38: mod_base = OTHER; note = 2'-O-Methyl-adenosine
  modified_base 39: mod_base = OTHER; note = 2'-O-Methyl-guanosine
  modified_base 40: mod_base = OTHER; note = 2'-O-Methyl-cytidine
  modified_base 41: mod_base = OTHER; note = 2'-O-Methyl-adenosine
  modified_base 42: mod_base = OTHER; note = Nebularine - 2'-O-methylnebularine
  modified_base 46: mod_base = OTHER; note = 2'-O-Methyl-adenosine
  modified_base 48: mod_base = OTHER; note = 2'-O-Methyl-adenosine
  modified_base 50: mod_base = OTHER; note = 2'-O-Methyl-uridine
  modified_base 52: mod_base = OTHER; note = 2'-O-Methyl-adenosine
  modified_base 53: mod_base = OTHER; note = 2'-O-Methyl-guanosine
  modified_base 54: mod_base = OTHER; note = 2'-O-Methyl-guanosine
  modified_base 55: mod_base = OTHER; note = 2'-O-Methyl-cytidine
  modified_base 56: mod_base = OTHER; note = 2'-O-Methyl-uridine
  modified_base 57: mod_base = OTHER; note = Nebularine - 2'-O-methylnebularine
  modified_base 60: mod_base = OTHER; note = 2'-O-Methyl-cytidine
  modified_base 61: mod_base = OTHER; note = 2'-O-Methyl-cytidine
  modified_base 66: mod_base = OTHER; note = 2'-O-Methyl-uridine
  modified_base 67: mod_base = OTHER; note = 2'-O-Methyl-cytidine
  modified_base 70: mod_base = OTHER; note = 2'-O-Methyl-cytidine
  modified_base 71: mod_base = OTHER; note = 2'-O-Methyl-uridine
  modified_base 72: mod_base = OTHER; note = 2'-O-Methyl-uridine
  modified_base 73: mod_base = OTHER; note = 2'-O-Methyl-guanosine
  modified_base 74: mod_base = OTHER; note = 2'-O-Methyl-adenosine
  modified_base 75: mod_base = OTHER; note = 2'-O-Methyl-adenosine
  modified_base 76: mod_base = OTHER; note = 2'-O-Methyl-adenosine
  modified_base 77: mod_base = OTHER; note = 2'-O-Methyl-adenosine
  modified_base 78: mod_base = OTHER; note = 2'-O-Methyl-adenosine
  modified_base 79: mod_base = OTHER; note = 2'-O-Methyl-guanosine
  modified_base 80: mod_base = OTHER; note = 2'-O-Methyl-uridine
  modified_base 81: mod_base = OTHER; note = 2'-O-Methyl-guanosine
  modified_base 83: mod_base = OTHER; note = 2'-O-Methyl-cytidine
  modified_base 84: mod_base = OTHER; note = 2'-O-Methyl-adenosine
  modified_base 85: mod_base = OTHER; note = 2'-O-Methyl-cytidine
  modified_base 86: mod_base = OTHER; note = 2'-O-Methyl-cytidine
  modified_base 87: mod_base = OTHER; note = 2'-O-Methyl-guanosine
  modified_base 88: mod_base = OTHER; note = 2'-O-Methyl-adenosine
  modified_base 89: mod_base = OTHER; note = 2'-O-Methyl-guanosine
  modified_base 90: mod_base = OTHER; note = 2'-O-Methyl-uridine
  modified_base 91: mod_base = OTHER; note = 2'-O-Methyl-cytidine
  modified_base 92: mod_base = OTHER; note = 2'-O-Methyl-guanosine
  modified_base 93: mod_base = OTHER; note = 2'-O-Methyl-guanosine
  modified_base 94: mod_base = OTHER; note = 2'-O-Methyl-uridine
  modified_base 95: mod_base = OTHER; note = 2'-O-Methyl-guanosine
  modified_base 96: mod_base = OTHER; note = 2'-O-Methyl-cytidine
  modified_base 97: mod_base = OTHER; note = 2'-O-Methyl-uridine
  modified_base 98: mod_base = OTHER; note = 2'-O-Methyl-uridine phosphorothioate
  modified_base 99: mod_base = OTHER; note = 2'-O-Methyl-uridine phosphorothioate
  modified_base 100: mod_base = OTHER; note = 2'-O-Methyl-uridine

SEQ ID NO: 2095 - RNA, 100 nt, synthetic construct; identical to SEQ ID NO: 1936
  source 1..100: mol_type = other RNA; note = Description of Artificial Sequence: Synthetic polynucleotide
  modified_base 1: mod_base = OTHER; note = 2'-O-Methyl-cytidine phosphorothioate
  modified_base 2: mod_base = OTHER; note = 2'-O-Methyl-adenosine phosphorothioate
  modified_base 3: mod_base = OTHER; note = 2'-O-Methyl-guanosine
  modified_base 9: mod_base = OTHER; note = Nebularine - ribonebularine
  modified_base 21: mod_base = OTHER; note = 2'-O-Methyl-guanosine
  modified_base 28: mod_base = OTHER; note = 2'-O-Methyl-adenosine
  modified_base 29: mod_base = OTHER; note = 2'-O-Methyl-guanosine
  modified_base 30: mod_base = OTHER; note = 2'-O-Methyl-cytidine
  modified_base 31: mod_base = OTHER; note = 2'-O-Methyl-uridine
  modified_base 32: mod_base = OTHER; note = 2'-O-Methyl-adenosine
  modified_base 33: mod_base = OTHER; note = 2'-O-Methyl-guanosine
  modified_base 34: mod_base = OTHER; note = 2'-O-Methyl-adenosine
  modified_base 35: mod_base = OTHER; note = 2'-O-Methyl-adenosine
  modified_base 36: mod_base = OTHER; note = 2'-O-Methyl-adenosine
  modified_base 37: mod_base = OTHER; note = 2'-O-Methyl-uridine
  modified_base 38: mod_base = OTHER; note = 2'-O-Methyl-adenosine
  modified_base 39: mod_base = OTHER; note = 2'-O-Methyl-guanosine
  modified_base 40: mod_base = OTHER; note = 2'-O-Methyl-cytidine
  modified_base 41: mod_base = OTHER; note = 2'-O-Methyl-adenosine
  modified_base 42: mod_base = OTHER; note = Nebularine - 2'-O-methylnebularine
  modified_base 46: mod_base = OTHER; note = 2'-O-Methyl-adenosine
  modified_base 48: mod_base = OTHER; note = 2'-O-Methyl-adenosine
  modified_base 50: mod_base = OTHER; note = 2'-O-Methyl-uridine
  modified_base 52: mod_base = OTHER; note = 2'-O-Methyl-adenosine
  modified_base 53: mod_base = OTHER; note = 2'-O-Methyl-guanosine
  modified_base 54: mod_base = OTHER; note = 2'-O-Methyl-guanosine
  modified_base 55: mod_base = OTHER; note = 2'-O-Methyl-cytidine
  modified_base 56: mod_base = OTHER; note = 2'-O-Methyl-uridine
  modified_base 57: mod_base = OTHER; note = Nebularine - 2'-O-methylnebularine
  modified_base 60: mod_base = OTHER; note = 2'-O-Methyl-cytidine
  modified_base 61: mod_base = OTHER; note = 2'-O-Methyl-cytidine
  modified_base 66: mod_base = OTHER; note = 2'-O-Methyl-uridine
  modified_base 67: mod_base = OTHER; note = 2'-O-Methyl-cytidine
  modified_base 70: mod_base = OTHER; note = 2'-O-Methyl-cytidine
  modified_base 71: mod_base = OTHER; note = 2'-O-Methyl-uridine
  modified_base 72: mod_base = OTHER; note = 2'-O-Methyl-uridine
  modified_base 73: mod_base = OTHER; note = 2'-O-Methyl-guanosine
  modified_base 74: mod_base = OTHER; note = 2'-O-Methyl-adenosine
  modified_base 75: mod_base = OTHER; note = 2'-O-Methyl-adenosine
  modified_base 76: mod_base = OTHER; note = 2'-O-Methyl-adenosine
  modified_base 77: mod_base = OTHER; note = 2'-O-Methyl-adenosine
  modified_base 78: mod_base = OTHER; note = 2'-O-Methyl-adenosine
  modified_base 79: mod_base = OTHER; note = 2'-O-Methyl-guanosine
  modified_base 80: mod_base = OTHER; note = 2'-O-Methyl-uridine
  modified_base 81: mod_base = OTHER; note = 2'-O-Methyl-guanosine
  modified_base 83: mod_base = OTHER; note = 2'-O-Methyl-cytidine
  modified_base 84: mod_base = OTHER; note = 2'-O-Methyl-adenosine
  modified_base 85: mod_base = OTHER; note = 2'-O-Methyl-cytidine
  modified_base 86: mod_base = OTHER; note = 2'-O-Methyl-cytidine
  modified_base 87: mod_base = OTHER; note = 2'-O-Methyl-guanosine
  modified_base 88: mod_base = OTHER; note = 2'-O-Methyl-adenosine
  modified_base 89: mod_base = OTHER; note = 2'-O-Methyl-guanosine
  modified_base 90: mod_base = OTHER; note = 2'-O-Methyl-uridine
  modified_base 91: mod_base = OTHER; note = 2'-O-Methyl-cytidine
  modified_base 92: mod_base = OTHER; note = 2'-O-Methyl-guanosine
  modified_base 93: mod_base = OTHER; note = 2'-O-Methyl-guanosine
  modified_base 94: mod_base = OTHER; note = 2'-O-Methyl-uridine
  modified_base 95: mod_base = OTHER; note = 2'-O-Methyl-guanosine
  modified_base 96: mod_base = OTHER; note = 2'-O-Methyl-cytidine
  modified_base 97: mod_base = OTHER; note = 2'-O-Methyl-uridine
  modified_base 98: mod_base = OTHER; note = 2'-O-Methyl-uridine phosphorothioate
  modified_base 99: mod_base = OTHER; note = 2'-O-Methyl-uridine phosphorothioate
  modified_base 100: mod_base = OTHER; note = 2'-O-Methyl-uridine

SEQ ID NO: 2096 - RNA, 100 nt, synthetic construct; identical to SEQ ID NO: 1937
  source 1..100: mol_type = other RNA; note = Description of Artificial Sequence: Synthetic polynucleotide
  modified_base 1: mod_base = OTHER; note = 2'-O-Methyl-cytidine phosphorothioate
  modified_base 2: mod_base = OTHER; note = 2'-O-Methyl-adenosine phosphorothioate
  modified_base 3: mod_base = OTHER; note = 2'-O-Methyl-guanosine
  modified_base 9: mod_base = OTHER; note = Nebularine - ribonebularine
  modified_base 21: mod_base = OTHER; note = 2'-O-Methyl-guanosine
  modified_base 28: mod_base = OTHER; note = Nebularine - 2'-O-methylnebularine
  modified_base 29: mod_base = OTHER; note = 2'-O-Methyl-guanosine
  modified_base 30: mod_base = OTHER; note = 2'-O-Methyl-cytidine
  modified_base 31: mod_base = OTHER; note = 2'-O-Methyl-uridine
  modified_base 32: mod_base = OTHER; note = 2'-O-Methyl-adenosine
  modified_base 33: mod_base = OTHER; note = 2'-O-Methyl-guanosine
  modified_base 34: mod_base = OTHER; note = 2'-O-Methyl-adenosine
  modified_base 35: mod_base = OTHER; note = 2'-O-Methyl-adenosine
  modified_base 36: mod_base = OTHER; note = 2'-O-Methyl-adenosine
  modified_base 37: mod_base = OTHER; note = 2'-O-Methyl-uridine
  modified_base 38: mod_base = OTHER; note = 2'-O-Methyl-adenosine
  modified_base 39: mod_base = OTHER; note = 2'-O-Methyl-guanosine
  modified_base 40: mod_base = OTHER; note = 2'-O-Methyl-cytidine
  modified_base 41: mod_base = OTHER; note = 2'-O-Methyl-adenosine
  modified_base 42: mod_base = OTHER; note = 2'-O-Methyl-adenosine
  modified_base 46: mod_base = OTHER; note = 2'-O-Methyl-adenosine
  modified_base 48: mod_base = OTHER; note = 2'-O-Methyl-adenosine
  modified_base 50: mod_base = OTHER; note = 2'-O-Methyl-uridine
  modified_base 52: mod_base = OTHER; note = 2'-O-Methyl-adenosine
  modified_base 53: mod_base = OTHER; note = 2'-O-Methyl-guanosine
  modified_base 54: mod_base = OTHER; note = 2'-O-Methyl-guanosine
  modified_base 55: mod_base = OTHER; note = 2'-O-Methyl-cytidine
  modified_base 56: mod_base = OTHER; note = 2'-O-Methyl-uridine
  modified_base 57: mod_base = OTHER; note = 2'-O-Methyl-adenosine
  modified_base 60: mod_base = OTHER; note = 2'-O-Methyl-cytidine
  modified_base 61: mod_base = OTHER; note = 2'-O-Methyl-cytidine
  modified_base 66: mod_base = OTHER; note = 2'-O-Methyl-uridine
  modified_base 67: mod_base = OTHER; note = 2'-O-Methyl-cytidine
  modified_base 70: mod_base = OTHER; note = 2'-O-Methyl-cytidine
  modified_base 71: mod_base = OTHER; note = 2'-O-Methyl-uridine
  modified_base 72: mod_base = OTHER; note = 2'-O-Methyl-uridine
  modified_base 73: mod_base = OTHER; note = 2'-O-Methyl-guanosine
  modified_base 74: mod_base = OTHER; note = 2'-O-Methyl-adenosine
  modified_base 75: mod_base = OTHER; note = 2'-O-Methyl-adenosine
  modified_base 76: mod_base = OTHER; note = 2'-O-Methyl-adenosine
  modified_base 77: mod_base = OTHER; note = 2'-O-Methyl-adenosine
  modified_base 78: mod_base = OTHER; note = 2'-O-Methyl-adenosine
  modified_base 79: mod_base = OTHER; note = 2'-O-Methyl-guanosine
  modified_base 80: mod_base = OTHER; note = 2'-O-Methyl-uridine
  modified_base 81: mod_base = OTHER; note = 2'-O-Methyl-guanosine
  modified_base 83: mod_base = OTHER; note = 2'-O-Methyl-cytidine
  modified_base 84: mod_base = OTHER; note = 2'-O-Methyl-adenosine
  modified_base 85: mod_base = OTHER; note = 2'-O-Methyl-cytidine
  modified_base 86: mod_base = OTHER; note = 2'-O-Methyl-cytidine
  modified_base 87: mod_base = OTHER; note = 2'-O-Methyl-guanosine
  modified_base 88: mod_base = OTHER; note = 2'-O-Methyl-adenosine
  modified_base 89: mod_base = OTHER; note = 2'-O-Methyl-guanosine
  modified_base 90: mod_base = OTHER; note = 2'-O-Methyl-uridine
  modified_base 91: mod_base = OTHER; note = 2'-O-Methyl-cytidine
  modified_base 92: mod_base = OTHER; note = 2'-O-Methyl-guanosine
  modified_base 93: mod_base = OTHER; note = 2'-O-Methyl-guanosine
  modified_base 94: mod_base = OTHER; note = 2'-O-Methyl-uridine
  modified_base 95: mod_base = OTHER; note = 2'-O-Methyl-guanosine
  modified_base 96: mod_base = OTHER; note = 2'-O-Methyl-cytidine
  modified_base 97: mod_base = OTHER; note = 2'-O-Methyl-uridine
  modified_base 98: mod_base = OTHER; note = 2'-O-Methyl-uridine phosphorothioate
  modified_base 99: mod_base = OTHER; note = 2'-O-Methyl-uridine phosphorothioate
  modified_base 100: mod_base = OTHER; note = 2'-O-Methyl-uridine

SEQ ID NO: 2097 - RNA, 100 nt, synthetic construct; identical to SEQ ID NO: 1938
  source 1..100: mol_type = other RNA; note = Description of Artificial Sequence: Synthetic polynucleotide
  modified_base 1: mod_base = OTHER; note = 2'-O-Methyl-cytidine phosphorothioate
  modified_base 2: mod_base = OTHER; note = 2'-O-Methyl-adenosine phosphorothioate
  modified_base 3: mod_base = OTHER; note = 2'-O-Methyl-guanosine
  modified_base 9: mod_base = OTHER; note = Nebularine - ribonebularine
  modified_base 21: mod_base = OTHER; note = 2'-O-Methyl-guanosine
  modified_base 28: mod_base = OTHER; note = 2'-O-Methyl-adenosine
  modified_base 29: mod_base = OTHER; note = 2'-O-Methyl-guanosine
  modified_base 30: mod_base = OTHER; note = 2'-O-Methyl-cytidine
  modified_base 31: mod_base = OTHER; note = 2'-O-Methyl-uridine
  modified_base 32: mod_base = OTHER; note = 2'-O-Methyl-adenosine
  modified_base 33: mod_base = OTHER; note = 2'-O-Methyl-guanosine
  modified_base 34: mod_base = OTHER; note = 2'-O-Methyl-adenosine
  modified_base 35: mod_base = OTHER; note = 2'-O-Methyl-adenosine
  modified_base 36: mod_base = OTHER; note = 2'-O-Methyl-adenosine
  modified_base 37: mod_base = OTHER; note = 2'-O-Methyl-uridine
  modified_base 38: mod_base = OTHER; note = 2'-O-Methyl-adenosine
  modified_base 39: mod_base = OTHER; note = 2'-O-Methyl-guanosine
  modified_base 40: mod_base = OTHER; note = 2'-O-Methyl-cytidine
  modified_base 41: mod_base = OTHER; note = 2'-O-Methyl-adenosine
  modified_base 42: mod_base = OTHER; note = Nebularine - 2'-O-methylnebularine
  modified_base 46: mod_base = OTHER; note = 2'-O-Methyl-adenosine
  modified_base 48: mod_base = OTHER; note = 2'-O-Methyl-adenosine
  modified_base 50: mod_base = OTHER; note = 2'-O-Methyl-uridine
  modified_base 52: mod_base = OTHER; note = 2'-O-Methyl-adenosine
  modified_base 53: mod_base = OTHER; note = 2'-O-Methyl-guanosine
  modified_base 54: mod_base = OTHER; note = 2'-O-Methyl-guanosine
  modified_base 55: mod_base = OTHER; note = 2'-O-Methyl-cytidine
  modified_base 56: mod_base = OTHER; note = 2'-O-Methyl-uridine
  modified_base 57: mod_base = OTHER; note = 2'-O-Methyl-adenosine
  modified_base 60: mod_base = OTHER; note = 2'-O-Methyl-cytidine
  modified_base 61: mod_base = OTHER; note = 2'-O-Methyl-cytidine
  modified_base 66: mod_base = OTHER; note = 2'-O-Methyl-uridine
  modified_base 67: mod_base = OTHER; note = 2'-O-Methyl-cytidine
  modified_base 70: mod_base = OTHER; note = 2'-O-Methyl-cytidine
  modified_base 71: mod_base = OTHER; note = 2'-O-Methyl-uridine
  modified_base 72: mod_base = OTHER; note = 2'-O-Methyl-uridine
  modified_base 73: mod_base = OTHER; note = 2'-O-Methyl-guanosine
  modified_base 74: mod_base = OTHER; note = 2'-O-Methyl-adenosine
  modified_base 75: mod_base = OTHER; note = 2'-O-Methyl-adenosine
  modified_base 76: mod_base = OTHER; note = 2'-O-Methyl-adenosine
  modified_base 77: mod_base = OTHER; note = 2'-O-Methyl-adenosine
  modified_base 78: mod_base = OTHER; note = 2'-O-Methyl-adenosine
  modified_base 79: mod_base = OTHER; note = 2'-O-Methyl-guanosine
  modified_base 80: mod_base = OTHER; note = 2'-O-Methyl-uridine
  modified_base 81: mod_base = OTHER; note = 2'-O-Methyl-guanosine
  modified_base 83: mod_base = OTHER; note = 2'-O-Methyl-cytidine
  modified_base 84: mod_base = OTHER; note = 2'-O-Methyl-adenosine
  modified_base 85: mod_base = OTHER; note = 2'-O-Methyl-cytidine
  modified_base 86: mod_base = OTHER; note = 2'-O-Methyl-cytidine
  modified_base 87: mod_base = OTHER; note = 2'-O-Methyl-guanosine
  modified_base 88: mod_base = OTHER; note = 2'-O-Methyl-adenosine
  modified_base 89: mod_base = OTHER; note = 2'-O-Methyl-guanosine
  modified_base 90: mod_base = OTHER; note = 2'-O-Methyl-uridine
  modified_base 91: mod_base = OTHER; note = 2'-O-Methyl-cytidine
  modified_base 92: mod_base = OTHER; note = 2'-O-Methyl-guanosine
  modified_base 93: mod_base = OTHER; note = 2'-O-Methyl-guanosine
  modified_base 94: mod_base = OTHER; note = 2'-O-Methyl-uridine
  modified_base 95: mod_base = OTHER; note = 2'-O-Methyl-guanosine
  modified_base 96: mod_base = OTHER; note = 2'-O-Methyl-cytidine
  modified_base 97: mod_base = OTHER; note = 2'-O-Methyl-uridine
  modified_base 98: mod_base = OTHER; note = 2'-O-Methyl-uridine phosphorothioate
  modified_base 99: mod_base = OTHER; note = 2'-O-Methyl-uridine phosphorothioate
  modified_base 100: mod_base = OTHER; note = 2'-O-Methyl-uridine

SEQ ID NO: 2098 - RNA, 100 nt, synthetic construct; identical to SEQ ID NO: 1939
  source 1..100: mol_type = other RNA; note = Description of Artificial Sequence: Synthetic polynucleotide
  modified_base 1: mod_base = OTHER; note = 2'-O-Methyl-cytidine phosphorothioate
  modified_base 2: mod_base = OTHER; note = 2'-O-Methyl-adenosine phosphorothioate
  modified_base 3: mod_base = OTHER; note = 2'-O-Methyl-guanosine
  modified_base 9: mod_base = OTHER; note = Nebularine - ribonebularine
  modified_base 21: mod_base = OTHER; note = 2'-O-Methyl-guanosine
  modified_base 28: mod_base = OTHER; note = 2'-O-Methyl-adenosine
  modified_base 29: mod_base = OTHER; note = 2'-O-Methyl-guanosine
  modified_base 30: mod_base = OTHER; note = 2'-O-Methyl-cytidine
  modified_base 31: mod_base = OTHER; note = 2'-O-Methyl-uridine
  modified_base 32: mod_base = OTHER; note = 2'-O-Methyl-adenosine
  modified_base 33: mod_base = OTHER; note = 2'-O-Methyl-guanosine
  modified_base 34: mod_base = OTHER; note = Nebularine - 2'-O-methylnebularine
  modified_base 35: mod_base = OTHER; note = 2'-O-Methyl-adenosine
  modified_base 36: mod_base = OTHER; note = 2'-O-Methyl-adenosine
  modified_base 37: mod_base = OTHER; note = 2'-O-Methyl-uridine
  modified_base 38: mod_base = OTHER; note = 2'-O-Methyl-adenosine
  modified_base 39: mod_base = OTHER; note = 2'-O-Methyl-guanosine
  modified_base 40: mod_base = OTHER; note = 2'-O-Methyl-cytidine
  modified_base 41: mod_base = OTHER; note = 2'-O-Methyl-adenosine
  modified_base 42: mod_base = OTHER; note = Nebularine - 2'-O-methylnebularine
  modified_base 46: mod_base = OTHER; note = 2'-O-Methyl-adenosine
  modified_base 48: mod_base = OTHER; note = 2'-O-Methyl-adenosine
  modified_base 50: mod_base = OTHER; note = 2'-O-Methyl-uridine
  modified_base 52: mod_base = OTHER; note = 2'-O-Methyl-adenosine
  modified_base 53: mod_base = OTHER; note = 2'-O-Methyl-guanosine
  modified_base 54: mod_base = OTHER; note = 2'-O-Methyl-guanosine
  modified_base 55: mod_base = OTHER; note = 2'-O-Methyl-cytidine
  modified_base 56: mod_base = OTHER; note = 2'-O-Methyl-uridine
  modified_base 57: mod_base = OTHER; note = 2'-O-Methyl-adenosine
  modified_base 60: mod_base = OTHER; note = 2'-O-Methyl-cytidine
  modified_base 61: mod_base = OTHER; note = 2'-O-Methyl-cytidine
  modified_base 66: mod_base = OTHER; note = 2'-O-Methyl-uridine
  modified_base 67: mod_base = OTHER; note = 2'-O-Methyl-cytidine
  modified_base 70: mod_base = OTHER; note = 2'-O-Methyl-cytidine
  modified_base 71: mod_base = OTHER; note = 2'-O-Methyl-uridine
  modified_base 72: mod_base = OTHER; note = 2'-O-Methyl-uridine
  modified_base 73: mod_base = OTHER; note = 2'-O-Methyl-guanosine
  modified_base 74: mod_base = OTHER; note = 2'-O-Methyl-adenosine
  modified_base 75: mod_base = OTHER; note = 2'-O-Methyl-adenosine
  modified_base 76: mod_base = OTHER; note = 2'-O-Methyl-adenosine
  modified_base 77: mod_base = OTHER; note = 2'-O-Methyl-adenosine
  modified_base 78: mod_base = OTHER; note = 2'-O-Methyl-adenosine
  modified_base 79: mod_base = OTHER; note = 2'-O-Methyl-guanosine
  modified_base 80: mod_base = OTHER; note = 2'-O-Methyl-uridine
  modified_base 81: mod_base = OTHER; note = 2'-O-Methyl-guanosine
  modified_base 83: mod_base = OTHER; note = 2'-O-Methyl-cytidine
  modified_base 84: mod_base = OTHER; note = 2'-O-Methyl-adenosine
  modified_base 85: mod_base = OTHER; note = 2'-O-Methyl-cytidine
  modified_base 86: mod_base = OTHER; note = 2'-O-Methyl-cytidine
  modified_base 87: mod_base = OTHER; note = 2'-O-Methyl-guanosine
  modified_base 88: mod_base = OTHER; note = 2'-O-Methyl-adenosine
  modified_base 89: mod_base = OTHER; note = 2'-O-Methyl-guanosine
  modified_base 90: mod_base = OTHER; note = 2'-O-Methyl-uridine
  modified_base 91: mod_base = OTHER; note = 2'-O-Methyl-cytidine
  modified_base 92: mod_base = OTHER; note = 2'-O-Methyl-guanosine
  modified_base 93: mod_base = OTHER; note = 2'-O-Methyl-guanosine
  modified_base 94: mod_base = OTHER; note = 2'-O-Methyl-uridine
  modified_base 95: mod_base = OTHER; note = 2'-O-Methyl-guanosine
  modified_base 96: mod_base = OTHER; note = 2'-O-Methyl-cytidine
  modified_base 97: mod_base = OTHER; note = 2'-O-Methyl-uridine
  modified_base 98: mod_base = OTHER; note = 2'-O-Methyl-uridine phosphorothioate
  modified_base 99: mod_base = OTHER; note = 2'-O-Methyl-uridine phosphorothioate
  modified_base 100: mod_base = OTHER; note = 2'-O-Methyl-uridine

SEQ ID NO: 2099 - RNA, 100 nt, synthetic construct; identical to SEQ ID NO: 1940
  source 1..100: mol_type = other RNA; note = Description of Artificial Sequence: Synthetic polynucleotide
  modified_base 1: mod_base = OTHER; note = 2'-O-Methyl-cytidine phosphorothioate
  modified_base 2: mod_base = OTHER; note = 2'-O-Methyl-adenosine phosphorothioate
  modified_base 3: mod_base = OTHER; note = 2'-O-Methyl-guanosine
  modified_base 9: mod_base = OTHER; note = Nebularine - ribonebularine
  modified_base 21: mod_base = OTHER; note = 2'-O-Methyl-guanosine
  modified_base 28: mod_base = OTHER; note = 2'-O-Methyl-adenosine
  modified_base 29: mod_base = OTHER; note = 2'-O-Methyl-guanosine
  modified_base 30: mod_base = OTHER; note = 2'-O-Methyl-cytidine
  modified_base 31: mod_base = OTHER; note = 2'-O-Methyl-uridine
  modified_base 32: mod_base = OTHER; note = 2'-O-Methyl-adenosine
  modified_base 33: mod_base = OTHER; note = 2'-O-Methyl-guanosine
  modified_base 34: mod_base = OTHER; note = Nebularine - 2'-O-methylnebularine
  modified_base 35: mod_base = OTHER; note = 2'-O-Methyl-adenosine
  modified_base 36: mod_base = OTHER; note = 2'-O-Methyl-adenosine
  modified_base 37: mod_base = OTHER; note = 2'-O-Methyl-uridine
  modified_base 38: mod_base = OTHER; note = 2'-O-Methyl-adenosine
  modified_base 39: mod_base = OTHER; note = 2'-O-Methyl-guanosine
  modified_base 40: mod_base = OTHER; note = 2'-O-Methyl-cytidine
  modified_base 41: mod_base = OTHER; note = 2'-O-Methyl-adenosine
  modified_base 42: mod_base = OTHER; note = 2'-O-Methyl-adenosine
  modified_base 46: mod_base = OTHER; note = 2'-O-Methyl-adenosine
  modified_base 48: mod_base = OTHER; note = 2'-O-Methyl-adenosine
  modified_base 50: mod_base = OTHER; note = 2'-O-Methyl-uridine
  modified_base 52: mod_base = OTHER; note = 2'-O-Methyl-adenosine
  modified_base 53: mod_base = OTHER; note = 2'-O-Methyl-guanosine
  modified_base 54: mod_base = OTHER; note = 2'-O-Methyl-guanosine
  modified_base 55: mod_base = OTHER; note = 2'-O-Methyl-cytidine
  modified_base 56: mod_base = OTHER; note = 2'-O-Methyl-uridine
  modified_base 57: mod_base = OTHER; note = 2'-O-Methyl-adenosine
  modified_base 60: mod_base = OTHER; note = 2'-O-Methyl-cytidine
  modified_base 61: mod_base = OTHER; note = 2'-O-Methyl-cytidine
  modified_base 66: mod_base = OTHER; note = 2'-O-Methyl-uridine
  modified_base 67: mod_base = OTHER; note = 2'-O-Methyl-cytidine
  modified_base 70: mod_base = OTHER; note = 2'-O-Methyl-cytidine
  modified_base 71: mod_base = OTHER; note = 2'-O-Methyl-uridine
  modified_base 72: mod_base = OTHER; note = 2'-O-Methyl-uridine
  modified_base 73: mod_base = OTHER; note = 2'-O-Methyl-guanosine
  modified_base 74: mod_base = OTHER; note = 2'-O-Methyl-adenosine
  modified_base 75: mod_base = OTHER; note = 2'-O-Methyl-adenosine
  modified_base 76: mod_base = OTHER; note = 2'-O-Methyl-adenosine
  modified_base 77: mod_base = OTHER; note = 2'-O-Methyl-adenosine
  modified_base 78: mod_base = OTHER; note = 2'-O-Methyl-adenosine
  modified_base 79: mod_base = OTHER; note = 2'-O-Methyl-guanosine
  modified_base 80: mod_base = OTHER; note = 2'-O-Methyl-uridine
  modified_base 81: mod_base = OTHER; note = 2'-O-Methyl-guanosine
  modified_base 83: mod_base = OTHER; note = 2'-O-Methyl-cytidine
  modified_base 84: mod_base = OTHER; note = 2'-O-Methyl-adenosine
  modified_base 85: mod_base = OTHER; note = 2'-O-Methyl-cytidine
  modified_base 86: mod_base = OTHER; note = 2'-O-Methyl-cytidine
  modified_base 87: mod_base = OTHER; note = 2'-O-Methyl-guanosine
  modified_base 88: mod_base = OTHER; note = 2'-O-Methyl-adenosine
  modified_base 89: mod_base = OTHER; note = 2'-O-Methyl-guanosine
  modified_base 90: mod_base = OTHER; note = 2'-O-Methyl-uridine
  modified_base 91: mod_base = OTHER; note = 2'-O-Methyl-cytidine
  modified_base 92: mod_base = OTHER; note = 2'-O-Methyl-guanosine
  modified_base 93: mod_base = OTHER; note = 2'-O-Methyl-guanosine
  modified_base 94: mod_base = OTHER; note = 2'-O-Methyl-uridine
  modified_base 95: mod_base = OTHER; note = 2'-O-Methyl-guanosine
  modified_base 96: mod_base = OTHER; note = 2'-O-Methyl-cytidine
  modified_base 97: mod_base = OTHER; note = 2'-O-Methyl-uridine
  modified_base 98: mod_base = OTHER; note = 2'-O-Methyl-uridine phosphorothioate
  modified_base 99: mod_base = OTHER; note = 2'-O-Methyl-uridine phosphorothioate
  modified_base 100: mod_base = OTHER; note = 2'-O-Methyl-uridine

SEQ ID NO: 2100 - DNA, 100 bp, synthetic construct; identical to SEQ ID NO: 1941
  source 1..100: mol_type = other DNA; note = Description of Artificial Sequence: Synthetic oligonucleotide; note = Description of Combined DNA/RNA Molecule: Synthetic oligonucleotide
  modified_base 1: mod_base = OTHER; note = 2'-O-Methyl-cytidine phosphorothioate
  modified_base 2: mod_base = OTHER; note = 2'-O-Methyl-adenosine phosphorothioate
  modified_base 3: mod_base = OTHER; note = 2'-O-Methyl-guanosine
  modified_base 9: mod_base = OTHER; note = Nebularine - 2'-deoxynebularine
  modified_base 14: mod_base = OTHER; note = Nebularine - 2'-deoxynebularine
  modified_base 21: mod_base = OTHER; note = 2'-O-Methyl-guanosine
  modified_base 28: mod_base = OTHER; note = 2'-O-Methyl-adenosine
  modified_base 29: mod_base = OTHER; note = 2'-O-Methyl-guanosine
  modified_base 30: mod_base = OTHER; note = 2'-O-Methyl-cytidine
  modified_base 31: mod_base = OTHER; note = 2'-O-Methyl-uridine
  modified_base 32: mod_base = OTHER; note = 2'-O-Methyl-adenosine
  modified_base 33: mod_base = OTHER; note = 2'-O-Methyl-guanosine
  modified_base 34: mod_base = OTHER; note = 2'-O-Methyl-adenosine
  modified_base 35: mod_base = OTHER; note = 2'-O-Methyl-adenosine
  modified_base 36: mod_base = OTHER; note = 2'-O-Methyl-adenosine
  modified_base 37: mod_base = OTHER; note = 2'-O-Methyl-uridine
  modified_base 38: mod_base = OTHER; note = 2'-O-Methyl-adenosine
  modified_base 39: mod_base = OTHER; note = 2'-O-Methyl-guanosine
  modified_base 40: mod_base = OTHER; note = 2'-O-Methyl-cytidine
  modified_base 41: mod_base = OTHER; note = 2'-O-Methyl-adenosine
  modified_base 42: mod_base = OTHER; note = 2'-O-Methyl-adenosine
  modified_base 46: mod_base = OTHER; note = 2'-O-Methyl-adenosine
  modified_base 48: mod_base = OTHER; note = 2'-O-Methyl-adenosine
  modified_base 50: mod_base = OTHER; note = 2'-O-Methyl-uridine
  modified_base 52: mod_base = OTHER; note = 2'-O-Methyl-adenosine
  modified_base 53: mod_base = OTHER; note = 2'-O-Methyl-guanosine
  modified_base 54: mod_base = OTHER; note = 2'-O-Methyl-guanosine
  modified_base 55: mod_base = OTHER; note = 2'-O-Methyl-cytidine
  modified_base 56: mod_base = OTHER; note = 2'-O-Methyl-uridine
  modified_base 57: mod_base = OTHER; note = 2'-O-Methyl-adenosine
  modified_base 60: mod_base = OTHER; note = 2'-O-Methyl-cytidine
  modified_base 61: mod_base = OTHER; note = 2'-O-Methyl-cytidine
  modified_base 66: mod_base = OTHER; note = 2'-O-Methyl-uridine
  modified_base 67: mod_base = OTHER; note = 2'-O-Methyl-cytidine
  modified_base 70: mod_base = OTHER; note = 2'-O-Methyl-cytidine
  modified_base 71: mod_base = OTHER; note = 2'-O-Methyl-uridine
  modified_base 72: mod_base = OTHER; note = 2'-O-Methyl-uridine
  modified_base 73: mod_base = OTHER; note = 2'-O-Methyl-guanosine
  modified_base 74: mod_base = OTHER; note = 2'-O-Methyl-adenosine
  modified_base 75: mod_base = OTHER; note = 2'-O-Methyl-adenosine
  modified_base 76: mod_base = OTHER; note = 2'-O-Methyl-adenosine
  modified_base 77: mod_base = OTHER; note = 2'-O-Methyl-adenosine
  modified_base 78: mod_base = OTHER; note = 2'-O-Methyl-adenosine
  modified_base 79: mod_base = OTHER; note = 2'-O-Methyl-guanosine
  modified_base 80: mod_base = OTHER; note = 2'-O-Methyl-uridine
  modified_base 81: mod_base = OTHER; note = 2'-O-Methyl-guanosine
  modified_base 83: mod_base = OTHER; note = 2'-O-Methyl-cytidine
  modified_base 84: mod_base = OTHER; note = 2'-O-Methyl-adenosine
  modified_base 85: mod_base = OTHER; note = 2'-O-Methyl-cytidine
  modified_base 86: mod_base = OTHER; note = 2'-O-Methyl-cytidine
  modified_base 87: mod_base = OTHER; note = 2'-O-Methyl-guanosine
  modified_base 88: mod_base = OTHER; note = 2'-O-Methyl-adenosine
  modified_base 89: mod_base = OTHER; note = 2'-O-Methyl-guanosine
  modified_base 90: mod_base = OTHER; note = 2'-O-Methyl-uridine
  modified_base 91: mod_base = OTHER; note = 2'-O-Methyl-cytidine
  modified_base 92: mod_base = OTHER; note = 2'-O-Methyl-guanosine
  modified_base 93: mod_base = OTHER; note = 2'-O-Methyl-guanosine
  modified_base 94: mod_base = OTHER; note = 2'-O-Methyl-uridine
  modified_base 95: mod_base = OTHER; note = 2'-O-Methyl-guanosine
  modified_base 96: mod_base = OTHER; note = 2'-O-Methyl-cytidine
  modified_base 97: mod_base = OTHER; note = 2'-O-Methyl-uridine
  modified_base 98: mod_base = OTHER; note = 2'-O-Methyl-uridine phosphorothioate
  modified_base 99: mod_base = OTHER; note = 2'-O-Methyl-uridine phosphorothioate
  modified_base 100: mod_base = OTHER; note = 2'-O-Methyl-uridine
  misc_feature 1..8: note = RNA
  misc_feature 9: note = DNA
  misc_feature 10..13: note = RNA
  misc_feature 14: note = DNA
  misc_feature 15..100: note = RNA

SEQ ID NO: 2101 - DNA, 100 bp, synthetic construct; identical to SEQ ID NO: 1942
  source 1..100: mol_type = other DNA; note = Description of Artificial Sequence: Synthetic oligonucleotide; note = Description of Combined DNA/RNA Molecule: Synthetic oligonucleotide
  modified_base 1: mod_base = OTHER; note = 2'-O-Methyl-cytidine phosphorothioate
  modified_base 2: mod_base = OTHER; note = 2'-O-Methyl-adenosine phosphorothioate
  modified_base 3: mod_base = OTHER; note = 2'-O-Methyl-guanosine
  modified_base 9: mod_base = OTHER; note = Nebularine - 2'-deoxynebularine
  modified_base 21: mod_base = OTHER; note = 2'-O-Methyl-guanosine
  modified_base 28: mod_base = OTHER; note = 2'-O-Methyl-adenosine
  modified_base 29: mod_base = OTHER; note = 2'-O-Methyl-guanosine
  modified_base 30: mod_base = OTHER; note = 2'-O-Methyl-cytidine
  modified_base 31: mod_base = OTHER; note = 2'-O-Methyl-uridine
  modified_base 32: mod_base = OTHER; note = 2'-O-Methyl-adenosine
  modified_base 33: mod_base = OTHER; note = 2'-O-Methyl-guanosine
  modified_base 34: mod_base = OTHER; note = 2'-O-Methyl-adenosine
  modified_base 35: mod_base = OTHER; note = 2'-O-Methyl-adenosine
  modified_base 36: mod_base = OTHER; note = 2'-O-Methyl-adenosine
  modified_base 37: mod_base = OTHER; note = 2'-O-Methyl-uridine
  modified_base 38: mod_base = OTHER; note = 2'-O-Methyl-adenosine
  modified_base 39: mod_base = OTHER; note = 2'-O-Methyl-guanosine
  modified_base 40: mod_base = OTHER; note = 2'-O-Methyl-cytidine
  modified_base 41: mod_base = OTHER; note = 2'-O-Methyl-adenosine
  modified_base 42: mod_base = OTHER; note = 2'-O-Methyl-adenosine
  modified_base 46: mod_base = OTHER; note = 2'-O-Methyl-adenosine
  modified_base 48: mod_base = OTHER; note = 2'-O-Methyl-adenosine
  modified_base 50: mod_base = OTHER; note = 2'-O-Methyl-uridine
  modified_base 52: mod_base = OTHER; note = 2'-O-Methyl-adenosine
  modified_base 53: mod_base = OTHER; note = 2'-O-Methyl-guanosine
  modified_base 54: mod_base = OTHER; note = 2'-O-Methyl-guanosine
  modified_base 55: mod_base = OTHER; note = 2'-O-Methyl-cytidine
  modified_base 56: mod_base = OTHER; note = 2'-O-Methyl-uridine
  modified_base 57: mod_base = OTHER; note = 2'-O-Methyl-adenosine
  modified_base 60: mod_base = OTHER; note = 2'-O-Methyl-cytidine
  modified_base 61: mod_base = OTHER; note = 2'-O-Methyl-cytidine
  modified_base 66: mod_base = OTHER; note = 2'-O-Methyl-uridine
  modified_base 67: mod_base = OTHER; note = 2'-O-Methyl-cytidine
  modified_base 70: mod_base = OTHER; note = 2'-O-Methyl-cytidine
  modified_base 71: mod_base = OTHER; note = 2'-O-Methyl-uridine
  modified_base 72: mod_base = OTHER; note = 2'-O-Methyl-uridine
  modified_base 73: mod_base = OTHER; note = 2'-O-Methyl-guanosine
  modified_base 74: mod_base = OTHER; note = 2'-O-Methyl-adenosine
  modified_base 75: mod_base = OTHER; note = 2'-O-Methyl-adenosine
  modified_base 76: mod_base = OTHER; note = 2'-O-Methyl-adenosine
  modified_base 77: mod_base = OTHER; note = 2'-O-Methyl-adenosine
  modified_base 78: mod_base = OTHER; note = 2'-O-Methyl-adenosine
  modified_base 79: mod_base = OTHER; note = 2'-O-Methyl-guanosine
  modified_base 80: mod_base = OTHER; note = 2'-O-Methyl-uridine
  modified_base 81: mod_base = OTHER; note = 2'-O-Methyl-guanosine
  modified_base 83: mod_base = OTHER; note = 2'-O-Methyl-cytidine
  modified_base 84: mod_base = OTHER; note = 2'-O-Methyl-adenosine
  modified_base 85: mod_base = OTHER; note = 2'-O-Methyl-cytidine
  modified_base 86: mod_base = OTHER; note = 2'-O-Methyl-cytidine
  modified_base 87: mod_base = OTHER; note = 2'-O-Methyl-guanosine
  modified_base 88: mod_base = OTHER; note = 2'-O-Methyl-adenosine
  modified_base 89: mod_base = OTHER; note = 2'-O-Methyl-guanosine
  modified_base 90: mod_base = OTHER; note = 2'-O-Methyl-uridine
  modified_base 91: mod_base = OTHER; note = 2'-O-Methyl-cytidine
  modified_base 92: mod_base = OTHER; note = 2'-O-Methyl-guanosine
  modified_base 93: mod_base = OTHER; note = 2'-O-Methyl-guanosine
  modified_base 94: mod_base = OTHER; note = 2'-O-Methyl-uridine
  modified_base 95: mod_base = OTHER; note = 2'-O-Methyl-guanosine
  modified_base 96: mod_base = OTHER; note = 2'-O-Methyl-cytidine
  modified_base 97: mod_base = OTHER; note = 2'-O-Methyl-uridine
  modified_base 98: mod_base = OTHER; note = 2'-O-Methyl-uridine phosphorothioate
  modified_base 99: mod_base = OTHER; note = 2'-O-Methyl-uridine phosphorothioate
  modified_base 100: mod_base = OTHER; note = 2'-O-Methyl-uridine
  misc_feature 1..8: note = RNA
  misc_feature 9: note = DNA
  misc_feature 10..100: note = RNA

SEQ ID NO: 2102 - DNA, 100 bp, synthetic construct; identical to SEQ ID NO: 1943
  source 1..100: mol_type = other DNA; note = Description of Artificial Sequence: Synthetic oligonucleotide; note = Description of Combined DNA/RNA Molecule: Synthetic oligonucleotide
  modified_base 1: mod_base = OTHER; note = 2'-O-Methyl-cytidine phosphorothioate
  modified_base 2: mod_base = OTHER; note = 2'-O-Methyl-adenosine phosphorothioate
  modified_base 3: mod_base = OTHER; note = 2'-O-Methyl-guanosine
  modified_base 14: mod_base = OTHER; note = Nebularine - 2'-deoxynebularine
  modified_base 21: mod_base = OTHER; note = 2'-O-Methyl-guanosine
  modified_base 28: mod_base = OTHER; note = 2'-O-Methyl-adenosine
  modified_base 29: mod_base = OTHER; note = 2'-O-Methyl-guanosine
  modified_base 30: mod_base = OTHER; note = 2'-O-Methyl-cytidine
  modified_base 31: mod_base = OTHER; note = 2'-O-Methyl-uridine
  modified_base 32: mod_base = OTHER; note = 2'-O-Methyl-adenosine
  modified_base 33: mod_base = OTHER; note = 2'-O-Methyl-guanosine
  modified_base 34: mod_base = OTHER; note = 2'-O-Methyl-adenosine
  modified_base 35: mod_base = OTHER; note = 2'-O-Methyl-adenosine
  modified_base 36: mod_base = OTHER; note = 2'-O-Methyl-adenosine
  modified_base 37: mod_base = OTHER; note = 2'-O-Methyl-uridine
  modified_base 38: mod_base = OTHER; note = 2'-O-Methyl-adenosine
  modified_base 39: mod_base = OTHER; note = 2'-O-Methyl-guanosine
  modified_base 40: mod_base = OTHER; note = 2'-O-Methyl-cytidine
  modified_base 41: mod_base = OTHER; note = 2'-O-Methyl-adenosine
  modified_base 42: mod_base = OTHER; note = 2'-O-Methyl-adenosine
  modified_base 46: mod_base = OTHER; note = 2'-O-Methyl-adenosine
  modified_base 48: mod_base = OTHER; note = 2'-O-Methyl-adenosine
  modified_base 50: mod_base = OTHER; note = 2'-O-Methyl-uridine
  modified_base 52: mod_base = OTHER; note = 2'-O-Methyl-adenosine
  modified_base 53: mod_base = OTHER; note = 2'-O-Methyl-guanosine
  modified_base 54: mod_base = OTHER; note = 2'-O-Methyl-guanosine
  modified_base 55: mod_base = OTHER; note = 2'-O-Methyl-cytidine
  modified_base 56: mod_base = OTHER; note = 2'-O-Methyl-uridine
  modified_base 57: mod_base = OTHER; note = 2'-O-Methyl-adenosine
  modified_base 60: mod_base = OTHER; note = 2'-O-Methyl-cytidine
  modified_base 61: mod_base = OTHER; note = 2'-O-Methyl-cytidine
  modified_base 66: mod_base = OTHER; note = 2'-O-Methyl-uridine
  modified_base 67: mod_base = OTHER; note = 2'-O-Methyl-cytidine
  modified_base 70: mod_base = OTHER; note = 2'-O-Methyl-cytidine
  modified_base 71: mod_base = OTHER; note = 2'-O-Methyl-uridine
  modified_base 72: mod_base = OTHER; note = 2'-O-Methyl-uridine
  modified_base 73: mod_base = OTHER; note = 2'-O-Methyl-guanosine
  modified_base 74: mod_base = OTHER; note = 2'-O-Methyl-adenosine
  modified_base 75: mod_base = OTHER; note = 2'-O-Methyl-adenosine
  modified_base 76: mod_base = OTHER; note = 2'-O-Methyl-adenosine
  modified_base 77: mod_base = OTHER; note = 2'-O-Methyl-adenosine
  modified_base 78: mod_base = OTHER; note = 2'-O-Methyl-adenosine
  modified_base 79: mod_base = OTHER; note = 2'-O-Methyl-guanosine
  modified_base 80: mod_base = OTHER; note = 2'-O-Methyl-uridine
  modified_base 81: mod_base = OTHER; note = 2'-O-Methyl-guanosine
  modified_base 83: mod_base = OTHER; note = 2'-O-Methyl-cytidine
  modified_base 84: mod_base = OTHER; note = 2'-O-Methyl-adenosine
  modified_base 85: mod_base = OTHER; note = 2'-O-Methyl-cytidine
  modified_base 86: mod_base = OTHER; note = 2'-O-Methyl-cytidine
  modified_base 87: mod_base = OTHER; note = 2'-O-Methyl-guanosine
  modified_base 88: mod_base = OTHER; note = 2'-O-Methyl-adenosine
  modified_base 89: mod_base = OTHER; note = 2'-O-Methyl-guanosine
  modified_base 90: mod_base = OTHER; note = 2'-O-Methyl-uridine
  modified_base 91: mod_base = OTHER; note = 2'-O-Methyl-cytidine
  modified_base 92: mod_base = OTHER; note = 2'-O-Methyl-guanosine
  modified_base 93: mod_base = OTHER; note = 2'-O-Methyl-guanosine
  modified_base 94: mod_base = OTHER; note = 2'-O-Methyl-uridine
  modified_base 95: mod_base = OTHER; note = 2'-O-Methyl-guanosine
  modified_base 96: mod_base = OTHER; note = 2'-O-Methyl-cytidine
  modified_base 97: mod_base = OTHER; note = 2'-O-Methyl-uridine
  modified_base 98: mod_base = OTHER; note = 2'-O-Methyl-uridine phosphorothioate
  modified_base 99: mod_base = OTHER; note = 2'-O-Methyl-uridine phosphorothioate
  modified_base 100: mod_base = OTHER; note = 2'-O-Methyl-uridine
  misc_feature 1..13: note = RNA
  misc_feature 14: note = DNA
  misc_feature 15..100: note = RNA

SEQ ID NO: 2103 - DNA, 100 bp, synthetic construct; identical to SEQ ID NO: 1944
  source 1..100: mol_type = other DNA; note = Description of Artificial Sequence: Synthetic oligonucleotide; note = Description of Combined DNA/RNA Molecule: Synthetic oligonucleotide
  modified_base 1: mod_base = OTHER; note = 2'-O-Methyl-cytidine phosphorothioate
  modified_base 2: mod_base = OTHER; note = 2'-O-Methyl-adenosine phosphorothioate
  modified_base 3: mod_base = OTHER; note = 2'-O-Methyl-guanosine
  modified_base 21: mod_base = OTHER; note = 2'-O-Methyl-guanosine
  modified_base 28: mod_base = OTHER; note = 2'-O-Methyl-adenosine
  modified_base 29: mod_base = OTHER; note = 2'-O-Methyl-guanosine
  modified_base 30: mod_base = OTHER; note = 2'-O-Methyl-cytidine
  modified_base 31: mod_base = OTHER; note = 2'-O-Methyl-uridine
  modified_base 32: mod_base = OTHER; note = 2'-O-Methyl-adenosine
  modified_base 33: mod_base = OTHER; note = 2'-O-Methyl-guanosine
  modified_base 34: mod_base = OTHER; note = Nebularine - 2'-deoxynebularine
  modified_base 35: mod_base = OTHER; note = 2'-O-Methyl-adenosine
  modified_base 36: mod_base = OTHER; note = 2'-O-Methyl-adenosine
  modified_base 37: mod_base = OTHER; note = 2'-O-Methyl-uridine
  modified_base 38: mod_base = OTHER; note = 2'-O-Methyl-adenosine
  modified_base 39: mod_base = OTHER; note = 2'-O-Methyl-guanosine
  modified_base 40: mod_base = OTHER; note = 2'-O-Methyl-cytidine
  modified_base 41: mod_base = OTHER; note = 2'-O-Methyl-adenosine
  modified_base 42: mod_base = OTHER; note = 2'-O-Methyl-adenosine
  modified_base 46: mod_base = OTHER; note = 2'-O-Methyl-adenosine
  modified_base 48: mod_base = OTHER; note = 2'-O-Methyl-adenosine
  modified_base 50: mod_base = OTHER; note = 2'-O-Methyl-uridine
  modified_base 52: mod_base = OTHER; note = 2'-O-Methyl-adenosine
  modified_base 53: mod_base = OTHER; note = 2'-O-Methyl-guanosine
  modified_base 54: mod_base = OTHER; note = 2'-O-Methyl-guanosine
  modified_base 55: mod_base = OTHER; note = 2'-O-Methyl-cytidine
  modified_base 56: mod_base = OTHER; note = 2'-O-Methyl-uridine
  modified_base 57: mod_base = OTHER; note = 2'-O-Methyl-adenosine
  modified_base 60: mod_base = OTHER; note = 2'-O-Methyl-cytidine
  modified_base 61: mod_base = OTHER; note = 2'-O-Methyl-cytidine
  modified_base 66: mod_base = OTHER; note = 2'-O-Methyl-uridine
  modified_base 67: mod_base = OTHER; note = 2'-O-Methyl-cytidine
  modified_base 70: mod_base = OTHER; note = 2'-O-Methyl-cytidine
  modified_base 71: mod_base = OTHER; note = 2'-O-Methyl-uridine
  modified_base 72: mod_base = OTHER; note = 2'-O-Methyl-uridine
  modified_base 73: mod_base = OTHER; note = 2'-O-Methyl-guanosine
  modified_base 74: mod_base = OTHER; note = 2'-O-Methyl-adenosine
  modified_base 75: mod_base = OTHER; note = 2'-O-Methyl-adenosine
  modified_base 76: mod_base = OTHER; note = 2'-O-Methyl-adenosine
  modified_base 77: mod_base = OTHER; note = 2'-O-Methyl-adenosine
  modified_base 78: mod_base = OTHER; note = 2'-O-Methyl-adenosine
  modified_base 79: mod_base = OTHER; note = 2'-O-Methyl-guanosine
  modified_base 80: mod_base = OTHER; note = 2'-O-Methyl-uridine
  modified_base 81: mod_base = OTHER; note = 2'-O-Methyl-guanosine
  modified_base 83: mod_base = OTHER; note = 2'-O-Methyl-cytidine
  modified_base 84: mod_base = OTHER; note = 2'-O-Methyl-adenosine
  modified_base 85: mod_base = OTHER; note = 2'-O-Methyl-cytidine
  modified_base 86: mod_base = OTHER; note = 2'-O-Methyl-cytidine
  modified_base 87: mod_base = OTHER; note = 2'-O-Methyl-guanosine
  modified_base 88: mod_base = OTHER; note = 2'-O-Methyl-adenosine
  modified_base 89: mod_base = OTHER; note = 2'-O-Methyl-guanosine
  modified_base 90: mod_base = OTHER; note = 2'-O-Methyl-uridine
  modified_base 91: mod_base = OTHER; note = 2'-O-Methyl-cytidine
  modified_base 92: mod_base = OTHER; note = 2'-O-Methyl-guanosine
  modified_base 93: mod_base = OTHER; note = 2'-O-Methyl-guanosine
  modified_base 94: mod_base = OTHER; note = 2'-O-Methyl-uridine
  modified_base 95: mod_base = OTHER; note = 2'-O-Methyl-guanosine
  modified_base 96: mod_base = OTHER; note = 2'-O-Methyl-cytidine
  modified_base 97: mod_base = OTHER; note = 2'-O-Methyl-uridine
  modified_base 98: mod_base = OTHER; note = 2'-O-Methyl-uridine phosphorothioate
  modified_base 99: mod_base = OTHER; note = 2'-O-Methyl-uridine phosphorothioate
  modified_base 100: mod_base = OTHER; note = 2'-O-Methyl-uridine
  misc_feature 1..33: note = RNA
  misc_feature 34: note = DNA
  misc_feature 35..100: note = RNA

SEQ ID NO: 2104 - DNA, 100 bp, synthetic construct; identical to SEQ ID NO: 1945
  source 1..100: mol_type = other DNA; note = Description of Artificial Sequence: Synthetic oligonucleotide; note = Description of Combined DNA/RNA Molecule: Synthetic oligonucleotide
  modified_base 1: mod_base = OTHER; note = 2'-O-Methyl-cytidine phosphorothioate
  modified_base 2: mod_base = OTHER; note = 2'-O-Methyl-adenosine phosphorothioate
  modified_base 3: mod_base = OTHER; note = 2'-O-Methyl-guanosine
  modified_base 21: mod_base = OTHER; note = 2'-O-Methyl-guanosine
  modified_base 28: mod_base = OTHER; note = 2'-O-Methyl-adenosine
  modified_base 29: mod_base = OTHER; note = 2'-O-Methyl-guanosine
  modified_base 30: mod_base = OTHER; note = 2'-O-Methyl-cytidine
  modified_base 31: mod_base = OTHER; note = 2'-O-Methyl-uridine
  modified_base 32: mod_base = OTHER; note = 2'-O-Methyl-adenosine
  modified_base 33: mod_base = OTHER; note = 2'-O-Methyl-guanosine
  modified_base 34: mod_base = OTHER; note = Nebularine - 2'-deoxynebularine
  modified_base 35: mod_base = OTHER; note = 2'-O-Methyl-adenosine
  modified_base 36: mod_base = OTHER; note = 2'-O-Methyl-adenosine
  modified_base 37: mod_base = OTHER; note = 2'-O-Methyl-uridine
  modified_base 38: mod_base = OTHER; note = 2'-O-Methyl-adenosine
  modified_base 39: mod_base = OTHER; note = 2'-O-Methyl-guanosine
  modified_base 40: mod_base = OTHER; note = 2'-O-Methyl-cytidine
  modified_base 41: mod_base = OTHER; note = 2'-O-Methyl-adenosine
  modified_base 42: mod_base = OTHER; note = 2'-O-Methyl-adenosine
  modified_base 46: mod_base = OTHER; note = 2'-O-Methyl-adenosine
  modified_base 48: mod_base = OTHER; note = 2'-O-Methyl-adenosine
  modified_base 50: mod_base = OTHER; note = 2'-O-Methyl-uridine
  modified_base 52: mod_base = OTHER; note = 2'-O-Methyl-adenosine
  modified_base 53: mod_base = OTHER; note = 2'-O-Methyl-guanosine
  modified_base 54: mod_base = OTHER; note = 2'-O-Methyl-guanosine
  modified_base 55: mod_base = OTHER; note = 2'-O-Methyl-cytidine
  modified_base 56: mod_base = OTHER; note = 2'-O-Methyl-uridine
  modified_base 57: mod_base = OTHER; note = Nebularine - 2'-deoxynebularine
  modified_base 60: mod_base = OTHER; note = 2'-O-Methyl-cytidine
  modified_base 61: mod_base = OTHER; note = 2'-O-Methyl-cytidine
  modified_base 66: mod_base = OTHER; note = 2'-O-Methyl-uridine
  modified_base 67: mod_base = OTHER; note = 2'-O-Methyl-cytidine
  modified_base 70: mod_base = OTHER; note = 2'-O-Methyl-cytidine
  modified_base 71: mod_base = OTHER; note = 2'-O-Methyl-uridine
  modified_base 72: mod_base = OTHER; note = 2'-O-Methyl-uridine
  modified_base 73: mod_base = OTHER; note = 2'-O-Methyl-guanosine
  modified_base 74: mod_base = OTHER; note = 2'-O-Methyl-adenosine
  modified_base 75: mod_base = OTHER; note = 2'-O-Methyl-adenosine
  modified_base 76: mod_base = OTHER; note = 2'-O-Methyl-adenosine
  modified_base 77: mod_base = OTHER; note = 2'-O-Methyl-adenosine
  modified_base 78: mod_base = OTHER; note = 2'-O-Methyl-adenosine
  modified_base 79: mod_base = OTHER; note = 2'-O-Methyl-guanosine
  modified_base 80: mod_base = OTHER; note = 2'-O-Methyl-uridine
  modified_base 81: mod_base = OTHER; note = 2'-O-Methyl-guanosine
  modified_base 83: mod_base = OTHER; note = 2'-O-Methyl-cytidine
  modified_base 84: mod_base = OTHER; note = 2'-O-Methyl-adenosine
  modified_base 85: mod_base = OTHER; note = 2'-O-Methyl-cytidine
  modified_base 86: mod_base = OTHER; note = 2'-O-Methyl-cytidine
  modified_base 87: mod_base = OTHER; note = 2'-O-Methyl-guanosine
  modified_base 88: mod_base = OTHER; note = 2'-O-Methyl-adenosine
  modified_base 89: mod_base = OTHER; note = 2'-O-Methyl-guanosine
  modified_base 90: mod_base = OTHER; note = 2'-O-Methyl-uridine
  modified_base 91: mod_base = OTHER; note = 2'-O-Methyl-cytidine
  modified_base 92: mod_base = OTHER; note = 2'-O-Methyl-guanosine
  modified_base 93: mod_base = OTHER; note = 2'-O-Methyl-guanosine
  modified_base 94: mod_base = OTHER; note = 2'-O-Methyl-uridine
  modified_base 95: mod_base = OTHER; note = 2'-O-Methyl-guanosine
  modified_base 96: mod_base = OTHER; note = 2'-O-Methyl-cytidine
  modified_base 97: mod_base = OTHER; note = 2'-O-Methyl-uridine
  modified_base 98: mod_base = OTHER; note = 2'-O-Methyl-uridine phosphorothioate
  modified_base 99: mod_base = OTHER; note = 2'-O-Methyl-uridine phosphorothioate
  modified_base 100: mod_base = OTHER; note = 2'-O-Methyl-uridine
  misc_feature 1..33: note = RNA
  misc_feature 34: note = DNA
  misc_feature 35..56: note = RNA
  misc_feature 57: note = DNA
  misc_feature 58..100: note = RNA

SEQ ID NO: 2105 - DNA, 100 bp, synthetic construct; identical to SEQ ID NO: 1946
  source 1..100: mol_type = other DNA; note = Description of Artificial Sequence: Synthetic oligonucleotide; note = Description of Combined DNA/RNA Molecule: Synthetic oligonucleotide
  modified_base 1: mod_base = OTHER; note = 2'-O-Methyl-cytidine phosphorothioate
  modified_base 2: mod_base = OTHER; note = 2'-O-Methyl-adenosine phosphorothioate
  modified_base 3: mod_base = OTHER; note = 2'-O-Methyl-guanosine
  modified_base 21: mod_base = OTHER; note = 2'-O-Methyl-guanosine
  modified_base 28: mod_base = OTHER; note = 2'-O-Methyl-adenosine
  modified_base 29: mod_base = OTHER; note = 2'-O-Methyl-guanosine
  modified_base 30: mod_base = OTHER; note = 2'-O-Methyl-cytidine
  modified_base 31: mod_base = OTHER; note = 2'-O-Methyl-uridine
  modified_base 32: mod_base = OTHER; note = 2'-O-Methyl-adenosine
  modified_base 33: mod_base = OTHER; note = 2'-O-Methyl-guanosine
  modified_base 34: mod_base = OTHER; note = 2'-O-Methyl-adenosine
  modified_base 35: mod_base = OTHER; note = 2'-O-Methyl-adenosine
  modified_base 36: mod_base = OTHER; note = 2'-O-Methyl-adenosine
  modified_base 37: mod_base = OTHER; note = 2'-O-Methyl-uridine
  modified_base 38: mod_base = OTHER; note = 2'-O-Methyl-adenosine
  modified_base 39: mod_base = OTHER; note = 2'-O-Methyl-guanosine
  modified_base 40: mod_base = OTHER; note = 2'-O-Methyl-cytidine
  modified_base 41: mod_base = OTHER; note = 2'-O-Methyl-adenosine
  modified_base 42: mod_base = OTHER; note = 2'-O-Methyl-adenosine
  modified_base 46: mod_base = OTHER; note = 2'-O-Methyl-adenosine
  modified_base 48: mod_base = OTHER; note = 2'-O-Methyl-adenosine
  modified_base 50: mod_base = OTHER; note = 2'-O-Methyl-uridine
  modified_base 52: mod_base = OTHER; note = 2'-O-Methyl-adenosine
  modified_base 53: mod_base = OTHER; note = 2'-O-Methyl-guanosine
  modified_base 54: mod_base = OTHER; note = 2'-O-Methyl-guanosine
  modified_base 55: mod_base = OTHER; note = 2'-O-Methyl-cytidine
  modified_base 56: mod_base = OTHER; note = 2'-O-Methyl-uridine
  modified_base 57: mod_base = OTHER; note = Nebularine - 2'-deoxynebularine
  modified_base 60: mod_base = OTHER; note = 2'-O-Methyl-cytidine
  modified_base 61: mod_base = OTHER; note = 2'-O-Methyl-cytidine
  modified_base 66: mod_base = OTHER; note = 2'-O-Methyl-uridine
  modified_base 67: mod_base = OTHER; note = 2'-O-Methyl-cytidine
  modified_base 70: mod_base = OTHER; note = 2'-O-Methyl-cytidine
  modified_base 71: mod_base = OTHER; note = 2'-O-Methyl-uridine
  modified_base 72: mod_base = OTHER; note = 2'-O-Methyl-uridine
  modified_base 73: mod_base = OTHER; note = 2'-O-Methyl-guanosine
  modified_base 74: mod_base = OTHER; note = 2'-O-Methyl-adenosine
  modified_base 75: mod_base = OTHER; note = 2'-O-Methyl-adenosine
  modified_base 76: mod_base = OTHER; note = 2'-O-Methyl-adenosine
  modified_base 77: mod_base = OTHER; note = 2'-O-Methyl-adenosine
  modified_base 78: mod_base = OTHER; note = 2'-O-Methyl-adenosine
  modified_base 79: mod_base = OTHER; note = 2'-O-Methyl-guanosine
  modified_base 80: mod_base = OTHER; note = 2'-O-Methyl-uridine
  modified_base 81: mod_base = OTHER; note = 2'-O-Methyl-guanosine
  modified_base 83: mod_base = OTHER; note = 2'-O-Methyl-cytidine
  modified_base 84: mod_base = OTHER; note = 2'-O-Methyl-adenosine
  modified_base 85: mod_base = OTHER; note = 2'-O-Methyl-cytidine
  modified_base 86: mod_base = OTHER; note = 2'-O-Methyl-cytidine
  modified_base 87: mod_base = OTHER; note = 2'-O-Methyl-guanosine
  modified_base 88: mod_base = OTHER; note = 2'-O-Methyl-adenosine
  modified_base 89: mod_base = OTHER; note = 2'-O-Methyl-guanosine
  modified_base 90: mod_base = OTHER; note = 2'-O-Methyl-uridine
  modified_base 91: mod_base = OTHER; note = 2'-O-Methyl-cytidine
  modified_base 92: mod_base = OTHER; note = 2'-O-Methyl-guanosine
  modified_base 93: mod_base = OTHER; note = 2'-O-Methyl-guanosine
  modified_base 94: mod_base = OTHER; note = 2'-O-Methyl-uridine
  modified_base 95: mod_base = OTHER; note = 2'-O-Methyl-guanosine
  modified_base 96: mod_base = OTHER; note = 2'-O-Methyl-cytidine
  modified_base 97: mod_base = OTHER; note = 2'-O-Methyl-uridine
  modified_base 98: mod_base = OTHER; note = 2'-O-Methyl-uridine phosphorothioate
  modified_base 99: mod_base = OTHER; note = 2'-O-Methyl-uridine phosphorothioate
  modified_base 100: mod_base = OTHER; note = 2'-O-Methyl-uridine
  misc_feature 1..56: note = RNA
  misc_feature 57: note = DNA
  misc_feature 58..100: note = RNA

SEQ ID NO: 2106 - DNA, 100 bp, synthetic construct; identical to SEQ ID NO: 1947
  source 1..100: mol_type = other DNA; note = Description of Artificial Sequence: Synthetic oligonucleotide; note = Description of Combined DNA/RNA Molecule: Synthetic oligonucleotide
  modified_base 1: mod_base = OTHER; note = 2'-O-Methyl-cytidine phosphorothioate
  modified_base 2: mod_base = OTHER; note = 2'-O-Methyl-adenosine phosphorothioate
  modified_base 3: mod_base = OTHER; note = 2'-O-Methyl-guanosine
  modified_base 21: mod_base = OTHER; note = 2'-O-Methyl-guanosine
  modified_base 28: mod_base = OTHER; note = 2'-O-Methyl-adenosine
  modified_base 29: mod_base = OTHER; note = 2'-O-Methyl-guanosine
  modified_base 30: mod_base = OTHER; note = 2'-O-Methyl-cytidine
  modified_base 31: mod_base = OTHER; note = 2'-O-Methyl-uridine
  modified_base 32: mod_base = OTHER; note = 2'-O-Methyl-adenosine
  modified_base 33: mod_base = OTHER; note = 2'-O-Methyl-guanosine
  modified_base 34: mod_base = OTHER; note = 2'-O-Methyl-adenosine
  modified_base 35: mod_base = OTHER; note = 2'-O-Methyl-adenosine
  modified_base 36: mod_base = OTHER; note = 2'-O-Methyl-adenosine
  modified_base 37: mod_base = OTHER; note = 2'-O-Methyl-uridine
  modified_base 38: mod_base = OTHER; note = 2'-O-Methyl-adenosine
  modified_base 39: mod_base = OTHER; note = 2'-O-Methyl-guanosine
  modified_base 40: mod_base = OTHER; note = 2'-O-Methyl-cytidine
  modified_base 41: mod_base = OTHER; note = 2'-O-Methyl-adenosine
  modified_base 42: mod_base = OTHER; note = 2'-O-Methyl-adenosine
  modified_base 46: mod_base = OTHER; note = 2'-O-Methyl-adenosine
  modified_base 48: mod_base = OTHER; note = 2'-O-Methyl-adenosine
  modified_base 50: mod_base = OTHER; note = 2'-O-Methyl-uridine
  modified_base 52: mod_base = OTHER; note = 2'-O-Methyl-adenosine
  modified_base 53: mod_base = OTHER; note = 2'-O-Methyl-guanosine
  modified_base 54: mod_base = OTHER; note = 2'-O-Methyl-guanosine
  modified_base 55: mod_base = OTHER; note = 2'-O-Methyl-cytidine
  modified_base 56: mod_base = OTHER; note = 2'-O-Methyl-uridine
  modified_base 57: mod_base = OTHER; note = 2'-O-Methyl-adenosine
  modified_base 60: mod_base = OTHER; note = 2'-O-Methyl-cytidine
  modified_base 61: mod_base = OTHER; note = 2'-O-Methyl-cytidine
  modified_base 65: mod_base = OTHER; note = Nebularine - 2'-deoxynebularine
  modified_base 66: mod_base = OTHER; note = 2'-O-Methyl-uridine
  modified_base 67: mod_base = OTHER; note = 2'-O-Methyl-cytidine
  modified_base 70: mod_base = OTHER; note = 2'-O-Methyl-cytidine
  modified_base 71: mod_base = OTHER; note = 2'-O-Methyl-uridine
  modified_base 72: mod_base = OTHER; note = 2'-O-Methyl-uridine
  modified_base 73: mod_base = OTHER; note = 2'-O-Methyl-guanosine
  modified_base 74: mod_base = OTHER; note = 2'-O-Methyl-adenosine
  modified_base 75: mod_base = OTHER; note = 2'-O-Methyl-adenosine
  modified_base 76: mod_base = OTHER; note = 2'-O-Methyl-adenosine
  modified_base 77: mod_base = OTHER; note = 2'-O-Methyl-adenosine
  modified_base 78: mod_base = OTHER; note = 2'-O-Methyl-adenosine
  modified_base 79: mod_base = OTHER; note = 2'-O-Methyl-guanosine
  modified_base 80: mod_base = OTHER; note = 2'-O-Methyl-uridine
  modified_base 81: mod_base = OTHER; note = 2'-O-Methyl-guanosine
  modified_base 83: mod_base = OTHER; note = 2'-O-Methyl-cytidine
  modified_base 84: mod_base = OTHER; note = 2'-O-Methyl-adenosine
  modified_base 85: mod_base = OTHER; note = 2'-O-Methyl-cytidine
  modified_base 86: mod_base = OTHER; note = 2'-O-Methyl-cytidine
  modified_base 87: mod_base = OTHER; note = 2'-O-Methyl-guanosine
  modified_base 88: mod_base = OTHER; note = 2'-O-Methyl-adenosine
  modified_base 89: mod_base = OTHER; note = 2'-O-Methyl-guanosine
  modified_base 90: mod_base = OTHER; note = 2'-O-Methyl-uridine
  modified_base 91: mod_base = OTHER; note = 2'-O-Methyl-cytidine
  modified_base 92: mod_base = OTHER; note = 2'-O-Methyl-guanosine
  modified_base 93: mod_base = OTHER; note = 2'-O-Methyl-guanosine
  modified_base 94: mod_base = OTHER; note = 2'-O-Methyl-uridine
  modified_base 95: mod_base = OTHER; note = 2'-O-Methyl-guanosine
  modified_base 96: mod_base = OTHER; note = 2'-O-Methyl-cytidine
  modified_base 97: mod_base = OTHER; note = 2'-O-Methyl-uridine
  modified_base 98: mod_base = OTHER; note = 2'-O-Methyl-uridine phosphorothioate
  modified_base 99: mod_base = OTHER; note = 2'-O-Methyl-uridine phosphorothioate
  modified_base 100: mod_base = OTHER; note = 2'-O-Methyl-uridine
  misc_feature 1..64: note = RNA
  misc_feature 65: note = DNA
  misc_feature 66..100: note = RNA

SEQ ID NO: 2107 - DNA, 100 bp, synthetic construct; identical to SEQ ID NO: 1948
  source 1..100: mol_type = other DNA; note = Description of Artificial Sequence: Synthetic oligonucleotide; note = Description of Combined DNA/RNA Molecule: Synthetic oligonucleotide
  modified_base 1: mod_base = OTHER; note = 2'-O-Methyl-cytidine phosphorothioate
  modified_base 2: mod_base = OTHER; note = 2'-O-Methyl-adenosine phosphorothioate
  modified_base 3: mod_base = OTHER; note = 2'-O-Methyl-guanosine
  modified_base 21: mod_base = OTHER; note = 2'-O-Methyl-guanosine
  modified_base 28: mod_base = OTHER; note = 2'-O-Methyl-adenosine
  modified_base 29: mod_base = OTHER; note = 2'-O-Methyl-guanosine
  modified_base 30: mod_base = OTHER; note = 2'-O-Methyl-cytidine
  modified_base 31: mod_base = OTHER; note = 2'-O-Methyl-uridine
  modified_base 32: mod_base = OTHER; note = 2'-O-Methyl-adenosine
  modified_base 33: mod_base = OTHER; note = 2'-O-Methyl-guanosine
  modified_base 34: mod_base = OTHER; note = Nebularine - 2'-deoxynebularine
  modified_base 35: mod_base = OTHER; note = 2'-O-Methyl-adenosine
  modified_base 36: mod_base = OTHER; note = 2'-O-Methyl-adenosine
  modified_base 37: mod_base = OTHER; note = 2'-O-Methyl-uridine
  modified_base 38: mod_base = OTHER; note = 2'-O-Methyl-adenosine
  modified_base 39: mod_base = OTHER; note = 2'-O-Methyl-guanosine
  modified_base 40: mod_base = OTHER; note = 2'-O-Methyl-cytidine
  modified_base 41: mod_base = OTHER; note = 2'-O-Methyl-adenosine
  modified_base 42: mod_base = OTHER; note = 2'-O-Methyl-adenosine
  modified_base 46: mod_base = OTHER; note = 2'-O-Methyl-adenosine
  modified_base 48: mod_base = OTHER; note = 2'-O-Methyl-adenosine
  modified_base 50: mod_base = OTHER; note = 2'-O-Methyl-uridine
  modified_base 52: mod_base = OTHER; note = 2'-O-Methyl-adenosine
  modified_base 53: mod_base = OTHER; note = 2'-O-Methyl-guanosine
  modified_base 54: mod_base = OTHER; note = 2'-O-Methyl-guanosine
  modified_base 55: mod_base = OTHER; note = 2'-O-Methyl-cytidine
  modified_base 56: mod_base = OTHER; note = 2'-O-Methyl-uridine
  modified_base 57: mod_base = OTHER; note = Nebularine - 2'-deoxynebularine
  modified_base 60: mod_base = OTHER; note = 2'-O-Methyl-cytidine
  modified_base 61: mod_base = OTHER; note = 2'-O-Methyl-cytidine
  modified_base 65: mod_base = OTHER; note = Nebularine - 2'-deoxynebularine
  modified_base 66: mod_base = OTHER; note = 2'-O-Methyl-uridine
  modified_base 67: mod_base = OTHER; note = 2'-O-Methyl-cytidine
  modified_base 70: mod_base = OTHER; note = 2'-O-Methyl-cytidine
  modified_base 71: mod_base = OTHER; note = 2'-O-Methyl-uridine
  modified_base 72: mod_base = OTHER; note = 2'-O-Methyl-uridine
  modified_base 73: mod_base = OTHER; note = 2'-O-Methyl-guanosine
  modified_base 74: mod_base = OTHER; note = 2'-O-Methyl-adenosine
  modified_base 75: mod_base = OTHER; note = 2'-O-Methyl-adenosine
  modified_base 76: mod_base = OTHER; note = 2'-O-Methyl-adenosine
  modified_base 77: mod_base = OTHER; note = 2'-O-Methyl-adenosine
  modified_base 78: mod_base = OTHER; note = 2'-O-Methyl-adenosine
  modified_base 79: mod_base = OTHER; note = 2'-O-Methyl-guanosine
  modified_base 80: mod_base = OTHER; note = 2'-O-Methyl-uridine
  modified_base 81: mod_base = OTHER; note = 2'-O-Methyl-guanosine
  modified_base 83: mod_base = OTHER; note = 2'-O-Methyl-cytidine
  modified_base 84: mod_base = OTHER; note = 2'-O-Methyl-adenosine
  modified_base 85: mod_base = OTHER; note = 2'-O-Methyl-cytidine
  modified_base 86: mod_base = OTHER; note = 2'-O-Methyl-cytidine
  modified_base 87: mod_base = OTHER; note = 2'-O-Methyl-guanosine
  modified_base 88: mod_base = OTHER; note = 2'-O-Methyl-adenosine
  modified_base 89: mod_base = OTHER; note = 2'-O-Methyl-guanosine
  modified_base 90: mod_base = OTHER; note = 2'-O-Methyl-uridine
  modified_base 91: mod_base = OTHER; note = 2'-O-Methyl-cytidine
  modified_base 92: mod_base = OTHER; note = 2'-O-Methyl-guanosine
  modified_base 93: mod_base = OTHER; note = 2'-O-Methyl-guanosine
  modified_base 94: mod_base = OTHER; note = 2'-O-Methyl-uridine
  modified_base 95: mod_base = OTHER; note = 2'-O-Methyl-guanosine
  modified_base 96: mod_base = OTHER; note = 2'-O-Methyl-cytidine
  modified_base 97: mod_base = OTHER; note = 2'-O-Methyl-uridine
  modified_base 98: mod_base = OTHER; note = 2'-O-Methyl-uridine phosphorothioate
  modified_base 99: mod_base = OTHER; note = 2'-O-Methyl-uridine phosphorothioate
  modified_base 100: mod_base = OTHER; note = 2'-O-Methyl-uridine
  misc_feature 1..33: note = RNA
  misc_feature 34: note = DNA
  misc_feature 35..56: note = RNA
  misc_feature 57: note = DNA
  misc_feature 58..64: note = RNA
  misc_feature 65: note = DNA
  misc_feature 66..100: note = RNA

SEQ ID NO: 2108 - DNA, 100 bp, synthetic construct; identical to SEQ ID NO: 1949
  source 1..100: mol_type = other DNA; note = Description of Artificial Sequence: Synthetic oligonucleotide; note = Description of Combined DNA/RNA Molecule: Synthetic oligonucleotide
  modified_base 1: mod_base = OTHER; note = 2'-O-Methyl-cytidine phosphorothioate
  modified_base 2: mod_base = OTHER; note = 2'-O-Methyl-adenosine phosphorothioate
  modified_base 3: mod_base = OTHER; note = 2'-O-Methyl-guanosine
  modified_base 21: mod_base = OTHER; note = 2'-O-Methyl-guanosine
  modified_base 28: mod_base = OTHER; note = Nebularine - 2'-deoxynebularine
  modified_base 29: mod_base = OTHER; note = 2'-O-Methyl-guanosine
  modified_base 30: mod_base = OTHER; note = 2'-O-Methyl-cytidine
  modified_base 31: mod_base = OTHER; note = 2'-O-Methyl-uridine
  modified_base 32: mod_base = OTHER; note = 2'-O-Methyl-adenosine
  modified_base 33: mod_base = OTHER; note = 2'-O-Methyl-guanosine
  modified_base 34: mod_base = OTHER; note = Nebularine - 2'-deoxynebularine
  modified_base 35: mod_base = OTHER; note = 2'-O-Methyl-adenosine
  modified_base 36: mod_base = OTHER; note = 2'-O-Methyl-adenosine
  modified_base 37: mod_base = OTHER; note = 2'-O-Methyl-uridine
  modified_base 38: mod_base = OTHER; note = 2'-O-Methyl-adenosine
  modified_base 39: mod_base = OTHER; note = 2'-O-Methyl-guanosine
  modified_base 40: mod_base = OTHER; note = 2'-O-Methyl-cytidine
  modified_base 41: mod_base = OTHER; note = 2'-O-Methyl-adenosine
  modified_base 42: mod_base = OTHER; note = Nebularine - 2'-deoxynebularine
  modified_base 46: mod_base = OTHER; note = 2'-O-Methyl-adenosine
  modified_base 48: mod_base = OTHER; note = 2'-O-Methyl-adenosine
  modified_base 50: mod_base = OTHER; note = 2'-O-Methyl-uridine
  modified_base 52: mod_base = OTHER; note = 2'-O-Methyl-adenosine
  modified_base 53: mod_base = OTHER; note = 2'-O-Methyl-guanosine
  modified_base 54: mod_base = OTHER; note = 2'-O-Methyl-guanosine
  modified_base 55: mod_base = OTHER; note = 2'-O-Methyl-cytidine
  modified_base 56: mod_base = OTHER; note = 2'-O-Methyl-uridine
  modified_base 57: mod_base = OTHER; note = Nebularine - 2'-deoxynebularine
  modified_base 60: mod_base = OTHER; note = 2'-O-Methyl-cytidine
  modified_base 61: mod_base = OTHER; note = 2'-O-Methyl-cytidine
  modified_base 65: mod_base = OTHER; note = Nebularine - 2'-deoxynebularine
  modified_base 66: mod_base = OTHER; note = 2'-O-Methyl-uridine
  modified_base 67: mod_base = OTHER; note = 2'-O-Methyl-cytidine
  modified_base 70: mod_base = OTHER; note = 2'-O-Methyl-cytidine
  modified_base 71: mod_base = OTHER; note = 2'-O-Methyl-uridine
  modified_base 72: mod_base = OTHER; note = 2'-O-Methyl-uridine
  modified_base 73: mod_base = OTHER; note = 2'-O-Methyl-guanosine
  modified_base 74: mod_base = OTHER; note = 2'-O-Methyl-adenosine
  modified_base 75: mod_base = OTHER; note = 2'-O-Methyl-adenosine
  modified_base 76: mod_base = OTHER; note = 2'-O-Methyl-adenosine
  modified_base 77: mod_base = OTHER; note = 2'-O-Methyl-adenosine
  modified_base 78: mod_base = OTHER; note = 2'-O-Methyl-adenosine
  modified_base 79: mod_base = OTHER; note = 2'-O-Methyl-guanosine
  modified_base 80: mod_base = OTHER; note = 2'-O-Methyl-uridine
  modified_base 81: mod_base = OTHER; note = 2'-O-Methyl-guanosine
  modified_base 83: mod_base = OTHER; note = 2'-O-Methyl-cytidine
  modified_base 84: mod_base = OTHER; note = 2'-O-Methyl-adenosine
  modified_base 85: mod_base = OTHER; note = 2'-O-Methyl-cytidine
  modified_base 86: mod_base = OTHER; note = 2'-O-Methyl-cytidine
  modified_base 87: mod_base = OTHER; note = 2'-O-Methyl-guanosine
  modified_base 88: mod_base = OTHER; note = 2'-O-Methyl-adenosine
  modified_base 89: mod_base = OTHER; note = 2'-O-Methyl-guanosine
  modified_base 90: mod_base = OTHER; note = 2'-O-Methyl-uridine
  modified_base 91: mod_base = OTHER; note = 2'-O-Methyl-cytidine
  modified_base 92: mod_base = OTHER; note = 2'-O-Methyl-guanosine
  modified_base 93: mod_base = OTHER; note = 2'-O-Methyl-guanosine
  modified_base 94: mod_base = OTHER; note = 2'-O-Methyl-uridine
  modified_base 95: mod_base = OTHER; note = 2'-O-Methyl-guanosine
  modified_base 96: mod_base = OTHER; note = 2'-O-Methyl-cytidine
  modified_base 97: mod_base = OTHER; note = 2'-O-Methyl-uridine
  modified_base 98: mod_base = OTHER; note = 2'-O-Methyl-uridine phosphorothioate
  modified_base 99: mod_base = OTHER; note = 2'-O-Methyl-uridine phosphorothioate
  modified_base 100: mod_base = OTHER; note = 2'-O-Methyl-uridine
  misc_feature 1..27: note = RNA
  misc_feature 28: note = DNA
  misc_feature 29..33: note = RNA
  misc_feature 34: note = DNA
  misc_feature 35..41: note = RNA
  misc_feature 42: note = DNA
  misc_feature 43..56: note = RNA
  misc_feature 57: note = DNA
  misc_feature 58..64: note = RNA
  misc_feature 65: note = DNA
  misc_feature 66..100: note = RNA

SEQ ID NO: 2109 - RNA, 100 nt, synthetic construct
  source 1..100: mol_type = other RNA; note = Description of Artificial Sequence: Synthetic polynucleotide
  modified_base 1: mod_base = OTHER; note = 2'-O-Methyl-cytidine phosphorothioate
  modified_base 2: mod_base = OTHER; note = 2'-O-Methyl-adenosine phosphorothioate
  modified_base 3: mod_base = OTHER; note = 2'-O-Methyl-guanosine phosphorothioate
  modified_base 29: mod_base = OTHER; note = 2'-O-Methyl-guanosine
  modified_base 30: mod_base = OTHER; note = 2'-O-Methyl-cytidine
  modified_base 31: mod_base = OTHER; note = 2'-O-Methyl-uridine
  modified_base 32: mod_base = OTHER; note = 2'-O-Methyl-adenosine
  modified_base 33: mod_base = OTHER; note = 2'-O-Methyl-guanosine
  modified_base 34: mod_base = OTHER; note = 2'-O-Methyl-adenosine
  modified_base 35: mod_base = OTHER; note = 2'-O-Methyl-adenosine
  modified_base 36: mod_base = OTHER; note = 2'-O-Methyl-adenosine
  modified_base 37: mod_base = OTHER; note = 2'-O-Methyl-uridine
  modified_base 38: mod_base = OTHER; note = 2'-O-Methyl-adenosine
  modified_base 39: mod_base = OTHER; note = 2'-O-Methyl-guanosine
  modified_base 40: mod_base = OTHER; note = 2'-O-Methyl-cytidine
  modified_base 69: mod_base = OTHER; note = 2'-O-Methyl-adenosine
  modified_base 70: mod_base = OTHER; note = 2'-O-Methyl-cytidine
  modified_base 71: mod_base = OTHER; note = 2'-O-Methyl-uridine
  modified_base 72: mod_base = OTHER; note = 2'-O-Methyl-uridine
  modified_base 73: mod_base = OTHER; note = 2'-O-Methyl-guanosine
  modified_base 74: mod_base = OTHER; note = 2'-O-Methyl-adenosine
  modified_base 75: mod_base = OTHER; note = 2'-O-Methyl-adenosine
  modified_base 76: mod_base = OTHER; note = 2'-O-Methyl-adenosine
  modified_base 77: mod_base = OTHER; note = 2'-O-Methyl-adenosine
  modified_base 78: mod_base = OTHER; note = 2'-O-Methyl-adenosine
  modified_base 79: mod_base = OTHER; note = 2'-O-Methyl-guanosine
  modified_base 80: mod_base = OTHER; note = 2'-O-Methyl-uridine
  modified_base 81: mod_base = OTHER; note = 2'-O-Methyl-guanosine
  modified_base 82: mod_base = OTHER; note = 2'-O-Methyl-guanosine
  modified_base 83: mod_base = OTHER; note = 2'-O-Methyl-cytidine
  modified_base 84: mod_base = OTHER; note = 2'-O-Methyl-adenosine
  modified_base 85: mod_base = OTHER; note = 2'-O-Methyl-cytidine
  modified_base 86: mod_base = OTHER; note = 2'-O-Methyl-cytidine
  modified_base 87: mod_base = OTHER; note = 2'-O-Methyl-guanosine
  modified_base 88: mod_base = OTHER; note = 2'-O-Methyl-adenosine
  modified_base 89: mod_base = OTHER; note = 2'-O-Methyl-guanosine
  modified_base 90: mod_base = OTHER; note = 2'-O-Methyl-uridine
  modified_base 91: mod_base = OTHER; note = 2'-O-Methyl-cytidine
  modified_base 92: mod_base = OTHER; note = 2'-O-Methyl-guanosine
  modified_base 93: mod_base = OTHER; note = 2'-O-Methyl-guanosine
  modified_base 94: mod_base = OTHER; note = 2'-O-Methyl-uridine
  modified_base 95: mod_base = OTHER; note = 2'-O-Methyl-guanosine
  modified_base 96: mod_base = OTHER; note = 2'-O-Methyl-cytidine
  modified_base 97: mod_base = OTHER; note = 2'-O-Methyl-uridine phosphorothioate
  modified_base 98: mod_base = OTHER; note = Nebularine - 2'-O-methylnebularine phosphorothioate
  modified_base 99: mod_base = OTHER; note = Nebularine - 2'-O-methylnebularine phosphorothioate
  modified_base 100: mod_base = OTHER; note = Nebularine - 2'-O-methylnebularine
caggttccatgggatgctctgttttagagctagaaatagcaagttaaaataaggctagtccgttatcaacttgaaaaagtggcaccgagtcggtgctnnn

SEQ ID NO: 2110 - RNA, 100 nt, synthetic construct; identical to SEQ ID NO: 2109
  source 1..100: mol_type = other RNA; note = Description of Artificial Sequence: Synthetic polynucleotide
  modified_base 1: mod_base = OTHER; note = 2'-O-Methyl-cytidine phosphorothioate
  modified_base 2: mod_base = OTHER; note = 2'-O-Methyl-adenosine phosphorothioate
  modified_base 3: mod_base = OTHER; note = 2'-O-Methyl-guanosine phosphorothioate
  modified_base 21: mod_base = OTHER; note = 2'-O-Methyl-guanosine
  modified_base 28: mod_base = OTHER; note = 2'-O-Methyl-adenosine
  modified_base 29: mod_base = OTHER; note = 2'-O-Methyl-guanosine
  modified_base 30: mod_base = OTHER; note = 2'-O-Methyl-cytidine
  modified_base 31: mod_base = OTHER; note = 2'-O-Methyl-uridine
  modified_base 32: mod_base = OTHER; note = 2'-O-Methyl-adenosine
  modified_base 34: mod_base = OTHER; note = 2'-O-Methyl-adenosine
  modified_base 35: mod_base = OTHER; note = 2'-O-Methyl-adenosine
  modified_base 36: mod_base = OTHER; note = 2'-O-Methyl-adenosine
  modified_base 37: mod_base = OTHER; note = 2'-O-Methyl-uridine
  modified_base 38: mod_base = OTHER; note = 2'-O-Methyl-adenosine
  modified_base 39: mod_base = OTHER; note = 2'-O-Methyl-guanosine
  modified_base 40: mod_base = OTHER; note = 2'-O-Methyl-cytidine
  modified_base 41: mod_base = OTHER; note = 2'-O-Methyl-adenosine
  modified_base 42: mod_base = OTHER; note = 2'-O-Methyl-adenosine
  modified_base 46: mod_base = OTHER; note = 2'-O-Methyl-adenosine
  modified_base 48: mod_base = OTHER; note = 2'-O-Methyl-adenosine
  modified_base 50: mod_base = OTHER; note = 2'-O-Methyl-uridine
  modified_base 52: mod_base = OTHER; note = 2'-O-Methyl-adenosine
  modified_base 53: mod_base = OTHER; note = 2'-O-Methyl-guanosine
  modified_base 54: mod_base = OTHER; note = 2'-O-Methyl-guanosine
  modified_base 57: mod_base = OTHER; note = 2'-O-Methyl-adenosine
  modified_base 61: mod_base = OTHER; note = 2'-O-Methyl-cytidine
  modified_base 66: mod_base = OTHER; note = 2'-O-Methyl-uridine
  modified_base 67: mod_base = OTHER; note = 2'-O-Methyl-cytidine
  modified_base 70: mod_base = OTHER; note = 2'-O-Methyl-cytidine
  modified_base 71: mod_base = OTHER; note = 2'-O-Methyl-uridine
  modified_base 72: mod_base = OTHER; note = 2'-O-Methyl-uridine
  modified_base 74: mod_base = OTHER; note = 2'-O-Methyl-adenosine
  modified_base 75: mod_base = OTHER; note = 2'-O-Methyl-adenosine
  modified_base 76: mod_base = OTHER; note = 2'-O-Methyl-adenosine
  modified_base 77: mod_base = OTHER; note = 2'-O-Methyl-adenosine
  modified_base 78: mod_base = OTHER; note = 2'-O-Methyl-adenosine
  modified_base 79: mod_base = OTHER; note = 2'-O-Methyl-guanosine
  modified_base 80: mod_base = OTHER; note = 2'-O-Methyl-uridine
  modified_base 82: mod_base = OTHER; note = 2'-O-Methyl-guanosine
  modified_base 83: mod_base = OTHER; note = 2'-O-Methyl-cytidine
  modified_base 84: mod_base = OTHER; note = 2'-O-Methyl-adenosine
  modified_base 85: mod_base = OTHER; note = 2'-O-Methyl-cytidine
  modified_base 86: mod_base = OTHER; note = 2'-O-Methyl-cytidine
  modified_base 87: mod_base = OTHER; note = 2'-O-Methyl-guanosine
  modified_base 89: mod_base = OTHER; note = 2'-O-Methyl-guanosine
  modified_base 92: mod_base = OTHER; note = 2'-O-Methyl-guanosine
  modified_base 93: mod_base = OTHER; note = 2'-O-Methyl-guanosine
  modified_base 94: mod_base = OTHER; note = 2'-O-Methyl-uridine
  modified_base 95: mod_base = OTHER; note = 2'-O-Methyl-guanosine
  modified_base 96: mod_base = OTHER; note = 2'-O-Methyl-cytidine
  modified_base 97: mod_base = OTHER; note = 2'-O-Methyl-uridine phosphorothioate
  modified_base 98: mod_base = OTHER; note = Nebularine - 2'-O-methylnebularine phosphorothioate
  modified_base 99: mod_base = OTHER; note = Nebularine - 2'-O-methylnebularine phosphorothioate
  modified_base 100: mod_base = OTHER; note = Nebularine - 2'-O-methylnebularine

SEQ ID NO: 2111 - RNA, 100 nt, synthetic construct
  source 1..100: mol_type = other RNA; note = Description of Artificial Sequence: Synthetic polynucleotide
  modified_base 1: mod_base = OTHER; note = 2'-O-Methyl-cytidine phosphorothioate
  modified_base 2: mod_base = OTHER; note = 2'-O-Methyl-adenosine phosphorothioate
  modified_base 3: mod_base = OTHER; note = 2'-O-Methyl-guanosine phosphorothioate
  modified_base 29: mod_base = OTHER; note = 2'-O-Methyl-guanosine
  modified_base 30: mod_base = OTHER; note = 2'-O-Methyl-cytidine
  modified_base 31: mod_base = OTHER; note = 2'-O-Methyl-uridine
  modified_base 32: mod_base = OTHER; note = 2'-O-Methyl-adenosine
  modified_base 33: mod_base = OTHER; note = 2'-O-Methyl-guanosine
  modified_base 34: mod_base = OTHER; note = 2'-O-Methyl-adenosine
  modified_base 35: mod_base = OTHER; note = 2'-O-Methyl-adenosine
  modified_base 36: mod_base = OTHER; note = 2'-O-Methyl-adenosine
  modified_base 37: mod_base = OTHER; note = 2'-O-Methyl-uridine
  modified_base 38: mod_base = OTHER; note = 2'-O-Methyl-adenosine
  modified_base 39: mod_base = OTHER; note = 2'-O-Methyl-guanosine
  modified_base 40: mod_base = OTHER; note = 2'-O-Methyl-cytidine
  modified_base 69: mod_base = OTHER; note = 2'-O-Methyl-adenosine
  modified_base 70: mod_base = OTHER; note = 2'-O-Methyl-cytidine
  modified_base 71: mod_base = OTHER; note = 2'-O-Methyl-uridine
  modified_base 72: mod_base = OTHER; note = 2'-O-Methyl-uridine
  modified_base 73: mod_base = OTHER; note = 2'-O-Methyl-guanosine
  modified_base 74: mod_base = OTHER; note = 2'-O-Methyl-adenosine
  modified_base 75: mod_base = OTHER; note = 2'-O-Methyl-adenosine
  modified_base 76: mod_base = OTHER; note = 2'-O-Methyl-adenosine
  modified_base 77: mod_base = OTHER; note = 2'-O-Methyl-adenosine
  modified_base 78: mod_base = OTHER; note = 2'-O-Methyl-adenosine
  modified_base 79: mod_base = OTHER; note = 2'-O-Methyl-guanosine
  modified_base 80: mod_base = OTHER; note = 2'-O-Methyl-uridine
  modified_base 81: mod_base = OTHER; note = 2'-O-Methyl-guanosine
  modified_base 82: mod_base = OTHER; note = 2'-O-Methyl-guanosine
  modified_base 83: mod_base = OTHER; note = 2'-O-Methyl-cytidine
  modified_base 84: mod_base = OTHER; note = 2'-O-Methyl-adenosine
  modified_base 85: mod_base = OTHER; note = 2'-O-Methyl-cytidine
  modified_base 86: mod_base = OTHER; note = 2'-O-Methyl-cytidine
  modified_base 87: mod_base = OTHER; note = 2'-O-Methyl-guanosine
  modified_base 88: mod_base = OTHER; note = 2'-O-Methyl-adenosine
  modified_base 89: mod_base = OTHER; note = 2'-O-Methyl-guanosine
  modified_base 90: mod_base = OTHER; note = 2'-O-Methyl-uridine
  modified_base 91: mod_base = OTHER; note = 2'-O-Methyl-cytidine
  modified_base 92: mod_base = OTHER; note = 2'-O-Methyl-guanosine
  modified_base 93: mod_base = OTHER; note = 2'-O-Methyl-guanosine
  modified_base 94: mod_base = OTHER; note = 2'-O-Methyl-uridine
  modified_base 95: mod_base = OTHER; note = 2'-O-Methyl-guanosine
  modified_base 96: mod_base = OTHER; note = 2'-O-Methyl-cytidine
  modified_base 97: mod_base = OTHER; note = 2'-O-Methyl-uridine phosphorothioate
  modified_base 98: mod_base = OTHER; note = 2'-O-Methyl-uridine phosphorothioate
  modified_base 99: mod_base = OTHER; note = Nebularine - 2'-O-methylnebularine phosphorothioate
  modified_base 100: mod_base = OTHER; note = Nebularine - 2'-O-methylnebularine
caggttccatgggatgctctgttttagagctagaaatagcaagttaaaataaggctagtccgttatcaacttgaaaaagtggcaccgagtcggtgcttnn

SEQ ID NO: 2112 - RNA, 100 nt, synthetic construct; identical to SEQ ID NO: 2111
  source 1..100: mol_type = other RNA; note = Description of Artificial Sequence: Synthetic polynucleotide
  modified_base 1: mod_base = OTHER; note = 2'-O-Methyl-cytidine phosphorothioate
  modified_base 2: mod_base = OTHER; note = 2'-O-Methyl-adenosine phosphorothioate
  modified_base 3: mod_base = OTHER; note = 2'-O-Methyl-guanosine phosphorothioate
  modified_base 21: mod_base = OTHER; note = 2'-O-Methyl-guanosine
  modified_base 28: mod_base = OTHER; note = 2'-O-Methyl-adenosine
  modified_base 29: mod_base = OTHER; note = 2'-O-Methyl-guanosine
  modified_base 30: mod_base = OTHER; note = 2'-O-Methyl-cytidine
  modified_base 31: mod_base = OTHER; note = 2'-O-Methyl-uridine
  modified_base 32: mod_base = OTHER; note = 2'-O-Methyl-adenosine
  modified_base 34: mod_base = OTHER; note = 2'-O-Methyl-adenosine
  modified_base 35: mod_base = OTHER; note = 2'-O-Methyl-adenosine
  modified_base 36: mod_base = OTHER; note = 2'-O-Methyl-adenosine
  modified_base 37: mod_base = OTHER; note = 2'-O-Methyl-uridine
  modified_base 38: mod_base = OTHER; note = 2'-O-Methyl-adenosine
  modified_base 39: mod_base = OTHER; note = 2'-O-Methyl-guanosine
  modified_base 40: mod_base = OTHER; note = 2'-O-Methyl-cytidine
  modified_base 41: mod_base = OTHER; note = 2'-O-Methyl-adenosine
  modified_base 42: mod_base = OTHER; note = 2'-O-Methyl-adenosine
  modified_base 46: mod_base = OTHER; note = 2'-O-Methyl-adenosine
  modified_base 48: mod_base = OTHER; note = 2'-O-Methyl-adenosine
  modified_base 50: mod_base = OTHER; note = 2'-O-Methyl-uridine
  modified_base 52: mod_base = OTHER; note = 2'-O-Methyl-adenosine
  modified_base 53: mod_base = OTHER; note = 2'-O-Methyl-guanosine
  modified_base 54: mod_base = OTHER; note = 2'-O-Methyl-guanosine
  modified_base 57: mod_base = OTHER; note = 2'-O-Methyl-adenosine
  modified_base 61: mod_base = OTHER; note = 2'-O-Methyl-cytidine
  modified_base 66: mod_base = OTHER; note = 2'-O-Methyl-uridine
  modified_base 67: mod_base = OTHER; note = 2'-O-Methyl-cytidine
  modified_base 70: mod_base = OTHER; note = 2'-O-Methyl-cytidine
  modified_base 71: mod_base = OTHER; note = 2'-O-Methyl-uridine
  modified_base 72: mod_base = OTHER; note = 2'-O-Methyl-uridine
  modified_base 74: mod_base = OTHER; note = 2'-O-Methyl-adenosine
  modified_base 75: mod_base = OTHER; note = 2'-O-Methyl-adenosine
  modified_base 76: mod_base = OTHER; note = 2'-O-Methyl-adenosine
  modified_base 77: mod_base = OTHER; note = 2'-O-Methyl-adenosine
  modified_base 78: mod_base = OTHER; note = 2'-O-Methyl-adenosine
  modified_base 79: mod_base = OTHER; note = 2'-O-Methyl-guanosine
  modified_base 80: mod_base = OTHER; note = 2'-O-Methyl-uridine
  modified_base 82: mod_base = OTHER; note = 2'-O-Methyl-guanosine
  modified_base 83: mod_base = OTHER; note = 2'-O-Methyl-cytidine
  modified_base 84: mod_base = OTHER; note = 2'-O-Methyl-adenosine
  modified_base 85: mod_base = OTHER; note = 2'-O-Methyl-cytidine
  modified_base 86: mod_base = OTHER; note = 2'-O-Methyl-cytidine
  modified_base 87: mod_base = OTHER; note = 2'-O-Methyl-guanosine
  modified_base 89: mod_base = OTHER; note = 2'-O-Methyl-guanosine
  modified_base 92: mod_base = OTHER; note = 2'-O-Methyl-guanosine
  modified_base 93: mod_base = OTHER; note = 2'-O-Methyl-guanosine
  modified_base 94: mod_base = OTHER; note = 2'-O-Methyl-uridine
  modified_base 95: mod_base = OTHER; note = 2'-O-Methyl-guanosine
  modified_base 96: mod_base = OTHER; note = 2'-O-Methyl-cytidine
  modified_base 97: mod_base = OTHER; note = 2'-O-Methyl-uridine phosphorothioate
  modified_base 98: mod_base = OTHER; note = 2'-O-Methyl-uridine phosphorothioate
  modified_base 99: mod_base = OTHER; note = Nebularine - 2'-O-methylnebularine phosphorothioate
  modified_base 100: mod_base = OTHER; note = Nebularine - 2'-O-methylnebularine

SEQ ID NO: 2113 - RNA, 100 nt, synthetic construct
  source 1..100: mol_type = other RNA; note = Description of Artificial Sequence: Synthetic polynucleotide
  modified_base 1: mod_base = OTHER; note = 2'-O-Methyl-cytidine phosphorothioate
  modified_base 2: mod_base = OTHER; note = 2'-O-Methyl-adenosine phosphorothioate
  modified_base 3: mod_base = OTHER; note = 2'-O-Methyl-guanosine phosphorothioate
  modified_base 29: mod_base = OTHER; note = 2'-O-Methyl-guanosine
  modified_base 30: mod_base = OTHER; note = 2'-O-Methyl-cytidine
  modified_base 31: mod_base = OTHER; note = 2'-O-Methyl-uridine
  modified_base 32: mod_base = OTHER; note = 2'-O-Methyl-adenosine
  modified_base 33: mod_base = OTHER; note = 2'-O-Methyl-guanosine
  modified_base 34: mod_base = OTHER; note = 2'-O-Methyl-adenosine
  modified_base 35: mod_base = OTHER; note = 2'-O-Methyl-adenosine
  modified_base 36: mod_base = OTHER; note = 2'-O-Methyl-adenosine
  modified_base 37: mod_base = OTHER; note = 2'-O-Methyl-uridine
  modified_base 38: mod_base = OTHER; note = 2'-O-Methyl-adenosine
  modified_base 39: mod_base = OTHER; note = 2'-O-Methyl-guanosine
  modified_base 40: mod_base = OTHER; note = 2'-O-Methyl-cytidine
  modified_base 69: mod_base = OTHER; note = 2'-O-Methyl-adenosine
  modified_base 70: mod_base = OTHER; note = 2'-O-Methyl-cytidine
  modified_base 71: mod_base = OTHER; note = 2'-O-Methyl-uridine
  modified_base 72: mod_base = OTHER; note = 2'-O-Methyl-uridine
  modified_base 73: mod_base = OTHER; note = 2'-O-Methyl-guanosine
  modified_base 74: mod_base = OTHER; note = 2'-O-Methyl-adenosine
  modified_base 75: mod_base = OTHER; note = 2'-O-Methyl-adenosine
  modified_base 76: mod_base = OTHER; note = 2'-O-Methyl-adenosine
  modified_base 77: mod_base = OTHER; note = 2'-O-Methyl-adenosine
  modified_base 78: mod_base = OTHER; note = 2'-O-Methyl-adenosine
  modified_base 79: mod_base = OTHER; note = 2'-O-Methyl-guanosine
  modified_base 80: mod_base = OTHER; note = 2'-O-Methyl-uridine
  modified_base 81: mod_base = OTHER; note = 2'-O-Methyl-guanosine
  modified_base 82: mod_base = OTHER; note = 2'-O-Methyl-guanosine
  modified_base 83: mod_base = OTHER; note = 2'-O-Methyl-cytidine
  modified_base 84: mod_base = OTHER; note = 2'-O-Methyl-adenosine
  modified_base 85: mod_base = OTHER; note = 2'-O-Methyl-cytidine
  modified_base 86: mod_base = OTHER; note = 2'-O-Methyl-cytidine
  modified_base 87: mod_base = OTHER; note = 2'-O-Methyl-guanosine
  modified_base 88: mod_base = OTHER; note = 2'-O-Methyl-adenosine
  modified_base 89: mod_base = OTHER; note = 2'-O-Methyl-guanosine
  modified_base 90: mod_base = OTHER; note = 2'-O-Methyl-uridine
  modified_base 91: mod_base = OTHER; note = 2'-O-Methyl-cytidine
  modified_base 92: mod_base = OTHER; note = 2'-O-Methyl-guanosine
  modified_base 93: mod_base = OTHER; note = 2'-O-Methyl-guanosine
  modified_base 94: mod_base = OTHER; note = 2'-O-Methyl-uridine
  modified_base 95: mod_base = OTHER; note = 2'-O-Methyl-guanosine
  modified_base 96: mod_base = OTHER; note = 2'-O-Methyl-cytidine
  modified_base 97: mod_base = OTHER; note = 2'-O-Methyl-uridine phosphorothioate
  modified_base 98: mod_base = OTHER; note = 2'-O-Methyl-uridine phosphorothioate
  modified_base 99: mod_base = OTHER; note = 2'-O-Methyl-uridine phosphorothioate
  modified_base 100: mod_base = OTHER; note = Nebularine - 2'-O-methylnebularine
caggttccatgggatgctctgttttagagctagaaatagcaagttaaaataaggctagtccgttatcaacttgaaaaagtggcaccgagtcggtgctttn

SEQ ID NO: 2114 - RNA, 100 nt, synthetic construct; identical to SEQ ID NO: 2113
  source 1..100: mol_type = other RNA; note = Description of Artificial Sequence: Synthetic polynucleotide
  modified_base 1: mod_base = OTHER; note = 2'-O-Methyl-cytidine phosphorothioate
  modified_base 2: mod_base = OTHER; note = 2'-O-Methyl-adenosine phosphorothioate
  modified_base 3: mod_base = OTHER; note = 2'-O-Methyl-guanosine phosphorothioate
  modified_base 21: mod_base = OTHER; note = 2'-O-Methyl-guanosine
  modified_base 28: mod_base = OTHER; note = 2'-O-Methyl-adenosine
  modified_base 29: mod_base = OTHER; note = 2'-O-Methyl-guanosine
  modified_base 30: mod_base = OTHER; note = 2'-O-Methyl-cytidine
  modified_base 31: mod_base = OTHER; note = 2'-O-Methyl-uridine
  modified_base 32: mod_base = OTHER; note = 2'-O-Methyl-adenosine
  modified_base 34: mod_base = OTHER; note = 2'-O-Methyl-adenosine
  modified_base 35: mod_base = OTHER; note = 2'-O-Methyl-adenosine
  modified_base 36: mod_base = OTHER; note = 2'-O-Methyl-adenosine
  modified_base 37: mod_base = OTHER; note = 2'-O-Methyl-uridine
  modified_base 38: mod_base = OTHER; note = 2'-O-Methyl-adenosine
  modified_base 39: mod_base = OTHER; note = 2'-O-Methyl-guanosine
  modified_base 40: mod_base = OTHER; note = 2'-O-Methyl-cytidine
  modified_base 41: mod_base = OTHER; note = 2'-O-Methyl-adenosine
  modified_base 42: mod_base = OTHER; note = 2'-O-Methyl-adenosine
  modified_base 46: mod_base = OTHER; note = 2'-O-Methyl-adenosine
  modified_base 48: mod_base = OTHER; note = 2'-O-Methyl-adenosine
  modified_base 50: mod_base = OTHER; note = 2'-O-Methyl-uridine
  modified_base 52: mod_base = OTHER; note = 2'-O-Methyl-adenosine
  modified_base 53: mod_base = OTHER; note = 2'-O-Methyl-guanosine
  modified_base 54: mod_base = OTHER; note = 2'-O-Methyl-guanosine
  modified_base 57: mod_base = OTHER; note = 2'-O-Methyl-adenosine
  modified_base 61: mod_base = OTHER; note = 2'-O-Methyl-cytidine
  modified_base 66: mod_base = OTHER; note = 2'-O-Methyl-uridine
  modified_base 67: mod_base = OTHER; note = 2'-O-Methyl-cytidine
  modified_base 70: mod_base = OTHER; note = 2'-O-Methyl-cytidine
  modified_base 71: mod_base = OTHER; note = 2'-O-Methyl-uridine
  modified_base 72: mod_base = OTHER; note = 2'-O-Methyl-uridine
  modified_base 74: mod_base = OTHER; note = 2'-O-Methyl-adenosine
  modified_base 75: mod_base = OTHER; note = 2'-O-Methyl-adenosine
  modified_base 76: mod_base = OTHER; note = 2'-O-Methyl-adenosine
  modified_base 77: mod_base = OTHER; note = 2'-O-Methyl-adenosine
  modified_base 78: mod_base = OTHER; note = 2'-O-Methyl-adenosine
  modified_base 79: mod_base = OTHER; note = 2'-O-Methyl-guanosine
  modified_base 80: mod_base = OTHER; note = 2'-O-Methyl-uridine
  modified_base 82: mod_base = OTHER; note = 2'-O-Methyl-guanosine
  modified_base 83: mod_base = OTHER; note = 2'-O-Methyl-cytidine
  modified_base 84: mod_base = OTHER; note = 2'-O-Methyl-adenosine
  modified_base 85: mod_base = OTHER; note = 2'-O-Methyl-cytidine
  modified_base 86: mod_base = OTHER; note = 2'-O-Methyl-cytidine
  modified_base 87: mod_base = OTHER; note = 2'-O-Methyl-guanosine
  modified_base 89: mod_base = OTHER; note = 2'-O-Methyl-guanosine
  modified_base 92: mod_base = OTHER; note = 2'-O-Methyl-guanosine
  modified_base 93: mod_base = OTHER; note = 2'-O-Methyl-guanosine
  modified_base 94: mod_base = OTHER; note = 2'-O-Methyl-uridine
  modified_base 95: mod_base = OTHER; note = 2'-O-Methyl-guanosine
  modified_base 96: mod_base = OTHER; note = 2'-O-Methyl-cytidine
  modified_base 97: mod_base = OTHER; note = 2'-O-Methyl-uridine phosphorothioate
  modified_base 98: mod_base = OTHER; note = 2'-O-Methyl-uridine phosphorothioate
  modified_base 99: mod_base = OTHER; note = 2'-O-Methyl-uridine phosphorothioate
  modified_base 100: mod_base = OTHER; note = Nebularine - 2'-O-methylnebularine

SEQ ID NO: 2115 - DNA, 100 bp, synthetic construct
  source 1..100: mol_type = other DNA; note = Description of Artificial Sequence: Synthetic oligonucleotide; note = Description of Combined DNA/RNA Molecule: Synthetic oligonucleotide
  modified_base 1: mod_base = OTHER; note = 2'-O-Methyl-cytidine phosphorothioate
  modified_base 2: mod_base = OTHER; note = 2'-O-Methyl-adenosine phosphorothioate
  modified_base 3: mod_base = OTHER; note = 2'-O-Methyl-guanosine phosphorothioate
  modified_base 29: mod_base = OTHER; note = 2'-O-Methyl-guanosine
  modified_base 30: mod_base = OTHER; note = 2'-O-Methyl-cytidine
  modified_base 31: mod_base = OTHER; note = 2'-O-Methyl-uridine
  modified_base 32: mod_base = OTHER; note = 2'-O-Methyl-adenosine
  modified_base 33: mod_base = OTHER; note = 2'-O-Methyl-guanosine
  modified_base 34: mod_base = OTHER; note = 2'-O-Methyl-adenosine
  modified_base 35: mod_base = OTHER; note = 2'-O-Methyl-adenosine
  modified_base 36: mod_base = OTHER; note = 2'-O-Methyl-adenosine
  modified_base 37: mod_base = OTHER; note = 2'-O-Methyl-uridine
  modified_base 38: mod_base = OTHER; note = 2'-O-Methyl-adenosine
  modified_base 39: mod_base = OTHER; note = 2'-O-Methyl-guanosine
  modified_base 40: mod_base = OTHER; note = 2'-O-Methyl-cytidine
  modified_base 69: mod_base = OTHER; note = 2'-O-Methyl-adenosine
  modified_base 70: mod_base = OTHER; note = 2'-O-Methyl-cytidine
  modified_base 71: mod_base = OTHER; note = 2'-O-Methyl-uridine
  modified_base 72: mod_base = OTHER; note = 2'-O-Methyl-uridine
  modified_base 73: mod_base = OTHER; note = 2'-O-Methyl-guanosine
  modified_base 74: mod_base = OTHER; note = 2'-O-Methyl-adenosine
  modified_base 75: mod_base = OTHER; note = 2'-O-Methyl-adenosine
  modified_base 76: mod_base = OTHER; note = 2'-O-Methyl-adenosine
  modified_base 77: mod_base = OTHER; note = 2'-O-Methyl-adenosine
  modified_base 78: mod_base = OTHER; note = 2'-O-Methyl-adenosine
  modified_base 79: mod_base = OTHER; note = 2'-O-Methyl-guanosine
  modified_base 80: mod_base = OTHER; note = 2'-O-Methyl-uridine
  modified_base 81: mod_base = OTHER; note = 2'-O-Methyl-guanosine
  modified_base 82: mod_base = OTHER; note = 2'-O-Methyl-guanosine
  modified_base 83: mod_base = OTHER; note = 2'-O-Methyl-cytidine
  modified_base 84: mod_base = OTHER; note = 2'-O-Methyl-adenosine
  modified_base 85: mod_base = OTHER; note = 2'-O-Methyl-cytidine
  modified_base 86: mod_base = OTHER; note = 2'-O-Methyl-cytidine
  modified_base 87: mod_base = OTHER; note = 2'-O-Methyl-guanosine
  modified_base 88: mod_base = OTHER; note = 2'-O-Methyl-adenosine
  modified_base 89: mod_base = OTHER; note = 2'-O-Methyl-guanosine
  modified_base 90: mod_base = OTHER; note = 2'-O-Methyl-uridine
  modified_base 91: mod_base = OTHER; note = 2'-O-Methyl-cytidine
  modified_base 92: mod_base = OTHER; note = 2'-O-Methyl-guanosine
  modified_base 93: mod_base = OTHER; note = 2'-O-Methyl-guanosine
  modified_base 94: mod_base = OTHER; note = 2'-O-Methyl-uridine
  modified_base 95: mod_base = OTHER; note = 2'-O-Methyl-guanosine
  modified_base 96: mod_base = OTHER; note = 2'-O-Methyl-cytidine
  modified_base 97: mod_base = OTHER; note = 2'-O-Methyl-uridine phosphorothioate
  modified_base 98: mod_base = OTHER; note = Nebularine - 2'-deoxynebularine phosphorothioate
  modified_base 99: mod_base = OTHER; note = Nebularine - 2'-deoxynebularine phosphorothioate
  modified_base 100: mod_base = OTHER; note = Nebularine - 2'-deoxynebularine
  misc_feature 1..97: note = RNA
  misc_feature 98..100: note = DNA
caggttccatgggatgctctgttttagagctagaaatagcaagttaaaataaggctagtccgttatcaacttgaaaaagtggcaccgagtcggtgctnnn

SEQ ID NO: 2116 - DNA, 100 bp, synthetic construct; identical to SEQ ID NO: 2115
  source 1..100: mol_type = other DNA; note = Description of Artificial Sequence: Synthetic oligonucleotide; note = Description of Combined DNA/RNA Molecule: Synthetic oligonucleotide
  modified_base 1: mod_base = OTHER; note = 2'-O-Methyl-cytidine phosphorothioate
  modified_base 2: mod_base = OTHER; note = 2'-O-Methyl-adenosine phosphorothioate
  modified_base 3: mod_base = OTHER; note = 2'-O-Methyl-guanosine phosphorothioate
  modified_base 21: mod_base = OTHER; note = 2'-O-Methyl-guanosine
  modified_base 28: mod_base = OTHER; note = 2'-O-Methyl-adenosine
  modified_base 29: mod_base = OTHER; note = 2'-O-Methyl-guanosine
  modified_base 30: mod_base = OTHER; note = 2'-O-Methyl-cytidine
  modified_base 31: mod_base = OTHER; note = 2'-O-Methyl-uridine
  modified_base 32: mod_base = OTHER; note = 2'-O-Methyl-adenosine
  modified_base 34: mod_base = OTHER; note = 2'-O-Methyl-adenosine
  modified_base 35: mod_base = OTHER; note = 2'-O-Methyl-adenosine
  modified_base 36: mod_base = OTHER; note = 2'-O-Methyl-adenosine
  modified_base 37: mod_base = OTHER; note = 2'-O-Methyl-uridine
  modified_base 38: mod_base = OTHER; note = 2'-O-Methyl-adenosine
  modified_base 39: mod_base = OTHER; note = 2'-O-Methyl-guanosine
  modified_base 40: mod_base = OTHER; note = 2'-O-Methyl-cytidine
  modified_base 41: mod_base = OTHER; note = 2'-O-Methyl-adenosine
  modified_base 42: mod_base = OTHER; note = 2'-O-Methyl-adenosine
  modified_base 46: mod_base = OTHER; note = 2'-O-Methyl-adenosine
  modified_base 48: mod_base = OTHER; note = 2'-O-Methyl-adenosine
  modified_base 50: mod_base = OTHER; note = 2'-O-Methyl-uridine
  modified_base 52: mod_base = OTHER; note = 2'-O-Methyl-adenosine
  modified_base 53: mod_base = OTHER; note = 2'-O-Methyl-guanosine
  modified_base 54: mod_base = OTHER; note = 2'-O-Methyl-guanosine
  modified_base 57: mod_base = OTHER; note = 2'-O-Methyl-adenosine
  modified_base 61: mod_base = OTHER; note = 2'-O-Methyl-cytidine
  modified_base 66: mod_base = OTHER; note = 2'-O-Methyl-uridine
  modified_base 67: mod_base = OTHER; note = 2'-O-Methyl-cytidine
  modified_base 70: mod_base = OTHER; note = 2'-O-Methyl-cytidine
  modified_base 71: mod_base = OTHER; note = 2'-O-Methyl-uridine
  modified_base 72: mod_base = OTHER; note = 2'-O-Methyl-uridine
  modified_base 74: mod_base = OTHER; note = 2'-O-Methyl-adenosine
  modified_base 75: mod_base = OTHER; note = 2'-O-Methyl-adenosine
  modified_base 76: mod_base = OTHER; note = 2'-O-Methyl-adenosine
  modified_base 77: mod_base = OTHER; note = 2'-O-Methyl-adenosine
  modified_base 78: mod_base = OTHER; note = 2'-O-Methyl-adenosine
  modified_base 79: mod_base = OTHER; note = 2'-O-Methyl-guanosine
  modified_base 80: mod_base = OTHER; note = 2'-O-Methyl-uridine
  modified_base 82: mod_base = OTHER; note = 2'-O-Methyl-guanosine
  modified_base 83: mod_base = OTHER; note = 2'-O-Methyl-cytidine
  modified_base 84: mod_base = OTHER; note = 2'-O-Methyl-adenosine
  modified_base 85: mod_base = OTHER; note = 2'-O-Methyl-cytidine
  modified_base 86: mod_base = OTHER; note = 2'-O-Methyl-cytidine
  modified_base 87: mod_base = OTHER; note = 2'-O-Methyl-guanosine
  modified_base 89: mod_base = OTHER; note = 2'-O-Methyl-guanosine
  modified_base 92: mod_base = OTHER; note = 2'-O-Methyl-guanosine
  modified_base 93: mod_base = OTHER; note = 2'-O-Methyl-guanosine
  modified_base 94: mod_base = OTHER; note = 2'-O-Methyl-uridine
  modified_base 95: mod_base = OTHER; note = 2'-O-Methyl-guanosine
  modified_base 96: mod_base = OTHER; note = 2'-O-Methyl-cytidine
  modified_base 97: mod_base = OTHER; note = 2'-O-Methyl-uridine phosphorothioate
  modified_base 98: mod_base = OTHER; note = Nebularine - 2'-deoxynebularine phosphorothioate
  modified_base 99: mod_base = OTHER; note = Nebularine - 2'-deoxynebularine phosphorothioate
  modified_base 100: mod_base = OTHER; note = Nebularine - 2'-deoxynebularine
  misc_feature 1..97: note = RNA
  misc_feature 98..100: note = DNA

SEQ ID NO: 2117 - DNA, 100 bp, synthetic construct
  source 1..100: mol_type = other DNA; note = Description of Artificial Sequence: Synthetic oligonucleotide; note = Description of Combined DNA/RNA Molecule: Synthetic oligonucleotide
  modified_base 1: mod_base = OTHER; note = 2'-O-Methyl-cytidine phosphorothioate
  modified_base 2: mod_base = OTHER; note = 2'-O-Methyl-adenosine phosphorothioate
  modified_base 3: mod_base = OTHER; note = 2'-O-Methyl-guanosine phosphorothioate
  modified_base 29: mod_base = OTHER; note = 2'-O-Methyl-guanosine
  modified_base 30: mod_base = OTHER; note = 2'-O-Methyl-cytidine
  modified_base 31: mod_base = OTHER; note = 2'-O-Methyl-uridine
  modified_base 32: mod_base = OTHER; note = 2'-O-Methyl-adenosine
  modified_base 33: mod_base = OTHER; note = 2'-O-Methyl-guanosine
  modified_base 34: mod_base = OTHER; note = 2'-O-Methyl-adenosine
  modified_base 35: mod_base = OTHER; note = 2'-O-Methyl-adenosine
  modified_base 36: mod_base = OTHER; note = 2'-O-Methyl-adenosine
  modified_base 37: mod_base = OTHER; note = 2'-O-Methyl-uridine
  modified_base 38: mod_base = OTHER; note = 2'-O-Methyl-adenosine
  modified_base 39: mod_base = OTHER; note = 2'-O-Methyl-guanosine
  modified_base 40: mod_base = OTHER; note = 2'-O-Methyl-cytidine
  modified_base 69: mod_base = OTHER; note = 2'-O-Methyl-adenosine
  modified_base 70: mod_base = OTHER; note = 2'-O-Methyl-cytidine
  modified_base 71: mod_base = OTHER; note = 2'-O-Methyl-uridine
  modified_base 72: mod_base = OTHER; note = 2'-O-Methyl-uridine
  modified_base 73: mod_base = OTHER; note = 2'-O-Methyl-guanosine
  modified_base 74: mod_base = OTHER; note = 2'-O-Methyl-adenosine
  modified_base 75: mod_base = OTHER; note = 2'-O-Methyl-adenosine
  modified_base 76: mod_base = OTHER; note = 2'-O-Methyl-adenosine
  modified_base 77: mod_base = OTHER; note = 2'-O-Methyl-adenosine
  modified_base 78: mod_base = OTHER; note = 2'-O-Methyl-adenosine
  modified_base 79: mod_base = OTHER; note = 2'-O-Methyl-guanosine
  modified_base 80: mod_base = OTHER; note = 2'-O-Methyl-uridine
  modified_base 81: mod_base = OTHER; note = 2'-O-Methyl-guanosine
  modified_base 82: mod_base = OTHER; note = 2'-O-Methyl-guanosine
  modified_base 83: mod_base = OTHER; note = 2'-O-Methyl-cytidine
  modified_base 84: mod_base = OTHER; note = 2'-O-Methyl-adenosine
  modified_base 85: mod_base = OTHER; note = 2'-O-Methyl-cytidine
  modified_base 86: mod_base = OTHER; note = 2'-O-Methyl-cytidine
  modified_base 87: mod_base = OTHER; note = 2'-O-Methyl-guanosine
  modified_base 88: mod_base = OTHER; note = 2'-O-Methyl-adenosine
  modified_base 89: mod_base = OTHER; note = 2'-O-Methyl-guanosine
  modified_base 90: mod_base = OTHER; note = 2'-O-Methyl-uridine
  modified_base 91: mod_base = OTHER; note = 2'-O-Methyl-cytidine
  modified_base 92: mod_base = OTHER; note = 2'-O-Methyl-guanosine
  modified_base 93: mod_base = OTHER; note = 2'-O-Methyl-guanosine
  modified_base 94: mod_base = OTHER; note = 2'-O-Methyl-uridine
  modified_base 95: mod_base = OTHER; note = 2'-O-Methyl-guanosine
  modified_base 96: mod_base = OTHER; note = 2'-O-Methyl-cytidine
  modified_base 97: mod_base = OTHER; note = 2'-O-Methyl-uridine phosphorothioate
  modified_base 98: mod_base = OTHER; note = 2'-O-Methyl-uridine phosphorothioate
  modified_base 99: mod_base = OTHER; note = Nebularine - 2'-deoxynebularine phosphorothioate
  modified_base 100: mod_base = OTHER; note = Nebularine - 2'-deoxynebularine
  misc_feature 1..98: note = RNA
  misc_feature 99..100: note = DNA
caggttccatgggatgctctgttttagagctagaaatagcaagttaaaataaggctagtccgttatcaacttgaaaaagtggcaccgagtcggtgcttnn

SEQ ID NO: 2118 - DNA, 100 bp, synthetic construct; identical to SEQ ID NO: 2117
  source 1..100: mol_type = other DNA; note = Description of Artificial Sequence: Synthetic oligonucleotide; note = Description of Combined DNA/RNA Molecule: Synthetic oligonucleotide
  modified_base 1: mod_base = OTHER; note = 2'-O-Methyl-cytidine phosphorothioate
  modified_base 2: mod_base = OTHER; note = 2'-O-Methyl-adenosine phosphorothioate
  modified_base 3: mod_base = OTHER; note = 2'-O-Methyl-guanosine phosphorothioate
  modified_base 21: mod_base = OTHER; note = 2'-O-Methyl-guanosine
  modified_base 28: mod_base = OTHER; note = 2'-O-Methyl-adenosine
  modified_base 29: mod_base = OTHER; note = 2'-O-Methyl-guanosine
  modified_base 30: mod_base = OTHER; note = 2'-O-Methyl-cytidine
  modified_base 31: mod_base = OTHER; note = 2'-O-Methyl-uridine
  modified_base 32: mod_base = OTHER; note = 2'-O-Methyl-adenosine
  modified_base 34: mod_base = OTHER; note = 2'-O-Methyl-adenosine
  modified_base 35: mod_base = OTHER; note = 2'-O-Methyl-adenosine
  modified_base 36: mod_base = OTHER; note = 2'-O-Methyl-adenosine
  modified_base 37: mod_base = OTHER; note = 2'-O-Methyl-uridine
  modified_base 38: mod_base = OTHER; note = 2'-O-Methyl-adenosine
  modified_base 39: mod_base = OTHER; note = 2'-O-Methyl-guanosine
  modified_base 40: mod_base = OTHER; note = 2'-O-Methyl-cytidine
  modified_base 41: mod_base = OTHER; note = 2'-O-Methyl-adenosine
  modified_base 42: mod_base = OTHER; note = 2'-O-Methyl-adenosine
  modified_base 46: mod_base = OTHER; note = 2'-O-Methyl-adenosine
  modified_base 48: mod_base = OTHER; note = 2'-O-Methyl-adenosine
  modified_base 50: mod_base = OTHER; note = 2'-O-Methyl-uridine
  modified_base 52: mod_base = OTHER; note = 2'-O-Methyl-adenosine
  modified_base 53: mod_base = OTHER; note = 2'-O-Methyl-guanosine
  modified_base 54: mod_base = OTHER; note = 2'-O-Methyl-guanosine
  modified_base 57: mod_base = OTHER; note = 2'-O-Methyl-adenosine
  modified_base 61: mod_base = OTHER; note = 2'-O-Methyl-cytidine
  modified_base 66: mod_base = OTHER; note = 2'-O-Methyl-uridine
  modified_base 67: mod_base = OTHER; note = 2'-O-Methyl-cytidine
  modified_base 70: mod_base = OTHER; note = 2'-O-Methyl-cytidine
  modified_base 71: mod_base = OTHER; note = 2'-O-Methyl-uridine
  modified_base 72: mod_base = OTHER; note = 2'-O-Methyl-uridine
  modified_base 74: mod_base = OTHER; note = 2'-O-Methyl-adenosine
  modified_base 75: mod_base = OTHER; note = 2'-O-Methyl-adenosine
  modified_base 76: mod_base = OTHER; note = 2'-O-Methyl-adenosine
  modified_base 77: mod_base = OTHER; note = 2'-O-Methyl-adenosine
  modified_base 78: mod_base = OTHER; note = 2'-O-Methyl-adenosine
  modified_base 79: mod_base = OTHER; note = 2'-O-Methyl-guanosine
  modified_base 80: mod_base = OTHER; note = 2'-O-Methyl-uridine
  modified_base 82: mod_base = OTHER; note = 2'-O-Methyl-guanosine
  modified_base 83: mod_base = OTHER; note = 2'-O-Methyl-cytidine
  modified_base 84: mod_base = OTHER; note = 2'-O-Methyl-adenosine
  modified_base 85: mod_base = OTHER; note = 2'-O-Methyl-cytidine
  modified_base 86: mod_base = OTHER; note = 2'-O-Methyl-cytidine
  modified_base 87: mod_base = OTHER; note = 2'-O-Methyl-guanosine
  modified_base 89: mod_base = OTHER; note = 2'-O-Methyl-guanosine
  modified_base 92: mod_base = OTHER; note = 2'-O-Methyl-guanosine
  modified_base 93: mod_base = OTHER; note = 2'-O-Methyl-guanosine
  modified_base 94: mod_base = OTHER; note = 2'-O-Methyl-uridine
  modified_base 95: mod_base = OTHER; note = 2'-O-Methyl-guanosine
  modified_base 96: mod_base = OTHER; note = 2'-O-Methyl-cytidine
  modified_base 97: mod_base = OTHER; note = 2'-O-Methyl-uridine phosphorothioate
  modified_base 98: mod_base = OTHER; note = 2'-O-Methyl-uridine phosphorothioate
  modified_base 99: mod_base = OTHER; note = Nebularine - 2'-deoxynebularine phosphorothioate
  modified_base 100: mod_base = OTHER; note = Nebularine - 2'-deoxynebularine
  misc_feature 1..98: note = RNA
  misc_feature 99..100: note = DNA

SEQ ID NO: 2119 - DNA, 100 bp, synthetic construct
  source 1..100: mol_type = other DNA; note = Description of Artificial Sequence: Synthetic oligonucleotide; note = Description of Combined DNA/RNA Molecule: Synthetic oligonucleotide
  modified_base 1: mod_base = OTHER; note = 2'-O-Methyl-cytidine phosphorothioate
  modified_base 2: mod_base = OTHER; note = 2'-O-Methyl-adenosine phosphorothioate
  modified_base 3: mod_base = OTHER; note = 2'-O-Methyl-guanosine phosphorothioate
  modified_base 29: mod_base = OTHER; note = 2'-O-Methyl-guanosine
  modified_base 30: mod_base = OTHER; note = 2'-O-Methyl-cytidine
  modified_base 31: mod_base = OTHER; note = 2'-O-Methyl-uridine
  modified_base 32: mod_base = OTHER; note = 2'-O-Methyl-adenosine
  modified_base 33: mod_base = OTHER; note = 2'-O-Methyl-guanosine
  modified_base 34: mod_base = OTHER; note = 2'-O-Methyl-adenosine
  modified_base 35: mod_base = OTHER; note = 2'-O-Methyl-adenosine
  modified_base 36: mod_base = OTHER; note = 2'-O-Methyl-adenosine
  modified_base 37: mod_base = OTHER; note = 2'-O-Methyl-uridine
  modified_base 38: mod_base = OTHER; note = 2'-O-Methyl-adenosine
  modified_base 39: mod_base = OTHER; note = 2'-O-Methyl-guanosine
  modified_base 40: mod_base = OTHER; note = 2'-O-Methyl-cytidine
  modified_base 69: mod_base = OTHER; note = 2'-O-Methyl-adenosine
  modified_base 70: mod_base = OTHER; note = 2'-O-Methyl-cytidine
  modified_base 71: mod_base = OTHER; note = 2'-O-Methyl-uridine
  modified_base 72: mod_base = OTHER; note = 2'-O-Methyl-uridine
  modified_base 73: mod_base = OTHER; note = 2'-O-Methyl-guanosine
  modified_base 74: mod_base = OTHER; note = 2'-O-Methyl-adenosine
  modified_base 75: mod_base = OTHER; note = 2'-O-Methyl-adenosine
  modified_base 76: mod_base = OTHER; note = 2'-O-Methyl-adenosine
  modified_base 77: mod_base = OTHER; note = 2'-O-Methyl-adenosine
  modified_base 78: mod_base = OTHER; note = 2'-O-Methyl-adenosine
  modified_base 79: mod_base = OTHER; note = 2'-O-Methyl-guanosine
  modified_base 80: mod_base = OTHER; note = 2'-O-Methyl-uridine
  modified_base 81: mod_base = OTHER; note = 2'-O-Methyl-guanosine
  modified_base 82: mod_base = OTHER; note = 2'-O-Methyl-guanosine
  modified_base 83: mod_base = OTHER; note = 2'-O-Methyl-cytidine
  modified_base 84: mod_base = OTHER; note = 2'-O-Methyl-adenosine
  modified_base 85: mod_base = OTHER; note = 2'-O-Methyl-cytidine
  modified_base 86: mod_base = OTHER; note = 2'-O-Methyl-cytidine
  modified_base 87: mod_base = OTHER; note = 2'-O-Methyl-guanosine
  modified_base 88: mod_base = OTHER; note = 2'-O-Methyl-adenosine
  modified_base 89: mod_base = OTHER; note = 2'-O-Methyl-guanosine
  modified_base 90: mod_base = OTHER; note = 2'-O-Methyl-uridine
  modified_base 91: mod_base = OTHER; note = 2'-O-Methyl-cytidine
  modified_base 92: mod_base = OTHER; note = 2'-O-Methyl-guanosine
  modified_base 93: mod_base = OTHER; note = 2'-O-Methyl-guanosine
  modified_base 94: mod_base = OTHER; note = 2'-O-Methyl-uridine
  modified_base 95: mod_base = OTHER; note = 2'-O-Methyl-guanosine
  modified_base 96: mod_base = OTHER; note = 2'-O-Methyl-cytidine
  modified_base 97: mod_base = OTHER; note = 2'-O-Methyl-uridine phosphorothioate
  modified_base 98: mod_base = OTHER; note = 2'-O-Methyl-uridine phosphorothioate
  modified_base 99: mod_base = OTHER; note = 2'-O-Methyl-uridine phosphorothioate
  modified_base 100: mod_base = OTHER; note = Nebularine - 2'-deoxynebularine
  misc_feature 1..99: note = RNA
  misc_feature 100: note = DNA
caggttccatgggatgctctgttttagagctagaaatagcaagttaaaataaggctagtccgttatcaacttgaaaaagtggcaccgagtcggtgctttn

SEQ ID NO: 2120 - DNA, 100 bp, synthetic construct; identical to SEQ ID NO: 2119
  source 1..100: mol_type = other DNA; note = Description of Artificial Sequence: Synthetic oligonucleotide; note = Description of Combined DNA/RNA Molecule: Synthetic oligonucleotide
  modified_base 1: mod_base = OTHER; note = 2'-O-Methyl-cytidine phosphorothioate
  modified_base 2: mod_base = OTHER; note = 2'-O-Methyl-adenosine phosphorothioate
  modified_base 3: mod_base = OTHER; note = 2'-O-Methyl-guanosine phosphorothioate
  modified_base 21: mod_base = OTHER; note = 2'-O-Methyl-guanosine
  modified_base 28: mod_base = OTHER; note = 2'-O-Methyl-adenosine
  modified_base 29: mod_base = OTHER; note = 2'-O-Methyl-guanosine
  modified_base 30: mod_base = OTHER; note = 2'-O-Methyl-cytidine
  modified_base 31: mod_base = OTHER; note = 2'-O-Methyl-uridine
  modified_base 32: mod_base = OTHER; note = 2'-O-Methyl-adenosine
  modified_base 34: mod_base = OTHER; note = 2'-O-Methyl-adenosine
  modified_base 35: mod_base = OTHER; note = 2'-O-Methyl-adenosine
  modified_base 36: mod_base = OTHER; note = 2'-O-Methyl-adenosine
  modified_base 37: mod_base = OTHER; note = 2'-O-Methyl-uridine
  modified_base 38: mod_base = OTHER; note = 2'-O-Methyl-adenosine
  modified_base 39: mod_base = OTHER; note = 2'-O-Methyl-guanosine
  modified_base 40: mod_base = OTHER; note = 2'-O-Methyl-cytidine
  modified_base 41: mod_base = OTHER; note = 2'-O-Methyl-adenosine
  modified_base 42: mod_base = OTHER; note = 2'-O-Methyl-adenosine
  modified_base 46: mod_base = OTHER; note = 2'-O-Methyl-adenosine
  modified_base 48: mod_base = OTHER; note = 2'-O-Methyl-adenosine
  modified_base 50: mod_base = OTHER; note = 2'-O-Methyl-uridine
  modified_base 52: mod_base = OTHER; note = 2'-O-Methyl-adenosine
  modified_base 53: mod_base = OTHER; note = 2'-O-Methyl-guanosine
  modified_base 54: mod_base = OTHER; note = 2'-O-Methyl-guanosine
  modified_base 57: mod_base = OTHER; note = 2'-O-Methyl-adenosine
  modified_base 61: mod_base = OTHER; note = 2'-O-Methyl-cytidine
  modified_base 66: mod_base = OTHER; note = 2'-O-Methyl-uridine
  modified_base 67: mod_base = OTHER; note = 2'-O-Methyl-cytidine
  modified_base 70: mod_base = OTHER; note = 2'-O-Methyl-cytidine
  modified_base 71: mod_base = OTHER; note = 2'-O-Methyl-uridine
  modified_base 72: mod_base = OTHER; note = 2'-O-Methyl-uridine
  modified_base 74: mod_base = OTHER; note = 2'-O-Methyl-adenosine
  modified_base 75: mod_base = OTHER; note = 2'-O-Methyl-adenosine
  modified_base 76: mod_base = OTHER; note = 2'-O-Methyl-adenosine
  modified_base 77: mod_base = OTHER; note = 2'-O-Methyl-adenosine
  modified_base 78: mod_base = OTHER; note = 2'-O-Methyl-adenosine
  modified_base 79: mod_base = OTHER; note = 2'-O-Methyl-guanosine
  modified_base 80: mod_base = OTHER; note = 2'-O-Methyl-uridine
  modified_base 82: mod_base = OTHER; note = 2'-O-Methyl-guanosine
  modified_base 83: mod_base = OTHER; note = 2'-O-Methyl-cytidine
  modified_base 84: mod_base = OTHER; note = 2'-O-Methyl-adenosine
  modified_base 85: mod_base = OTHER; note = 2'-O-Methyl-cytidine
  modified_base 86: mod_base = OTHER; note = 2'-O-Methyl-cytidine
  modified_base 87: mod_base = OTHER; note = 2'-O-Methyl-guanosine
  modified_base 89: mod_base = OTHER; note = 2'-O-Methyl-guanosine
  modified_base 92: mod_base = OTHER; note = 2'-O-Methyl-guanosine
  modified_base 93: mod_base = OTHER; note = 2'-O-Methyl-guanosine
  modified_base 94: mod_base = OTHER; note = 2'-O-Methyl-uridine
  modified_base 95: mod_base = OTHER; note = 2'-O-Methyl-guanosine
  modified_base 96: mod_base = OTHER; note = 2'-O-Methyl-cytidine
  modified_base 97: mod_base = OTHER; note = 2'-O-Methyl-uridine phosphorothioate
  modified_base 98: mod_base = OTHER; note = 2'-O-Methyl-uridine phosphorothioate
  modified_base 99: mod_base = OTHER; note = 2'-O-Methyl-uridine phosphorothioate
  modified_base 100: mod_base = OTHER; note = Nebularine - 2'-deoxynebularine
  misc_feature 1..99: note = RNA
  misc_feature 100: note = DNA

SEQ ID NO: 2121 - DNA, 103 bp, synthetic construct
  source 1..103: mol_type = other DNA; note = Description of Artificial Sequence: Synthetic oligonucleotide; note = Description of Combined DNA/RNA Molecule: Synthetic oligonucleotide
  modified_base 1: mod_base = OTHER; note = 2'-O-Methyl-cytidine phosphorothioate
  modified_base 2: mod_base = OTHER; note = 2'-O-Methyl-adenosine phosphorothioate
  modified_base 3: mod_base = OTHER; note = 2'-O-Methyl-guanosine phosphorothioate
  modified_base 29: mod_base = OTHER; note = 2'-O-Methyl-guanosine
  modified_base 30: mod_base = OTHER; note = 2'-O-Methyl-cytidine
  modified_base 31: mod_base = OTHER; note = 2'-O-Methyl-uridine
  modified_base 32: mod_base = OTHER; note = 2'-O-Methyl-adenosine
  modified_base 33: mod_base = OTHER; note = 2'-O-Methyl-guanosine
  modified_base 34: mod_base = OTHER; note = 2'-O-Methyl-adenosine
  modified_base 35: mod_base = OTHER; note = 2'-O-Methyl-adenosine
  modified_base 36: mod_base = OTHER; note = 2'-O-Methyl-adenosine
  modified_base 37: mod_base = OTHER; note = 2'-O-Methyl-uridine
  modified_base 38: mod_base = OTHER; note = 2'-O-Methyl-adenosine
  modified_base 39: mod_base = OTHER; note = 2'-O-Methyl-guanosine
  modified_base 40: mod_base = OTHER; note = 2'-O-Methyl-cytidine
  modified_base 69: mod_base = OTHER; note = 2'-O-Methyl-adenosine
  modified_base 70: mod_base = OTHER; note = 2'-O-Methyl-cytidine
  modified_base 71: mod_base = OTHER; note = 2'-O-Methyl-uridine
  modified_base 72: mod_base = OTHER; note = 2'-O-Methyl-uridine
  modified_base 73: mod_base = OTHER; note = 2'-O-Methyl-guanosine
  modified_base 74: mod_base = OTHER; note = 2'-O-Methyl-adenosine
  modified_base 75: mod_base = OTHER; note = 2'-O-Methyl-adenosine
  modified_base 76: mod_base = OTHER; note = 2'-O-Methyl-adenosine
  modified_base 77: mod_base = OTHER; note = 2'-O-Methyl-adenosine
  modified_base 78: mod_base = OTHER; note = 2'-O-Methyl-adenosine
  modified_base 79: mod_base = OTHER; note = 2'-O-Methyl-guanosine
  modified_base 80: mod_base = OTHER; note = 2'-O-Methyl-uridine
  modified_base 81: mod_base = OTHER; note = 2'-O-Methyl-guanosine
  modified_base 82: mod_base = OTHER; note = 2'-O-Methyl-guanosine
  modified_base 83: mod_base = OTHER; note = 2'-O-Methyl-cytidine
  modified_base 84: mod_base = OTHER; note = 2'-O-Methyl-adenosine
  modified_base 85: mod_base = OTHER; note = 2'-O-Methyl-cytidine
  modified_base 86: mod_base = OTHER; note = 2'-O-Methyl-cytidine
  modified_base 87: mod_base = OTHER; note = 2'-O-Methyl-guanosine
  modified_base 88: mod_base = OTHER; note = 2'-O-Methyl-adenosine
  modified_base 89: mod_base = OTHER; note = 2'-O-Methyl-guanosine
  modified_base 90: mod_base = OTHER; note = 2'-O-Methyl-uridine
  modified_base 91: mod_base = OTHER; note = 2'-O-Methyl-cytidine
  modified_base 92: mod_base = OTHER; note = 2'-O-Methyl-guanosine
  modified_base 93: mod_base = OTHER; note = 2'-O-Methyl-guanosine
  modified_base 94: mod_base = OTHER; note = 2'-O-Methyl-uridine
  modified_base 95: mod_base = OTHER; note = 2'-O-Methyl-guanosine
  modified_base 96: mod_base = OTHER; note = 2'-O-Methyl-cytidine
  modified_base 97: mod_base = OTHER; note = 2'-O-Methyl-uridine phosphorothioate
  modified_base 98: mod_base = OTHER; note = 2'-O-Methyl-uridine phosphorothioate
  modified_base 99: mod_base = OTHER; note = 2'-O-Methyl-uridine phosphorothioate
  modified_base 100: mod_base = OTHER; note = 2'-O-Methyl-uridine
  modified_base 101: mod_base = OTHER; note = Nebularine - 2'-deoxynebularine
  modified_base 102: mod_base = OTHER; note = Nebularine - 2'-deoxynebularine
  modified_base 103: mod_base = OTHER; note = Nebularine - 2'-deoxynebularine
  misc_feature 1..100: note = RNA
  misc_feature 101..103: note = DNA
caggttccatgggatgctctgttttagagctagaaatagcaagttaaaataaggctagtccgttatcaacttgaaaaagtggcaccgagtcggtgcttttnnn

SEQ ID NO: 2122 - RNA, 100 nt, synthetic construct; identical to SEQ ID NO: 287
  source 1..100: mol_type = other RNA; note = Description of Artificial Sequence: Synthetic polynucleotide
  modified_base 1: mod_base = OTHER; note = 2'-O-Methyl-guanosine phosphorothioate
  modified_base 2: mod_base = OTHER; note = 2'-O-Methyl-cytidine phosphorothioate
  modified_base 3: mod_base = OTHER; note = 2'-O-Methyl-cytidine phosphorothioate
  modified_base 21: mod_base = OTHER; note = 2'-O-Methyl-guanosine
  modified_base 28: mod_base = OTHER; note = 2'-O-Methyl-adenosine
  modified_base 29: mod_base = OTHER; note = 2'-O-Methyl-guanosine
  modified_base 30: mod_base = OTHER; note = 2'-O-Methyl-cytidine
  modified_base 31: mod_base = OTHER; note = 2'-O-Methyl-uridine
  modified_base 32: mod_base = OTHER; note = 2'-O-Methyl-adenosine
  modified_base 33: mod_base = OTHER; note = 2'-O-Methyl-guanosine
  modified_base 34: mod_base = OTHER; note = 2'-O-Methyl-adenosine
  modified_base 35: mod_base = OTHER; note = 2'-O-Methyl-adenosine
  modified_base 36: mod_base = OTHER; note = 2'-O-Methyl-adenosine
  modified_base 37: mod_base = OTHER; note = 2'-O-Methyl-uridine
  modified_base 38: mod_base = OTHER; note = 2'-O-Methyl-adenosine
  modified_base 39: mod_base = OTHER; note = 2'-O-Methyl-guanosine
  modified_base 40: mod_base = OTHER; note = 2'-O-Methyl-cytidine
  modified_base 41: mod_base = OTHER; note = 2'-O-Methyl-adenosine
  modified_base 42: mod_base = OTHER; note = 2'-O-Methyl-adenosine
  modified_base 45: mod_base = OTHER; note = uridine phosphorothioate
  modified_base 46: mod_base = OTHER; note = 2'-O-Methyl-adenosine
  modified_base 48: mod_base = OTHER; note = 2'-O-Methyl-adenosine
  modified_base 50: mod_base = OTHER; note = 2'-O-Methyl-uridine
  modified_base 52: mod_base = OTHER; note = 2'-O-Methyl-adenosine
  modified_base 53: mod_base = OTHER; note = 2'-O-Methyl-guanosine
  modified_base 54: mod_base = OTHER; note = 2'-O-Methyl-guanosine
  modified_base 55: mod_base = OTHER; note = 2'-O-Methyl-cytidine
  modified_base 56: mod_base = OTHER; note = 2'-O-Methyl-uridine
  modified_base 57: mod_base = OTHER; note = 2'-O-Methyl-adenosine
  modified_base 60: mod_base = OTHER; note = 2'-O-Methyl-cytidine
  modified_base 61: mod_base = OTHER; note = 2'-O-Methyl-cytidine
  modified_base 64: mod_base = OTHER; note = uridine phosphorothioate
  modified_base 66: mod_base = OTHER; note = 2'-O-Methyl-uridine
  modified_base 67: mod_base = OTHER; note = 2'-O-Methyl-cytidine
  modified_base 70: mod_base = OTHER; note = 2'-O-Methyl-cytidine
  modified_base 71: mod_base = OTHER; note = 2'-O-Methyl-uridine
  modified_base 72: mod_base = OTHER; note = 2'-O-Methyl-uridine
  modified_base 73: mod_base = OTHER; note = 2'-O-Methyl-guanosine
  modified_base 74: mod_base = OTHER; note = 2'-O-Methyl-adenosine
  modified_base 75: mod_base = OTHER; note = 2'-O-Methyl-adenosine
  modified_base 76: mod_base = OTHER; note = 2'-O-Methyl-adenosine
  modified_base 77: mod_base = OTHER; note = 2'-O-Methyl-adenosine
  modified_base 78: mod_base = OTHER; note = 2'-O-Methyl-adenosine
  modified_base 79: mod_base = OTHER; note = 2'-O-Methyl-guanosine
  modified_base 80: mod_base = OTHER; note = 2'-O-Methyl-uridine
  modified_base 81: mod_base = OTHER; note = 2'-O-Methyl-guanosine
  modified_base 83: mod_base = OTHER; note = 2'-O-Methyl-cytidine
  modified_base 84: mod_base = OTHER; note = 2'-O-Methyl-adenosine
  modified_base 85: mod_base = OTHER; note = 2'-O-Methyl-cytidine
  modified_base 86: mod_base = OTHER; note = 2'-O-Methyl-cytidine
  modified_base 87: mod_base = OTHER; note = 2'-O-Methyl-guanosine
  modified_base 88: mod_base = OTHER; note = 2'-O-Methyl-adenosine
  modified_base 89: mod_base = OTHER; note = 2'-O-Methyl-guanosine
  modified_base 90: mod_base = OTHER; note = 2'-O-Methyl-uridine
  modified_base 91: mod_base = OTHER; note = 2'-O-Methyl-cytidine
  modified_base 92: mod_base = OTHER; note = 2'-O-Methyl-guanosine
  modified_base 93: mod_base = OTHER; note = 2'-O-Methyl-guanosine
  modified_base 94: mod_base = OTHER; note = 2'-O-Methyl-uridine
  modified_base 95: mod_base = OTHER; note = 2'-O-Methyl-guanosine
  modified_base 96: mod_base = OTHER; note = 2'-O-Methyl-cytidine
  modified_base 97: mod_base = OTHER; note = 2'-O-Methyl-uridine phosphorothioate
  modified_base 98: mod_base = OTHER; note = 2'-O-Methyl-uridine phosphorothioate
  modified_base 99: mod_base = OTHER; note = 2'-O-Methyl-uridine phosphorothioate
  modified_base 100: mod_base = OTHER; note = 2'-O-Methyl-uridine

SEQ ID NO: 2123 - RNA, 100 nt, synthetic construct
  source 1..100: mol_type = other RNA; note = Description of Artificial Sequence: Synthetic polynucleotide
  modified_base 1: mod_base = OTHER; note = 2'-O-Methyl-guanosine phosphorothioate
  modified_base 2: mod_base = OTHER; note = 2'-O-Methyl-cytidine phosphorothioate
  modified_base 3: mod_base = OTHER; note = 2'-O-Methyl-adenosine phosphorothioate
  modified_base 97: mod_base = OTHER; note = uridine phosphorothioate
  modified_base 98: mod_base = OTHER; note = 2'-O-Methyl-uridine phosphorothioate
  modified_base 99: mod_base = OTHER; note = 2'-O-Methyl-uridine phosphorothioate
  modified_base 100: mod_base = OTHER; note = 2'-O-Methyl-uridine
gcaaatcttgattttggctcgttttagagctagaaatagcaagttaaaataaggctagtccgttatcaacttgaaaaagtggcaccgagtcggtgctttt

SEQ ID NO: 2124 - RNA, 100 nt, synthetic construct
  source 1..100: mol_type = other RNA; note = Description of Artificial Sequence: Synthetic polynucleotide
  modified_base 1: mod_base = OTHER; note = 2'-O-Methyl-guanosine phosphorothioate
  modified_base 2: mod_base = OTHER; note = 2'-O-Methyl-adenosine phosphorothioate
  modified_base 3: mod_base = OTHER; note = 2'-O-Methyl-uridine phosphorothioate
  modified_base 97: mod_base = OTHER; note = uridine phosphorothioate
  modified_base 98: mod_base = OTHER; note = 2'-O-Methyl-uridine phosphorothioate
  modified_base 99: mod_base = OTHER; note = 2'-O-Methyl-uridine phosphorothioate
  modified_base 100: mod_base = OTHER; note = 2'-O-Methyl-uridine
gatgtaaaaattttagccaagttttagagctagaaatagcaagttaaaataaggctagtccgttatcaacttgaaaaagtggcaccgagtcggtgctttt

SEQ ID NO: 2125 - RNA, 100 nt, synthetic construct
  source 1..100: mol_type = other RNA; note = Description of Artificial Sequence: Synthetic polynucleotide
  modified_base 1: mod_base = OTHER; note = 2'-O-Methyl-adenosine phosphorothioate
  modified_base 2: mod_base = OTHER; note = 2'-O-Methyl-uridine phosphorothioate
  modified_base 3: mod_base = OTHER; note = 2'-O-Methyl-guanosine phosphorothioate
  modified_base 97: mod_base = OTHER; note = uridine phosphorothioate
  modified_base 98: mod_base = OTHER; note = 2'-O-Methyl-uridine phosphorothioate
  modified_base 99: mod_base = OTHER; note = 2'-O-Methyl-uridine phosphorothioate
  modified_base 100: mod_base = OTHER; note = 2'-O-Methyl-uridine
atgaaaaacttgagagttgcgttttagagctagaaatagcaagttaaaataaggctagtccgttatcaacttgaaaaagtggcaccgagtcggtgctttt

SEQ ID NO: 2126 - RNA, 100 nt, synthetic construct
  source 1..100: mol_type = other RNA; note = Description of Artificial Sequence: Synthetic polynucleotide
  modified_base 1: mod_base = OTHER; note = 2'-O-Methyl-adenosine phosphorothioate
  modified_base 2: mod_base = OTHER; note = 2'-O-Methyl-cytidine phosphorothioate
  modified_base 3: mod_base = OTHER; note = 2'-O-Methyl-uridine phosphorothioate
  modified_base 97: mod_base = OTHER; note = uridine phosphorothioate
  modified_base 98: mod_base = OTHER; note = 2'-O-Methyl-uridine phosphorothioate
  modified_base 99: mod_base = OTHER; note = 2'-O-Methyl-uridine phosphorothioate
  modified_base 100: mod_base = OTHER; note = 2'-O-Methyl-uridine
acttgggatcacaaagcaaagttttagagctagaaatagcaagttaaaataaggctagtccgttatcaacttgaaaaagtggcaccgagtcggtgctttt

SEQ ID NO: 2127 - RNA, 100 nt, synthetic construct
  source 1..100: mol_type = other RNA; note = Description of Artificial Sequence: Synthetic polynucleotide
  modified_base 1: mod_base = OTHER; note = 2'-O-Methyl-adenosine phosphorothioate
  modified_base 2: mod_base = OTHER; note = 2'-O-Methyl-adenosine phosphorothioate
  modified_base 3: mod_base = OTHER; note = 2'-O-Methyl-guanosine phosphorothioate
  modified_base 97: mod_base = OTHER; note = uridine phosphorothioate
  modified_base 98: mod_base = OTHER; note = 2'-O-Methyl-uridine phosphorothioate
  modified_base 99: mod_base = OTHER; note = 2'-O-Methyl-uridine phosphorothioate
  modified_base 100: mod_base = OTHER; note = 2'-O-Methyl-uridine
aagatttggtgttttctactgttttagagctagaaatagcaagttaaaataaggctagtccgttatcaacttgaaaaagtggcaccgagtcggtgctttt

SEQ ID NO: 2128 - RNA, 100 nt, synthetic construct
  source 1..100: mol_type = other RNA; note = Description of Artificial Sequence: Synthetic polynucleotide
  modified_base 1: mod_base = OTHER; note = 2'-O-Methyl-adenosine phosphorothioate
  modified_base 2: mod_base = OTHER; note = 2'-O-Methyl-adenosine phosphorothioate
  modified_base 3: mod_base = OTHER; note = 2'-O-Methyl-guanosine phosphorothioate
  modified_base 97: mod_base = OTHER; note = uridine phosphorothioate
  modified_base 98: mod_base = OTHER; note = 2'-O-Methyl-uridine phosphorothioate
  modified_base 99: mod_base = OTHER; note = 2'-O-Methyl-uridine phosphorothioate
  modified_base 100: mod_base = OTHER; note = 2'-O-Methyl-uridine
aaggagtacccggggctgcagttttagagctagaaatagcaagttaaaataaggctagtccgttatcaacttgaaaaagtggcaccgagtcggtgctttt

SEQ ID NO: 2129 - RNA, 100 nt, synthetic construct
  source 1..100: mol_type = other RNA; note = Description of Artificial Sequence: Synthetic polynucleotide
  modified_base 1: mod_base = OTHER; note = 2'-O-Methyl-cytidine phosphorothioate
  modified_base 2: mod_base = OTHER; note = 2'-O-Methyl-adenosine phosphorothioate
  modified_base 3: mod_base = OTHER; note = 2'-O-Methyl-guanosine phosphorothioate
  modified_base 97: mod_base = OTHER; note = uridine phosphorothioate
  modified_base 98: mod_base = OTHER; note = 2'-O-Methyl-uridine phosphorothioate
  modified_base 99: mod_base = OTHER; note = 2'-O-Methyl-uridine phosphorothioate
  modified_base 100: mod_base = OTHER; note = 2'-O-Methyl-uridine
cagaggccaggagcgccagggttttagagctagaaatagcaagttaaaataaggctagtccgttatcaacttgaaaaagtggcaccgagtcggtgctttt

SEQ ID NO: 2130 - RNA, 100 nt, synthetic construct
  source 1..100: mol_type = other RNA; note = Description of Artificial Sequence: Synthetic polynucleotide
  modified_base 1: mod_base = OTHER; note = 2'-O-Methyl-adenosine phosphorothioate
  modified_base 2: mod_base = OTHER; note = 2'-O-Methyl-guanosine phosphorothioate
  modified_base 3: mod_base = OTHER; note = 2'-O-Methyl-adenosine phosphorothioate
  modified_base 97: mod_base = OTHER; note = uridine phosphorothioate
  modified_base 98: mod_base = OTHER; note = 2'-O-Methyl-uridine phosphorothioate
  modified_base 99: mod_base = OTHER; note = 2'-O-Methyl-uridine phosphorothioate
  modified_base 100: mod_base = OTHER; note = 2'-O-Methyl-uridine
agaggccaggagcgccaggagttttagagctagaaatagcaagttaaaataaggctagtccgttatcaacttgaaaaagtggcaccgagtcggtgctttt

SEQ ID NO: 2131 - RNA, 100 nt, synthetic construct
  source 1..100: mol_type = other RNA; note = Description of Artificial Sequence: Synthetic polynucleotide
  modified_base 1: mod_base = OTHER; note = 2'-O-Methyl-cytidine phosphorothioate
  modified_base 2: mod_base = OTHER; note = 2'-O-Methyl-uridine phosphorothioate
  modified_base 3: mod_base = OTHER; note = 2'-O-Methyl-cytidine phosphorothioate
  modified_base 97: mod_base = OTHER; note = uridine phosphorothioate
  modified_base 98: mod_base = OTHER; note = 2'-O-Methyl-uridine phosphorothioate
  modified_base 99: mod_base = OTHER; note = 2'-O-Methyl-uridine phosphorothioate
  modified_base 100: mod_base = OTHER; note = 2'-O-Methyl-uridine
ctcggcctctgaagctcctggttttagagctagaaatagcaagttaaaataaggctagtccgttatcaacttgaaaaagtggcaccgagtcggtgctttt

SEQ ID NO: 2132 - DNA, 100 bp, synthetic construct
  source 1..100: mol_type = other DNA; note = Description of Artificial Sequence: Synthetic oligonucleotide; note = Description of Combined DNA/RNA Molecule: Synthetic oligonucleotide
  modified_base 1: mod_base = OTHER; note = 2'-O-Methyl-cytidine phosphorothioate
  modified_base 2: mod_base = OTHER; note = 2'-O-Methyl-adenosine phosphorothioate
  modified_base 3: mod_base = OTHER; note = 2'-O-Methyl-guanosine phosphorothioate
  modified_base 21: mod_base = OTHER; note = 2'-O-Methyl-guanosine
  modified_base 28: mod_base = OTHER; note = 2'-O-Methyl-adenosine
  modified_base 29: mod_base = OTHER; note = 2'-O-Methyl-guanosine
  modified_base 30: mod_base = OTHER; note = 2'-O-Methyl-cytidine
  modified_base 31: mod_base = OTHER; note = 2'-O-Methyl-uridine
  modified_base 32: mod_base = OTHER; note = 2'-O-Methyl-adenosine
  modified_base 33: mod_base = OTHER; note = 2'-O-Methyl-guanosine
  modified_base 34: mod_base = OTHER; note = 2'-O-Methyl-adenosine
  modified_base 35: mod_base = OTHER; note = 2'-O-Methyl-adenosine
  modified_base 36: mod_base = OTHER; note = 2'-O-Methyl-adenosine
  modified_base 37: mod_base = OTHER; note = 2'-O-Methyl-uridine
  modified_base 38: mod_base = OTHER; note = 2'-O-Methyl-adenosine
  modified_base 39: mod_base = OTHER; note = 2'-O-Methyl-guanosine
  modified_base 40: mod_base = OTHER; note = 2'-O-Methyl-cytidine
  modified_base 41: mod_base = OTHER; note = 2'-O-Methyl-adenosine
  modified_base 42: mod_base = OTHER; note = 2'-O-Methyl-adenosine
  modified_base 46: mod_base = OTHER; note = 2'-O-Methyl-adenosine
  modified_base 48: mod_base = OTHER; note = 2'-O-Methyl-adenosine
  modified_base 50: mod_base = OTHER; note = 2'-O-Methyl-uridine
  modified_base 52: mod_base = OTHER; note = 2'-O-Methyl-adenosine
  modified_base 53: mod_base = OTHER; note = 2'-O-Methyl-guanosine
  modified_base 54: mod_base = OTHER; note = 2'-O-Methyl-guanosine
  modified_base 55: mod_base = OTHER; note = 2'-O-Methyl-cytidine
  modified_base 56: mod_base = OTHER; note = 2'-O-Methyl-uridine
  modified_base 57: mod_base = OTHER; note = 2'-O-Methyl-adenosine
  modified_base 60: mod_base = OTHER; note = 2'-O-Methyl-cytidine
  modified_base 61: mod_base = OTHER; note = 2'-O-Methyl-cytidine
  modified_base 66: mod_base = OTHER; note = 2'-O-Methyl-uridine
  modified_base 67: mod_base = OTHER; note = 2'-O-Methyl-cytidine
  modified_base 70: mod_base = OTHER; note = 2'-O-Methyl-cytidine
  modified_base 71: mod_base = OTHER; note = 2'-O-Methyl-uridine
  modified_base 72: mod_base = OTHER; note = 2'-O-Methyl-uridine
  modified_base 73: mod_base = OTHER; note = 2'-O-Methyl-guanosine
  modified_base 74: mod_base = OTHER; note = 2'-O-Methyl-adenosine
  modified_base 75: mod_base = OTHER; note = 2'-O-Methyl-adenosine
  modified_base 76: mod_base = OTHER; note = 2'-O-Methyl-adenosine
  modified_base 77: mod_base = OTHER; note = 2'-O-Methyl-adenosine
  modified_base 78: mod_base = OTHER; note = 2'-O-Methyl-adenosine
  modified_base 79: mod_base = OTHER; note = 2'-O-Methyl-guanosine
  modified_base 80: mod_base = OTHER; note = 2'-O-Methyl-uridine
  modified_base 81: mod_base = OTHER; note = 2'-O-Methyl-guanosine
  modified_base 83: mod_base = OTHER; note = 2'-O-Methyl-cytidine
  modified_base 84: mod_base = OTHER; note = 2'-O-Methyl-adenosine
  modified_base 85: mod_base = OTHER; note = 2'-O-Methyl-cytidine
  modified_base 86: mod_base = OTHER; note = 2'-O-Methyl-cytidine
  modified_base 87: mod_base = OTHER; note = 2'-O-Methyl-guanosine
  modified_base 88: mod_base = OTHER; note = 2'-O-Methyl-adenosine
  modified_base 89: mod_base = OTHER; note = 2'-O-Methyl-guanosine
  modified_base 90: mod_base = OTHER; note = 2'-O-Methyl-uridine
  modified_base 91: mod_base = OTHER; note = 2'-O-Methyl-cytidine
  modified_base 92: mod_base = OTHER; note = 2'-O-Methyl-guanosine
  modified_base 93: mod_base = OTHER; note = 2'-O-Methyl-guanosine
  modified_base 94: mod_base = OTHER; note = 2'-O-Methyl-uridine
  modified_base 95: mod_base = OTHER; note = 2'-O-Methyl-guanosine
  modified_base 96: mod_base = OTHER; note = 2'-O-Methyl-cytidine
  modified_base 97: mod_base = OTHER; note = 2'-O-Methyl-uridine phosphorothioate
  modified_base 98: mod_base = OTHER; note = 2'-O-Methyl-uridine phosphorothioate
  modified_base 99: mod_base = OTHER; note = 2'-O-Methyl-uridine phosphorothioate
  modified_base 100: mod_base = OTHER; note = 2'-O-Methyl-uridine
  misc_feature 1..4: note = RNA
  misc_feature 5: note = DNA
  misc_feature 6: note = RNA
  misc_feature 7: note = DNA
  misc_feature 8: note = RNA
  misc_feature 9: note = DNA
  misc_feature 10: note = RNA
  misc_feature 11: note = DNA
  misc_feature 12: note = RNA
  misc_feature 13: note = DNA
  misc_feature 14: note = RNA
  misc_feature 15: note = DNA
  misc_feature 16: note = RNA
  misc_feature 17: note = DNA
  misc_feature 18: note = RNA
  misc_feature 19: note = DNA
  misc_feature 20..100: note = RNA
caggttccatgggatgctctgttttagagctagaaatagcaagttaaaataaggctagtccgttatcaacttgaaaaagtggcaccgagtcggtgctttt

SEQ ID NO: 2133 - DNA, 100 bp, synthetic construct; identical to SEQ ID NO: 2132
  source 1..100: mol_type = other DNA; note = Description of Artificial Sequence: Synthetic oligonucleotide; note = Description of Combined DNA/RNA Molecule: Synthetic oligonucleotide
  modified_base 1: mod_base = OTHER; note = 2'-O-Methyl-cytidine phosphorothioate
  modified_base 2: mod_base = OTHER; note = 2'-O-Methyl-adenosine phosphorothioate
  modified_base 3: mod_base = OTHER; note = 2'-O-Methyl-guanosine phosphorothioate
  modified_base 21: mod_base = OTHER; note = 2'-O-Methyl-guanosine
  modified_base 28: mod_base = OTHER; note = 2'-O-Methyl-adenosine
  modified_base 29: mod_base = OTHER; note = 2'-O-Methyl-guanosine
  modified_base 30: mod_base = OTHER; note = 2'-O-Methyl-cytidine
  modified_base 31: mod_base = OTHER; note = 2'-O-Methyl-uridine
  modified_base 32: mod_base = OTHER; note = 2'-O-Methyl-adenosine
  modified_base 33: mod_base = OTHER; note = 2'-O-Methyl-guanosine
  modified_base 34: mod_base = OTHER; note = 2'-O-Methyl-adenosine
  modified_base 35: mod_base = OTHER; note = 2'-O-Methyl-adenosine
  modified_base 36: mod_base = OTHER; note = 2'-O-Methyl-adenosine
  modified_base 37: mod_base = OTHER; note = 2'-O-Methyl-uridine
  modified_base 38: mod_base = OTHER; note = 2'-O-Methyl-adenosine
  modified_base 39: mod_base = OTHER; note = 2'-O-Methyl-guanosine
  modified_base 40: mod_base = OTHER; note = 2'-O-Methyl-cytidine
  modified_base 41: mod_base = OTHER; note = 2'-O-Methyl-adenosine
  modified_base 42: mod_base = OTHER; note = 2'-O-Methyl-adenosine
  modified_base 46: mod_base = OTHER; note = 2'-O-Methyl-adenosine
  modified_base 48: mod_base = OTHER; note = 2'-O-Methyl-adenosine
  modified_base 50: mod_base = OTHER; note = 2'-O-Methyl-uridine
  modified_base 52: mod_base = OTHER; note = 2'-O-Methyl-adenosine
  modified_base 53: mod_base = OTHER; note = 2'-O-Methyl-guanosine
  modified_base 54: mod_base = OTHER; note = 2'-O-Methyl-guanosine
  modified_base 55: mod_base = OTHER; note = 2'-O-Methyl-cytidine
  modified_base 56: mod_base = OTHER; note = 2'-O-Methyl-uridine
  modified_base 57: mod_base = OTHER; note = 2'-O-Methyl-adenosine
  modified_base 60: mod_base = OTHER; note = 2'-O-Methyl-cytidine
  modified_base 61: mod_base = OTHER; note = 2'-O-Methyl-cytidine
  modified_base 66: mod_base = OTHER; note = 2'-O-Methyl-uridine
  modified_base 67: mod_base = OTHER; note = 2'-O-Methyl-cytidine
  modified_base 70: mod_base = OTHER; note = 2'-O-Methyl-cytidine
  modified_base 71: mod_base = OTHER; note = 2'-O-Methyl-uridine
  modified_base 72: mod_base = OTHER; note = 2'-O-Methyl-uridine
  modified_base 73: mod_base = OTHER; note = 2'-O-Methyl-guanosine
  modified_base 74: mod_base = OTHER; note = 2'-O-Methyl-adenosine
  modified_base 75: mod_base = OTHER; note = 2'-O-Methyl-adenosine
  modified_base 76: mod_base = OTHER; note = 2'-O-Methyl-adenosine
  modified_base 77: mod_base = OTHER; note = 2'-O-Methyl-adenosine
  modified_base 78: mod_base = OTHER; note = 2'-O-Methyl-adenosine
  modified_base 79: mod_base = OTHER; note = 2'-O-Methyl-guanosine
  modified_base 80: mod_base = OTHER; note = 2'-O-Methyl-uridine
  modified_base 81: mod_base = OTHER; note = 2'-O-Methyl-guanosine
  modified_base 83: mod_base = OTHER; note = 2'-O-Methyl-cytidine
  modified_base 84: mod_base = OTHER; note = 2'-O-Methyl-adenosine
  modified_base 85: mod_base = OTHER; note = 2'-O-Methyl-cytidine
  modified_base 86: mod_base = OTHER; note = 2'-O-Methyl-cytidine
  modified_base 87: mod_base = OTHER; note = 2'-O-Methyl-guanosine
  modified_base 88: mod_base = OTHER; note = 2'-O-Methyl-adenosine
  modified_base 89: mod_base = OTHER; note = 2'-O-Methyl-guanosine
  modified_base 90: mod_base = OTHER; note = 2'-O-Methyl-uridine
  modified_base 91: mod_base = OTHER; note = 2'-O-Methyl-cytidine
  modified_base 92: mod_base = OTHER; note = 2'-O-Methyl-guanosine
  modified_base 93: mod_base = OTHER; note = 2'-O-Methyl-guanosine
  modified_base 94: mod_base = OTHER; note = 2'-O-Methyl-uridine
  modified_base 95: mod_base = OTHER; note = 2'-O-Methyl-guanosine
  modified_base 96: mod_base = OTHER; note = 2'-O-Methyl-cytidine
  modified_base 97: mod_base = OTHER; note = 2'-O-Methyl-uridine phosphorothioate
  modified_base 98: mod_base = OTHER; note = 2'-O-Methyl-uridine phosphorothioate
  modified_base 99: mod_base = OTHER; note = 2'-O-Methyl-uridine phosphorothioate
  modified_base 100: mod_base = OTHER; note = 2'-O-Methyl-uridine
  misc_feature 1..3: note = RNA
  misc_feature 4: note = DNA
  misc_feature 5: note = RNA
  misc_feature 6: note = DNA
  misc_feature 7: note = RNA
  misc_feature 8: note = DNA
  misc_feature 9: note = RNA
  misc_feature 10: note = DNA
  misc_feature 11: note = RNA
  misc_feature 12: note = DNA
  misc_feature 13: note = RNA
  misc_feature 14: note = DNA
  misc_feature 15: note = RNA
  misc_feature 16: note = DNA
  misc_feature 17: note = RNA
  misc_feature 18: note = DNA
  misc_feature 19: note = RNA
  misc_feature 20: note = DNA
  misc_feature 21..100: note = RNA

SEQ ID NO: 2134 - RNA, 99 nt, synthetic construct
  source 1..99: mol_type = other RNA; note = Description of Artificial Sequence: Synthetic oligonucleotide
  modified_base 1: mod_base = OTHER; note = 2'-O-Methyl-cytidine phosphorothioate
  modified_base 2: mod_base = OTHER; note = 2'-O-Methyl-adenosine phosphorothioate
  modified_base 20: mod_base = OTHER; note = 2'-O-Methyl-guanosine
  modified_base 27: mod_base = OTHER; note = 2'-O-Methyl-adenosine
  modified_base 28: mod_base = OTHER; note = 2'-O-Methyl-guanosine
  modified_base 29: mod_base = OTHER; note = 2'-O-Methyl-cytidine
  modified_base 30: mod_base = OTHER; note = 2'-O-Methyl-uridine
  modified_base 31: mod_base = OTHER; note = 2'-O-Methyl-adenosine
  modified_base 33: mod_base = OTHER; note = 2'-O-Methyl-adenosine
  modified_base 34: mod_base = OTHER; note = 2'-O-Methyl-adenosine
  modified_base 35: mod_base = OTHER; note = 2'-O-Methyl-adenosine
  modified_base 36: mod_base = OTHER; note = 2'-O-Methyl-uridine
  modified_base 37: mod_base = OTHER; note = 2'-O-Methyl-adenosine
  modified_base 38: mod_base = OTHER; note = 2'-O-Methyl-guanosine
  modified_base 39: mod_base = OTHER; note = 2'-O-Methyl-cytidine
  modified_base 40: mod_base = OTHER; note = 2'-O-Methyl-adenosine
  modified_base 41: mod_base = OTHER; note = 2'-O-Methyl-adenosine
  modified_base 45: mod_base = OTHER; note = 2'-O-Methyl-adenosine
  modified_base 47: mod_base = OTHER; note = 2'-O-Methyl-adenosine
  modified_base 49: mod_base = OTHER; note = 2'-O-Methyl-uridine
  modified_base 51: mod_base = OTHER; note = 2'-O-Methyl-adenosine
  modified_base 52: mod_base = OTHER; note = 2'-O-Methyl-guanosine
  modified_base 53: mod_base = OTHER; note = 2'-O-Methyl-guanosine
  modified_base 54: mod_base = OTHER; note = 2'-O-Methyl-cytidine
  modified_base 55: mod_base = OTHER; note = 2'-O-Methyl-uridine
  modified_base 56: mod_base = OTHER; note = 2'-O-Methyl-adenosine
  modified_base 59: mod_base = OTHER; note = 2'-O-Methyl-cytidine
  modified_base 60: mod_base = OTHER; note = 2'-O-Methyl-cytidine
  modified_base 65: mod_base = OTHER; note = 2'-O-Methyl-uridine
  modified_base 66: mod_base = OTHER; note = 2'-O-Methyl-cytidine
  modified_base 69: mod_base = OTHER; note = 2'-O-Methyl-cytidine
  modified_base 70: mod_base = OTHER; note = 2'-O-Methyl-uridine
  modified_base 71: mod_base = OTHER; note = 2'-O-Methyl-uridine
  modified_base 73: mod_base = OTHER; note = 2'-O-Methyl-adenosine
  modified_base 74: mod_base = OTHER; note = 2'-O-Methyl-adenosine
  modified_base 75: mod_base = OTHER; note = 2'-O-Methyl-adenosine
  modified_base 76: mod_base = OTHER; note = 2'-O-Methyl-adenosine
  modified_base 77: mod_base = OTHER; note = 2'-O-Methyl-adenosine
  modified_base 78: mod_base = OTHER; note = 2'-O-Methyl-guanosine
  modified_base 79: mod_base = OTHER; note = 2'-O-Methyl-uridine
  modified_base 80: mod_base = OTHER; note = 2'-O-Methyl-guanosine
  modified_base 82: mod_base = OTHER; note = 2'-O-Methyl-cytidine
  modified_base 83: mod_base = OTHER; note = 2'-O-Methyl-adenosine
  modified_base 84: mod_base = OTHER; note = 2'-O-Methyl-cytidine
  modified_base 85: mod_base = OTHER; note = 2'-O-Methyl-cytidine
  modified_base 86: mod_base = OTHER; note = 2'-O-Methyl-guanosine
  modified_base 87: mod_base = OTHER; note = 2'-O-Methyl-adenosine
  modified_base 88: mod_base = OTHER; note = 2'-O-Methyl-guanosine
  modified_base 89: mod_base = OTHER; note = 2'-O-Methyl-uridine
  modified_base 90: mod_base = OTHER; note = 2'-O-Methyl-cytidine
  modified_base 91: mod_base = OTHER; note = 2'-O-Methyl-guanosine
  modified_base 92: mod_base = OTHER; note = 2'-O-Methyl-guanosine
  modified_base 93: mod_base = OTHER; note = 2'-O-Methyl-uridine
  modified_base 94: mod_base = OTHER; note = 2'-O-Methyl-guanosine
  modified_base 95: mod_base = OTHER; note = 2'-O-Methyl-cytidine
  modified_base 96: mod_base = OTHER; note = 2'-O-Methyl-uridine
  modified_base 97: mod_base = OTHER; note = 2'-O-Methyl-uridine phosphorothioate
  modified_base 98: mod_base = OTHER; note = 2'-O-Methyl-uridine phosphorothioate
  modified_base 99: mod_base = OTHER; note = 2'-O-Methyl-uridine
cagctccaggcggtcctgggttttagagctagaaatagcaagttaaaataaggctagtccgttatcaacttgaaaaagtggcaccgagtcggtgctttt

SEQ ID NO: 2135 - RNA, 100 nt, synthetic construct; identical to SEQ ID NO: 339
  source 1..100: mol_type = other RNA; note = Description of Artificial Sequence: Synthetic polynucleotide
  modified_base 1: mod_base = OTHER; note = 2'-O-Methyl-uridine phosphorothioate
  modified_base 2: mod_base = OTHER; note = 2'-O-Methyl-cytidine phosphorothioate
  modified_base 3: mod_base = OTHER; note = 2'-O-Methyl-adenosine phosphorothioate
  modified_base 21: mod_base = OTHER; note = 2'-O-Methyl-guanosine
  modified_base 28: mod_base = OTHER; note = 2'-O-Methyl-adenosine
  modified_base 29: mod_base = OTHER; note = 2'-O-Methyl-guanosine
  modified_base 30: mod_base = OTHER; note = 2'-O-Methyl-cytidine
  modified_base 31: mod_base = OTHER; note = 2'-O-Methyl-uridine
  modified_base 32: mod_base = OTHER; note = 2'-O-Methyl-adenosine
  modified_base 34: mod_base = OTHER; note = 2'-O-Methyl-adenosine
  modified_base 35: mod_base = OTHER; note = 2'-O-Methyl-adenosine
  modified_base 36: mod_base = OTHER; note = 2'-O-Methyl-adenosine
  modified_base 37: mod_base = OTHER; note = 2'-O-Methyl-uridine
  modified_base 38: mod_base = OTHER; note = 2'-O-Methyl-adenosine
  modified_base 39: mod_base = OTHER; note = 2'-O-Methyl-guanosine
  modified_base 40: mod_base = OTHER; note = 2'-O-Methyl-cytidine
  modified_base 41: mod_base = OTHER; note = 2'-O-Methyl-adenosine
  modified_base 42: mod_base = OTHER; note = 2'-O-Methyl-adenosine
  modified_base 46: mod_base = OTHER; note = 2'-O-Methyl-adenosine
  modified_base 48: mod_base = OTHER; note = 2'-O-Methyl-adenosine
  modified_base 50: mod_base = OTHER; note = 2'-O-Methyl-uridine
  modified_base 52: mod_base = OTHER; note = 2'-O-Methyl-adenosine
  modified_base 53: mod_base = OTHER; note = 2'-O-Methyl-guanosine
  modified_base 54: mod_base = OTHER; note = 2'-O-Methyl-guanosine
  modified_base 55: mod_base = OTHER; note = 2'-O-Methyl-cytidine
  modified_base 56: mod_base = OTHER; note = 2'-O-Methyl-uridine
  modified_base 57: mod_base = OTHER; note = 2'-O-Methyl-adenosine
  modified_base 60: mod_base = OTHER; note = 2'-O-Methyl-cytidine
  modified_base 61: mod_base = OTHER; note = 2'-O-Methyl-cytidine
  modified_base 66: mod_base = OTHER; note = 2'-O-Methyl-uridine
  modified_base 67: mod_base = OTHER; note = 2'-O-Methyl-cytidine
  modified_base 70: mod_base = OTHER; note = 2'-O-Methyl-cytidine
  modified_base 71: mod_base = OTHER; note = 2'-O-Methyl-uridine
  modified_base 72: mod_base = OTHER; note = 2'-O-Methyl-uridine
  modified_base 74: mod_base = OTHER; note = 2'-O-Methyl-adenosine
  modified_base 75: mod_base = OTHER; note = 2'-O-Methyl-adenosine
  modified_base 76: mod_base = OTHER; note = 2'-O-Methyl-adenosine
  modified_base 77: mod_base = OTHER; note = 2'-O-Methyl-adenosine
  modified_base 78: mod_base = OTHER; note = 2'-O-Methyl-adenosine
  modified_base 79: mod_base = OTHER; note = 2'-O-Methyl-guanosine
  modified_base 80: mod_base = OTHER; note = 2'-O-Methyl-uridine
  modified_base 81: mod_base = OTHER; note = 2'-O-Methyl-guanosine
  modified_base 83: mod_base = OTHER; note = 2'-O-Methyl-cytidine
  modified_base 84: mod_base = OTHER; note = 2'-O-Methyl-adenosine
  modified_base 85: mod_base = OTHER; note = 2'-O-Methyl-cytidine
  modified_base 86: mod_base = OTHER; note = 2'-O-Methyl-cytidine
  modified_base 87: mod_base = OTHER; note = 2'-O-Methyl-guanosine
  modified_base 88: mod_base = OTHER; note = 2'-O-Methyl-adenosine
  modified_base 89: mod_base = OTHER; note = 2'-O-Methyl-guanosine
  modified_base 90: mod_base = OTHER; note = 2'-O-Methyl-uridine
  modified_base 91: mod_base = OTHER; note = 2'-O-Methyl-cytidine
  modified_base 92: mod_base = OTHER; note = 2'-O-Methyl-guanosine
  modified_base 93: mod_base = OTHER; note = 2'-O-Methyl-guanosine
  modified_base 94: mod_base = OTHER; note = 2'-O-Methyl-uridine
  modified_base 95: mod_base = OTHER; note = 2'-O-Methyl-guanosine
  modified_base 96: mod_base = OTHER; note = 2'-O-Methyl-cytidine
  modified_base 97: mod_base = OTHER; note = 2'-O-Methyl-uridine
  modified_base 98: mod_base = OTHER; note = 2'-O-Methyl-uridine phosphorothioate
  modified_base 99: mod_base = OTHER; note = 2'-O-Methyl-uridine phosphorothioate
  modified_base 100: mod_base = OTHER; note = 2'-O-Methyl-uridine

SEQ ID NO: 2136 - RNA, 4929 nt, synthetic construct
  source 1..4929: mol_type = other RNA; note = Description of Artificial Sequence: Synthetic polynucleotide
atgagcgaggtggagttcagccacgagtactggatgcggcacgccctgaccctggccaagcgggcccgggacgagcgggaggtgcccgtgggcgccgtgctggtgctgaacaaccgggtgatcggcgagggctggaaccgggccatcggcctgcacgaccccaccgcccacgccgagatcatggccctgcggcagggcggcctggtgatgcagaactaccggctgatcgacgccaccctgtacgtgaccttcgagccctgcgtgatgtgcgccggcgccatgatccacagccggatcggccgggtggtgttcggcgtgcggaacgccaagaccggcgccgccggcagcctgatggacgtgctgcaccaccccggcatgaaccaccgggtggagatcaccgagggcatcctggccgacgagtgcgccgccctgctgtgccggttcttccggatgccccggcgggtgttcaacgcccagaagaaggcccagagcagcaccgacaggaaataagagagaaaagaagagtaagaagaaatataagagccaccagcggcggcagcagcggcggcagcagcggcagcgagacacccggcaccagcgagagcgccacccccgagagcagcggcggcagcagcggcggcagcgacaagaagtacagcatcggcctggccatcggcaccaacagcgtgggctgggccgtgatcaccgacgagtacaaggtgcccagcaagaagttcaaggtgctgggcaacaccgaccggcacagcatcaagaagaacctgatcggcgccctgctgttcgacagcggcgagacagccgaggccacccggctgaagcggaccgcccggcggcggtacacccggcggaagaaccggatctgctacctgcaggagatcttcagcaacgagatggccaaggtggacgacagcttcttccaccggctggaggagagcttcctggtggaggaggacaagaagcacgagcggcaccccatcttcggcaacatcgtggacgaggtggcctaccacgagaagtaccccaccatctaccacctgcggaagaagctggtggacagcaccgacaaggccgacctgcggctgatctacctggccctggcccacatgatcaagttccggggccacttcctgatcgagggcgacctgaaccccgacaacagcgacgtggacaagctgttcatccagctggtgcagacctacaaccagctgttcgaggagaaccccatcaacgccagcggcgtggacgccaaggccatcctgagcgcccggctgagcaagagccggcggctggagaacctgatcgcccagctgcccggcgagaagaagaacggcctgttcggcaacctgatcgccctgagcctgggcctgacccccaacttcaagagcaacttcgacctggccgaggacgccaagctgcagctgagcaaggacacctacgacgacgacctggacaacctgctggcccagatcggcgaccagtacgccgacctgttcctggccgccaagaacctgagcgacgccatcctgctgagcgacatcctgcgggtgaacaccgagatcaccaaggcccccctgagcgccagcatgatcaagcggtacgacgagcaccaccaggacctgaccctgctgaaggccctggtgcggcagcagctgcccgagaagtacaaggagatcttcttcgaccagagcaagaacggctacgccggctacatcgacggcggcgccagccaggaggagttctacaagttcatcaagcccatcctggagaagatggacggcaccgaggagctgctggtgaagctgaaccgggaggacctgctgcggaagcagcggaccttcgacaacggcagcatcccccaccagatccacctgggcgagctgcacgccatcctgcggcggcaggaggacttctaccccttcctgaaggacaaccgggagaagatcgagaagatcctgaccttccggatcccctactacgtgggccccctggcccggggcaacagccggttcgcctggatgacccgcaagagcgaggagacaatcaccccctggaacttcgaggaggtggtggacaagggcgccagcgcccagagcttcatcgagcggatgaccaacttcgacaagaacctgcccaacgagaaggtgctgcccaagcacagcctgctgtacgagtacttcaccgtgtacaacgagctgaccaaggtgaagtacgtgaccgagggcatgcggaagcccgccttcctgagcggcgagcagaagaaggccatcgtggacctgctgttcaagaccaaccggaaggtgaccgtgaagcagctgaaggaggactacttcaagaagatcgagtgcttcgacagcgtggagatcagcggcgtggaggaccggttcaacgccagcctgggcacctaccacgacctgctgaagatcatcaaggacaaggacttcctggacaacgaggagaacgaggacatcctggaggacatcgtgctgaccctgaccctgttcgaggaccgggagatgatcgaggagcggctgaagacctacgcccacctgttcgacgacaaggtgatgaagcagctgaagcggcggcggtacaccggctggggccggctgagccggaagctgatcaacggcatccgggacaagcagagcggcaagaccatcctggacttcctcaagagcgacggcttcgccaaccggaacttcatgcagctgatccacgacgacagcctgaccttcaaggaggacatccagaaggcccaggtgagcggccagggcgacagcctgcacgagcacatcgccaacctggccggcagccccgccatcaagaagggcatcctgcagaccgtgaaggtggtggacgagctggtgaaggtgatgggccggcacaagcccgagaacatcgtgatcgagatggcccgggagaaccagaccacccagaagggccagaagaacagccgggagcggatgaagcggatcgaggagggcatcaaggagctgggcagccagatcctgaaggagcaccccgtggagaacacccagctgcagaacgagaagctgtacctgtactacctgcagaacggccgggacatgtacgtggaccaggagctggacatcaaccggctgagcgactacgacgtggaccacatcgtgccccagagcttcctgaaggacgacagcatcgacaacaaggtgctgacccggagcgacaagaaccggggcaagagcgacaacgtgcccagcgaggaggtggtgaagaagatgaagaactactggcggcagctgctgaacgccaagctgatcacccagcggaagttcgacaacctgaccaaggccgagcggggcggcctgagcgagctggacaaggccggcttcatcaagcggcagctggtggagacacggcagatcaccaagcacgtggcccagatcctggacagccggatgaacaccaagtacgacgagaacgacaagctgatccgggaggtgaaggtgatcaccctcaagagcaagctggtgagcgacttccggaaggacttccagttctacaaggtgcgggagatcaacaactaccaccacgcccacgacgcctacctgaacgccgtggtgggcaccgccctgatcaagaagtaccccaagctggagagcgagttcgtgtacggcgactacaaggtgtacgacgtgcggaagatgatcgccaagagcgagcaggagatcggcaaggccaccgccaagtacttcttctacagcaacatcatgaacttcttcaagaccgagatcaccctggccaacggcgagatccggaagcggcccctgatcgagacaaacggcgagacaggcgagatcgtgtgggacaagggccgggacttcgccaccgtgcggaaggtgctgagcatgccccaggtgaacatcgtgaagaagaccgaggtgcagaccggcggcttcagcaaggagagcatcctgcccaagcggaacagcgacaagctgatcgcccggaagaaggactgggaccccaagaagtacggcggcttcgacagccccaccgtggcctacagcgtgctggtggtggccaaggtggagaagggcaagagcaagaagctcaagagcgtgaaggagctgctgggcatcaccatcatggagcggagcagcttcgagaagaaccccatcgacttcctggaggccaagggctacaaggaggtgaagaaggacctgatcatcaagctgcccaagtacagcctgttcgagctggagaacggccggaagcggatgctggccagcgccggcgagctgcagaagggcaacgagctggccctgcccagcaagtacgtgaacttcctgtacctggccagccactacgagaagctgaagggcagccccgaggacaacgagcagaagcagctgttcgtggagcagcacaagcactacctggacgagatcatcgagcagatcagcgagttcagcaagcgggtgatcctggccgacgccaacctggacaaggtgctgagcgcctacaacaagcaccgggacaagcccatccgggagcaggccgagaacatcatccacctgttcaccctgaccaacctgggcgcccccgccgccttcaagtacttcgacaccaccatcgaccggaagcggtacaccagcaccaaggaggtgctggacgccaccctgatccaccagagcatcaccggcctgtacgagacacggatcgacctgagccagctgggcggcgacgagggcgccgacaagcggaccgccgacggcagcgagttcgagagccccaagaagaagcggaaggtgtgagcggccgcttaattaagctgccttctgcggggcttgccttctggccatgcccttcttctctcccttgcacctgtacctcttggtctttgaataaagcctgagtaggaagtctaga

SEQ ID NO: 2137 - protein, 1588 aa, synthetic construct
  source 1..1588: note = Description of Artificial Sequence: Synthetic polypeptide
MSEVEFSHEYWMRHALTLAKRARDEREVPVGAVLVLNNRVIGEGWNRAIGLHDPTAHAEIMALRQGGLVMQNYRLIDATLYVTFEPCVMCAGAMIHSRIGRVVFGVRNAKTGAAGSLMDVLHHPGMNHRVEITEGILADECAALLCRFFRMPRRVFNAQKKAQSSTDSGGSSGGSSGSETPGTSESATPESSGGSSGGSDKKYSIGLAIGTNSVGWAVITDEYKVPSKKFKVLGNTDRHSIKKNLIGALLFDSGETAEATRLKRTARRRYTRRKNRICYLQEIFSNEMAKVDDSFFHRLEESFLVEEDKKHERHPIFGNIVDEVAYHEKYPTIYHLRKKLVDSTDKADLRLIYLALAHMIKFRGHFLIEGDLNPDNSDVDKLFIQLVQTYNQLFEENPINASGVDAKAILSARLSKSRRLENLIAQLPGEKKNGLFGNLIALSLGLTPNFKSNFDLAEDAKLQLSKDTYDDDLDNLLAQIGDQYADLFLAAKNLSDAILLSDILRVNTEITKAPLSASMIKRYDEHHQDLTLLKALVRQQLPEKYKEIFFDQSKNGYAGYIDGGASQEEFYKFIKPILEKMDGTEELLVKLNREDLLRKQRTFDNGSIPHQIHLGELHAILRRQEDFYPFLKDNREKIEKILTFRIPYYVGPLARGNSRFAWMTRKSEETITPWNFEEVVDKGASAQSFIERMTNFDKNLPNEKVLPKHSLLYEYFTVYNELTKVKYVTEGMRKPAFLSGEQKKAIVDLLFKTNRKVTVKQLKEDYFKKIECFDSVEISGVEDRFNASLGTYHDLLKIIKDKDFLDNEENEDILEDIVLTLTLFEDREMIEERLKTYAHLFDDKVMKQLKRRRYTGWGRLSRKLINGIRDKQSGKTILDFLKSDGFANRNFMQLIHDDSLTFKEDIQKAQVSGQGDSLHEHIANLAGSPAIKKGILQTVKVVDELVKVMGRHKPENIVIEMARENQTTQKGQKNSRERMKRIEEGIKELGSQILKEHPVENTQLQNEKLYLYYLQNGRDMYVDQELDINRLSDYDVDHIVPQSFLKDDSIDNKVLTRSDKNRGKSDNVPSEEVVKKMKNYWRQLLNAKLITQRKFDNLTKAERGGLSELDKAGFIKRQLVETRQITKHVAQILDSRMNTKYDENDKLIREVKVITLKSKLVSDFRKDFQFYKVREINNYHHAHDAYLNAVVGTALIKKYPKLESEFVYGDYKVYDVRKMIAKSEQEIGKATAKYFFYSNIMNFFKTEITLANGEIRKRPLIETNGETGEIVWDKGRDFATVRKVLSMPQVNIVKKTEVQTGGFSKESILPKRNSDKLIARKKDWDPKKYGGFDSPTVAYSVLVVAKVEKGKSKKLKSVKELLGITIMERSSFEKNPIDFLEAKGYKEVKKDLIIKLPKYSLFELENGRKRMLASAGELQKGNELALPSKYVNFLYLASHYEKLKGSPEDNEQKQLFVEQHKHYLDEIIEQISEFSKRVILADANLDKVLSAYNKHRDKPIREQAENIIHLFTLTNLGAPAAFKYFDTTIDRKRYTSTKEVLDATLIHQSITGLYETRIDLSQLGGDEGADKRTADGSEFESPKKKRKV

SEQ ID NO: 2138 - RNA, 47 nt, synthetic construct
  source 1..47: mol_type = other RNA; note = Description of Artificial Sequence: Synthetic oligonucleotide
  modified_base 1: mod_base = OTHER; note = 2'-O-methyl-adenosine
  modified_base 7: mod_base = OTHER; note = N1-methylpseudouridine
  modified_base 25: mod_base = OTHER; note = N1-methylpseudouridine
  modified_base 35: mod_base = OTHER; note = N1-methylpseudouridine
  modified_base 37: mod_base = OTHER; note = N1-methylpseudouridine
aggaaanaagagagaaaagaagagnaagaagaaananaagagccacc

SEQ ID NO: 2139 - RNA, 501 nt, synthetic construct
  source 1..501: mol_type = other RNA; note = Description of Artificial Sequence: Synthetic polynucleotide
  modified_base 2: mod_base = OTHER; note = N1-methylpseudouridine
  modified_base 11: mod_base = OTHER; note = N1-methylpseudouridine
  modified_base 16: mod_base = OTHER; note = N1-methylpseudouridine
  modified_base 17: mod_base = OTHER; note = N1-methylpseudouridine
  modified_base 28: mod_base = OTHER; note = N1-methylpseudouridine
  modified_base 31: mod_base = OTHER; note = N1-methylpseudouridine
  modified_base 35: mod_base = OTHER; note = N1-methylpseudouridine
  modified_base 47: mod_base = OTHER; note = N1-methylpseudouridine
  modified_base 53: mod_base = OTHER; note = N1-methylpseudouridine
  modified_base 83: mod_base = OTHER; note = N1-methylpseudouridine
  modified_base 89: mod_base = OTHER; note = N1-methylpseudouridine
  modified_base 98: mod_base = OTHER; note = N1-methylpseudouridine
  modified_base 101: mod_base = OTHER; note = N1-methylpseudouridine
  modified_base 104: mod_base = OTHER; note = N1-methylpseudouridine
  modified_base 107: mod_base = OTHER; note = N1-methylpseudouridine
  modified_base 119: mod_base = OTHER; note = N1-methylpseudouridine
  modified_base 122: mod_base = OTHER; note = N1-methylpseudouridine
  modified_base 133: mod_base = OTHER; note = N1-methylpseudouridine
  modified_base 146: mod_base = OTHER; note = N1-methylpseudouridine
  modified_base 152: mod_base = OTHER; note = N1-methylpseudouridine
  modified_base 179: mod_base = OTHER; note = N1-methylpseudouridine
  modified_base 182: mod_base = OTHER; note = N1-methylpseudouridine
  modified_base 188: mod_base = OTHER; note = N1-methylpseudouridine
  modified_base 203: mod_base = OTHER; note = N1-methylpseudouridine
  modified_base 206: mod_base = OTHER; note = N1-methylpseudouridine
  modified_base 209: mod_base = OTHER; note = N1-methylpseudouridine
  modified_base 217: mod_base = OTHER; note = N1-methylpseudouridine
  modified_base 224: mod_base = OTHER; note = N1-methylpseudouridine
  modified_base 227: mod_base = OTHER; note = N1-methylpseudouridine
  modified_base 239: mod_base = OTHER; note = N1-methylpseudouridine
  modified_base 241: mod_base = OTHER; note = N1-methylpseudouridine
  modified_base 245: mod_base = OTHER; note = N1-methylpseudouridine
  modified_base 250: mod_base = OTHER; note = N1-methylpseudouridine
  modified_base 251: mod_base = OTHER; note = N1-methylpseudouridine
  modified_base 259: mod_base = OTHER; note = N1-methylpseudouridine
  modified_base 263: mod_base = OTHER; note = N1-methylpseudouridine
  modified_base 266: mod_base = OTHER; note = N1-methylpseudouridine
  modified_base 268: mod_base = OTHER; note = N1-methylpseudouridine
  modified_base 281: mod_base = OTHER; note = N1-methylpseudouridine
  modified_base 284: mod_base = OTHER; note = N1-methylpseudouridine
  modified_base 296: mod_base = OTHER; note = N1-methylpseudouridine
  modified_base 305: mod_base = OTHER; note = N1-methylpseudouridine
  modified_base 308: mod_base = OTHER; note = N1-methylpseudouridine
  modified_base 310: mod_base = OTHER; note = N1-methylpseudouridine
  modified_base 311: mod_base = OTHER; note = N1-methylpseudouridine
  modified_base 317: mod_base = OTHER; note = N1-methylpseudouridine
  modified_base 350: mod_base = OTHER; note = N1-methylpseudouridine
  modified_base 353: mod_base = OTHER; note = N1-methylpseudouridine
  modified_base 359: mod_base = OTHER; note = N1-methylpseudouridine
  modified_base 362: mod_base = OTHER; note = N1-methylpseudouridine
  modified_base 377: mod_base = OTHER; note = N1-methylpseudouridine
  modified_base 389: mod_base = OTHER; note = N1-methylpseudouridine
  modified_base 395: mod_base = OTHER; note = N1-methylpseudouridine
  modified_base 407: mod_base = OTHER; note = N1-methylpseudouridine
  modified_base 410: mod_base = OTHER; note = N1-methylpseudouridine
  modified_base 421: mod_base = OTHER; note = N1-methylpseudouridine
  modified_base 431: mod_base = OTHER; note = N1-methylpseudouridine
  modified_base 434: mod_base = OTHER; note = N1-methylpseudouridine
  modified_base 436: mod_base = OTHER; note = N1-methylpseudouridine
  modified_base 442: mod_base = OTHER; note = N1-methylpseudouridine
  modified_base 443: mod_base = OTHER; note = N1-methylpseudouridine
  modified_base 445: mod_base = OTHER; note = N1-methylpseudouridine
  modified_base 446: mod_base = OTHER; note = N1-methylpseudouridine
  modified_base 452: mod_base = OTHER; note = N1-methylpseudouridine
  modified_base 464: mod_base = OTHER; note = N1-methylpseudouridine
  modified_base 466: mod_base = OTHER; note = N1-methylpseudouridine
  modified_base 467: mod_base = OTHER; note = N1-methylpseudouridine
angagcgaggnggagnncagccacgagnacnggangcggcacgcccngacccnggccaagcgggcccgggacgagcgggaggngcccgngggcgccgngcnggngcngaacaaccgggngancggcgagggcnggaaccgggccancggccngcacgaccccaccgcccacgccgagancanggcccngcggcagggcggccnggngangcagaacnaccggcngancgacgccacccngnacgngaccnncgagcccngcgngangngcgccggcgccanganccacagccggancggccgggnggngnncggcgngcggaacgccaagaccggcgccgccggcagccnganggacgngcngcaccaccccggcangaaccaccgggnggagancaccgagggcanccnggccgacgagngcgccgcccngcngngccggnncnnccggangccccggcgggngnncaacgcccagaagaaggcccagagcagcaccgac

SEQ ID NO: 2140 - protein, 167 aa, synthetic construct
  source 1..167: note = Description of Artificial Sequence: Synthetic polypeptide
MSEVEFSHEYWMRHALTLAKRARDEREVPVGAVLVLNNRVIGEGWNRAIGLHDPTAHAEIMALRQGGLVMQNYRLIDATLYVTFEPCVMCAGAMIHSRIGRVVFGVRNAKTGAAGSLMDVLHHPGMNHRVEITEGILADECAALLCRFFRMPRRVFNAQKKAQSSTD

SEQ ID NO: 2141 - RNA, 96 nt, synthetic construct
  source 1..96: mol_type = other RNA; note = Description of Artificial Sequence: Synthetic oligonucleotide
agcggcggcagcagcggcggcagcagcggcagcgagacacccggcaccagcgagagcgccacccccgagagcagcggcggcagcagcggcggcagc

SEQ ID NO: 2142 - RNA, 4101 nt, synthetic construct
  source 1..4101: mol_type = other RNA; note = Description of Artificial Sequence: Synthetic polynucleotide
  modified_base 10: mod_base = OTHER; note = N1-methylpseudouridine
  modified_base 17: mod_base = OTHER; note = N1-methylpseudouridine
  modified_base 23: mod_base = OTHER; note = N1-methylpseudouridine
  modified_base 29: mod_base = OTHER; note = N1-methylpseudouridine
  modified_base 44: mod_base = OTHER; note = N1-methylpseudouridine
  modified_base 49: mod_base = OTHER; note = N1-methylpseudouridine
  modified_base 56: mod_base = OTHER; note = N1-methylpseudouridine
  modified_base 59: mod_base = OTHER; note = N1-methylpseudouridine
  modified_base 70: mod_base = OTHER; note = N1-methylpseudouridine
  modified_base 77: mod_base = OTHER; note = N1-methylpseudouridine
  modified_base 91: mod_base = OTHER; note = N1-methylpseudouridine
  modified_base 92: mod_base = OTHER; note = N1-methylpseudouridine
  modified_base 98: mod_base = OTHER; note = N1-methylpseudouridine
  modified_base 101: mod_base = OTHER; note = N1-methylpseudouridine
  modified_base 125: mod_base = OTHER; note = N1-methylpseudouridine
  modified_base 137: mod_base = OTHER; note = N1-methylpseudouridine
  modified_base 140: mod_base = OTHER; note = N1-methylpseudouridine
  modified_base 149: mod_base = OTHER; note = N1-methylpseudouridine
  modified_base 152: mod_base = OTHER; note = N1-methylpseudouridine
  modified_base 154: mod_base = OTHER; note = N1-methylpseudouridine
  modified_base 155: mod_base = OTHER; note = N1-methylpseudouridine
  modified_base 188: mod_base = OTHER; note = N1-methylpseudouridine
  modified_base 211: mod_base = OTHER; note = N1-methylpseudouridine
  modified_base 233: mod_base = OTHER; note = N1-methylpseudouridine
  modified_base 235: mod_base = OTHER; note = N1-methylpseudouridine
  modified_base 238: mod_base = OTHER; note = N1-methylpseudouridine
  modified_base 242: mod_base = OTHER; note = N1-methylpseudouridine
  modified_base 251: mod_base = OTHER; note = N1-methylpseudouridine
  modified_base 253: mod_base = OTHER; note = N1-methylpseudouridine
  modified_base 254: mod_base = OTHER; note = N1-methylpseudouridine
  modified_base 266: mod_base = OTHER; note = N1-methylpseudouridine
  modified_base 275: mod_base = OTHER; note = N1-methylpseudouridine
  modified_base 286: mod_base = OTHER; note = N1-methylpseudouridine
  modified_base 287: mod_base = OTHER; note = N1-methylpseudouridine
  modified_base 289: mod_base = OTHER; note = N1-methylpseudouridine
  modified_base 290: mod_base = OTHER; note = N1-methylpseudouridine
  modified_base 299: mod_base = OTHER; note = N1-methylpseudouridine
  modified_base 310: mod_base = OTHER; note = N1-methylpseudouridine
  modified_base 311: mod_base = OTHER; note = N1-methylpseudouridine
  modified_base 314: mod_base = OTHER; note = N1-methylpseudouridine
  modified_base 317: mod_base = OTHER; note = N1-methylpseudouridine
  modified_base 350: mod_base = OTHER; note = N1-methylpseudouridine
  modified_base 352: mod_base = OTHER; note = N1-methylpseudouridine
  modified_base 353: mod_base = OTHER; note = N1-methylpseudouridine
  modified_base 362: mod_base = OTHER; note = N1-methylpseudouridine
  modified_base 365: mod_base = OTHER; note = N1-methylpseudouridine
  modified_base 374: mod_base = OTHER; note = N1-methylpseudouridine
  modified_base 379: mod_base = OTHER; note = N1-methylpseudouridine
  modified_base 391: mod_base = OTHER; note = N1-methylpseudouridine
  modified_base 401: mod_base = OTHER; note = N1-methylpseudouridine
  modified_base 403: mod_base = OTHER; note = N1-methylpseudouridine
  modified_base 410: mod_base = OTHER; note = N1-methylpseudouridine
  modified_base 422: mod_base = OTHER; note = N1-methylpseudouridine
  modified_base 425: mod_base = OTHER; note = N1-methylpseudouridine
  modified_base 449: mod_base = OTHER; note = N1-methylpseudouridine
  modified_base 455: mod_base = OTHER; note = N1-methylpseudouridine
  modified_base 458: mod_base = OTHER; note = N1-methylpseudouridine
  modified_base 460: mod_base = OTHER; note = N1-methylpseudouridine
  modified_base 464: mod_base = OTHER; note = N1-methylpseudouridine
  modified_base 470: mod_base = OTHER; note = N1-methylpseudouridine
  modified_base 479: mod_base = OTHER; note = N1-methylpseudouridine
  modified_base 482: mod_base = OTHER; note = N1-methylpseudouridine
  modified_base 487: mod_base = OTHER; note = N1-methylpseudouridine
  modified_base 488: mod_base = OTHER; note = N1-methylpseudouridine
  modified_base 499: mod_base = OTHER; note = N1-methylpseudouridine
  modified_base 500: mod_base = OTHER; note = N1-methylpseudouridine
  modified_base 503: mod_base = OTHER; note = N1-methylpseudouridine
  modified_base 506: mod_base = OTHER; note = N1-methylpseudouridine
  modified_base 518: mod_base = OTHER; note = N1-methylpseudouridine
  modified_base 539: mod_base = OTHER; note = N1-methylpseudouridine
  modified_base 548: mod_base = OTHER; note = N1-methylpseudouridine
  modified_base 550: mod_base = OTHER; note = N1-methylpseudouridine
  modified_base 551: mod_base = OTHER; note = N1-methylpseudouridine
  modified_base 554: mod_base = OTHER; note = N1-methylpseudouridine
  modified_base 560: mod_base = OTHER; note = N1-methylpseudouridine
  modified_base 563: mod_base = OTHER; note = N1-methylpseudouridine
  modified_base 571: mod_base = OTHER; note = N1-methylpseudouridine
  modified_base 581: mod_base = OTHER; note = N1-methylpseudouridine
  modified_base 583: mod_base = OTHER; note = N1-methylpseudouridine
  modified_base 584: mod_base = OTHER; note = N1-methylpseudouridine
  modified_base 599: mod_base = OTHER; note = N1-methylpseudouridine
  modified_base 614: mod_base = OTHER; note = N1-methylpseudouridine
  modified_base 629: mod_base = OTHER; note = N1-methylpseudouridine
  modified_base 632: mod_base = OTHER; note = N1-methylpseudouridine
  modified_base 644: mod_base = OTHER; note = N1-methylpseudouridine
  modified_base 662: mod_base = OTHER; note = N1-methylpseudouridine
  modified_base 671: mod_base = OTHER; note = N1-methylpseudouridine
  modified_base 674: mod_base = OTHER; note = N1-methylpseudouridine
  modified_base 683: mod_base = OTHER; note = N1-methylpseudouridine
  modified_base 707: mod_base = OTHER; note = N1-methylpseudouridine
  modified_base 709: mod_base = OTHER; note = N1-methylpseudouridine
  modified_base 710: mod_base = OTHER; note = N1-methylpseudouridine
  modified_base 719: mod_base = OTHER; note = N1-methylpseudouridine
  modified_base 722: mod_base = OTHER; note = N1-methylpseudouridine
  modified_base 728: mod_base = OTHER; note = N1-methylpseudouridine
  modified_base 734: mod_base = OTHER; note = N1-methylpseudouridine
  modified_base 740: mod_base = OTHER; note = N1-methylpseudouridine
  modified_base 751: mod_base = OTHER; note = N1-methylpseudouridine
  modified_base 752: mod_base = OTHER; note = N1-methylpseudouridine
  modified_base 763: mod_base = OTHER; note = N1-methylpseudouridine
  modified_base 764: mod_base = OTHER; note = N1-methylpseudouridine
  modified_base 770: mod_base = OTHER; note = N1-methylpseudouridine
  modified_base 788: mod_base = OTHER; note = N1-methylpseudouridine
  modified_base 794: mod_base = OTHER; note = N1-methylpseudouridine
  modified_base 808: mod_base = OTHER; note = N1-methylpseudouridine
  modified_base 821: mod_base = OTHER; note = N1-methylpseudouridine
  modified_base 830: mod_base = OTHER; note = N1-methylpseudouridine
  modified_base 833: mod_base = OTHER; note = N1-methylpseudouridine
  modified_base 842: mod_base = OTHER; note = N1-methylpseudouridine
  modified_base 853: mod_base = OTHER; note = N1-methylpseudouridine
  modified_base 863: mod_base = OTHER; note = N1-methylpseudouridine
  modified_base 865: mod_base = OTHER; note = N1-methylpseudouridine
  modified_base 866: mod_base = OTHER; note = N1-methylpseudouridine
  modified_base 869: mod_base = OTHER; note = N1-methylpseudouridine
  modified_base 884: mod_base = OTHER; note = N1-methylpseudouridine
  modified_base 896: mod_base = OTHER; note = N1-methylpseudouridine
  modified_base 899: mod_base = OTHER; note = N1-methylpseudouridine
  modified_base 902: mod_base = OTHER; note = N1-methylpseudouridine
  modified_base 911: mod_base = OTHER; note = N1-methylpseudouridine
  modified_base 914: mod_base = OTHER; note = N1-methylpseudouridine
  modified_base 920: mod_base = OTHER; note = N1-methylpseudouridine
  modified_base 932: mod_base = OTHER; note = N1-methylpseudouridine
  modified_base 947: mod_base = OTHER; note = N1-methylpseudouridine
  modified_base 959: mod_base = OTHER; note = N1-methylpseudouridine
  modified_base 962: mod_base = OTHER; note = N1-methylpseudouridine
  modified_base 970: mod_base = OTHER; note = N1-methylpseudouridine
  modified_base 992: mod_base = OTHER; note = N1-methylpseudouridine
  modified_base 998: mod_base = OTHER; note = N1-methylpseudouridine
  modified_base 1001: mod_base = OTHER; note = N1-methylpseudouridine
  modified_base 1010: mod_base = OTHER; note = N1-methylpseudouridine
  modified_base 1013: mod_base = OTHER; note = N1-methylpseudouridine
  modified_base 1025: mod_base = OTHER; note = N1-methylpseudouridine
  modified_base 1036: mod_base = OTHER; note = N1-methylpseudouridine
  modified_base 1046: mod_base = OTHER; note = N1-methylpseudouridine
  modified_base 1048: mod_base = OTHER; note = N1-methylpseudouridine
  modified_base 1049: mod_base = OTHER; note = N1-methylpseudouridine
  modified_base 1051: mod_base = OTHER; note = N1-methylpseudouridine
  modified_base 1052: mod_base = OTHER; note = N1-methylpseudouridine
  modified_base 1072: mod_base = OTHER; note = N1-methylpseudouridine
  modified_base 1081: mod_base = OTHER; note = N1-methylpseudouridine
  modified_base 1085: mod_base = OTHER; note = N1-methylpseudouridine
  modified_base 1111: mod_base = OTHER; note = N1-methylpseudouridine
  modified_base 1112: mod_base = OTHER; note = N1-methylpseudouridine
  modified_base 1114: mod_base = OTHER; note = N1-methylpseudouridine
  modified_base 1120: mod_base = OTHER; note = N1-methylpseudouridine
  modified_base 1121: mod_base = OTHER; note = N1-methylpseudouridine
  modified_base 1124: mod_base = OTHER; note = N1-methylpseudouridine
  modified_base 1133: mod_base = OTHER; note = N1-methylpseudouridine
  modified_base 1136: mod_base = OTHER; note = N1-methylpseudouridine
  modified_base 1145: mod_base = OTHER; note = N1-methylpseudouridine
  modified_base 1163: mod_base = OTHER; note = N1-methylpseudouridine
  modified_base 1166: mod_base = OTHER; note = N1-methylpseudouridine
  modified_base 1169: mod_base = OTHER; note = N1-methylpseudouridine
  modified_base 1175: mod_base = OTHER; note = N1-methylpseudouridine
  modified_base 1190: mod_base = OTHER; note = N1-methylpseudouridine
  modified_base 1193: mod_base = OTHER; note = N1-methylpseudouridine
  modified_base 1210: mod_base = OTHER; note = N1-methylpseudouridine
  modified_base 1211: mod_base = OTHER; note = N1-methylpseudouridine
  modified_base 1226: mod_base = OTHER; note = N1-methylpseudouridine
  modified_base 1238: mod_base = OTHER; note = N1-methylpseudouridine
  modified_base 1244: mod_base = OTHER; note = N1-methylpseudouridine
  modified_base 1253: mod_base = OTHER; note = N1-methylpseudouridine
  modified_base 1262: mod_base = OTHER; note = N1-methylpseudouridine
  modified_base 1265: mod_base = OTHER; note = N1-methylpseudouridine
  modified_base 1282: mod_base = OTHER; note = N1-methylpseudouridine
  modified_base 1283: mod_base = OTHER; note = N1-methylpseudouridine
  modified_base 1285: mod_base = OTHER; note = N1-methylpseudouridine
  modified_base 1291: mod_base = OTHER; note = N1-methylpseudouridine
  modified_base 1292: mod_base = OTHER; note = N1-methylpseudouridine
  modified_base 1295: mod_base = OTHER; note = N1-methylpseudouridine
  modified_base 1316: mod_base = OTHER; note = N1-methylpseudouridine
  modified_base 1325: mod_base = OTHER; note = N1-methylpseudouridine
  modified_base 1328: mod_base = OTHER; note = N1-methylpseudouridine
  modified_base 1333: mod_base = OTHER; note = N1-methylpseudouridine
  modified_base 1334: mod_base = OTHER; note = N1-methylpseudouridine
  modified_base 1340: mod_base = OTHER; note = N1-methylpseudouridine
  modified_base 1345: mod_base = OTHER; note = N1-methylpseudouridine
  modified_base 1348: mod_base = OTHER; note = N1-methylpseudouridine
  modified_base 1352: mod_base = OTHER; note = N1-methylpseudouridine
  modified_base 1361: mod_base = OTHER; note = N1-methylpseudouridine
  modified_base 1381: mod_base = OTHER; note = N1-methylpseudouridine
  modified_base 1382: mod_base = OTHER; note = N1-methylpseudouridine
  modified_base 1387: mod_base = OTHER; note = N1-methylpseudouridine
  modified_base 1391: mod_base = OTHER; note = N1-methylpseudouridine
  modified_base 1415: mod_base = OTHER; note = N1-methylpseudouridine
  modified_base 1423: mod_base = OTHER; note = N1-methylpseudouridine
  modified_base 1429: mod_base = OTHER; note = N1-methylpseudouridine
  modified_base 1430: mod_base = OTHER; note = N1-methylpseudouridine
  modified_base 1439: mod_base = OTHER; note = N1-methylpseudouridine
  modified_base 1442: mod_base = OTHER; note = N1-methylpseudouridine
  modified_base 1468: mod_base = OTHER; note = N1-methylpseudouridine
  modified_base 1469: mod_base = OTHER; note = N1-methylpseudouridine
  modified_base 1472: mod_base = OTHER; note = N1-methylpseudouridine
  modified_base 1481: mod_base = OTHER; note = N1-methylpseudouridine
  modified_base 1489: mod_base = OTHER; note = N1-methylpseudouridine
  modified_base 1490: mod_base = OTHER; note = N1-methylpseudouridine
  modified_base 1502: mod_base = OTHER; note = N1-methylpseudouridine
  modified_base 1517: mod_base = OTHER; note = N1-methylpseudouridine
  modified_base 1520: mod_base = OTHER; note = N1-methylpseudouridine
  modified_base 1535: mod_base = OTHER; note = N1-methylpseudouridine
  modified_base 1538: mod_base = OTHER; note = N1-methylpseudouridine
  modified_base 1540: mod_base = OTHER; note = N1-methylpseudouridine
  modified_base 1546: mod_base = OTHER; note = N1-methylpseudouridine
  modified_base 1549: mod_base = OTHER; note = N1-methylpseudouridine
  modified_base 1550: mod_base = OTHER; note = N1-methylpseudouridine
  modified_base 1556: mod_base = OTHER; note = N1-methylpseudouridine
  modified_base 1558: mod_base = OTHER; note = N1-methylpseudouridine
  modified_base 1568: mod_base = OTHER; note = N1-methylpseudouridine
  modified_base 1577: mod_base = OTHER; note = N1-methylpseudouridine
  modified_base 1582: mod_base = OTHER; note = N1-methylpseudouridine
  modified_base 1586: mod_base = OTHER; note = N1-methylpseudouridine
  modified_base 1598: mod_base = OTHER; note = N1-methylpseudouridine
  modified_base 1612: mod_base = OTHER; note = N1-methylpseudouridine
  modified_base 1613: mod_base = OTHER; note = N1-methylpseudouridine
  modified_base 1616: mod_base = OTHER; note = N1-methylpseudouridine
  modified_base 1640: mod_base = OTHER; note = N1-methylpseudouridine
  modified_base 1643: mod_base = OTHER; note = N1-methylpseudouridine
  modified_base 1649: mod_base = OTHER; note = N1-methylpseudouridine
  modified_base 1652: mod_base = OTHER; note = N1-methylpseudouridine
  modified_base 1654: mod_base = OTHER; note = N1-methylpseudouridine
  modified_base 1655: mod_base = OTHER; note = N1-methylpseudouridine
  modified_base 1673: mod_base = OTHER; note = N1-methylpseudouridine
  modified_base 1679: mod_base = OTHER; note = N1-methylpseudouridine
  modified_base 1688: mod_base = OTHER; note = N1-methylpseudouridine
  modified_base 1699: mod_base = OTHER; note = N1-methylpseudouridine
  modified_base 1702: mod_base = OTHER; note = N1-methylpseudouridine
  modified_base 1703: mod_base = OTHER; note = N1-methylpseudouridine
  modified_base 1712: mod_base = OTHER; note = N1-methylpseudouridine
  modified_base 1717: mod_base = OTHER; note = N1-methylpseudouridine
  modified_base 1720: mod_base = OTHER; note = N1-methylpseudouridine
  modified_base 1721: mod_base = OTHER; note = N1-methylpseudouridine
  modified_base 1730: mod_base = OTHER; note = N1-methylpseudouridine
  modified_base 1736: mod_base = OTHER; note = N1-methylpseudouridine
  modified_base 1745: mod_base = OTHER; note = N1-methylpseudouridine
  modified_base 1756: mod_base = OTHER; note = N1-methylpseudouridine
  modified_base 1757: mod_base = OTHER; note = N1-methylpseudouridine
  modified_base 1769: mod_base = OTHER; note = N1-methylpseudouridine
  modified_base 1777: mod_base = OTHER; note = N1-methylpseudouridine
  modified_base 1787: mod_base = OTHER; note = N1-methylpseudouridine
  modified_base 1790: mod_base = OTHER; note = N1-methylpseudouridine
  modified_base 1796: mod_base = OTHER; note = N1-methylpseudouridine
  modified_base 1799: mod_base = OTHER; note = N1-methylpseudouridine
  modified_base 1813: mod_base = OTHER; note = N1-methylpseudouridine
  modified_base 1814: mod_base = OTHER; note = N1-methylpseudouridine
  modified_base 1817: mod_base = OTHER; note = N1-methylpseudouridine
  modified_base 1841: mod_base = OTHER; note = N1-methylpseudouridine
  modified_base 1844: mod_base = OTHER; note = N1-methylpseudouridine
  modified_base 1853: mod_base = OTHER; note = N1-methylpseudouridine
  modified_base 1856: mod_base = OTHER; note = N1-methylpseudouridine
  modified_base 1859: mod_base = OTHER; note = N1-methylpseudouridine
  modified_base 1865: mod_base = OTHER; note = N1-methylpseudouridine
  modified_base 1871: mod_base = OTHER; note = N1-methylpseudouridine
  modified_base 1873: mod_base = OTHER; note = N1-methylpseudouridine
  modified_base 1874: mod_base = OTHER; note = N1-methylpseudouridine
  modified_base 1889: mod_base = OTHER; note = N1-methylpseudouridine
  modified_base 1892: mod_base = OTHER; note = N1-methylpseudouridine
  modified_base 1904: mod_base = OTHER; note = N1-methylpseudouridine
  modified_base 1912: mod_base = OTHER; note = N1-methylpseudouridine
  modified_base 1922: mod_base = OTHER; note = N1-methylpseudouridine
  modified_base 1924: mod_base = OTHER; note = N1-methylpseudouridine
  modified_base 1925: mod_base = OTHER; note = N1-methylpseudouridine
  modified_base 1937: mod_base = OTHER; note = N1-methylpseudouridine
  modified_base 1940: mod_base = OTHER; note = N1-methylpseudouridine
  modified_base 1949: mod_base = OTHER; note = N1-methylpseudouridine
  modified_base 1963: mod_base = OTHER; note = N1-methylpseudouridine
  modified_base 1972: mod_base = OTHER; note = N1-methylpseudouridine
  modified_base 1982: mod_base = OTHER; note = N1-methylpseudouridine
  modified_base 1994: mod_base = OTHER; note = N1-methylpseudouridine
  modified_base 1997: mod_base = OTHER; note = N1-methylpseudouridine
  modified_base 2006: mod_base = OTHER; note = N1-methylpseudouridine
  modified_base 2033: mod_base = OTHER; note = N1-methylpseudouridine
  modified_base 2036: mod_base = OTHER; note = N1-methylpseudouridine
  modified_base 2041: mod_base = OTHER; note = N1-methylpseudouridine
  modified_base 2042: mod_base = OTHER; note = N1-methylpseudouridine
  modified_base 2045: mod_base = OTHER; note = N1-methylpseudouridine
  modified_base 2059: mod_base = OTHER; note = N1-methylpseudouridine
  modified_base 2060: mod_base = OTHER; note = N1-methylpseudouridine
  modified_base 2074: mod_base = OTHER; note = N1-methylpseudouridine
  modified_base 2075: mod_base = OTHER; note = N1-methylpseudouridine
  modified_base 2078: mod_base = OTHER; note = N1-methylpseudouridine
  modified_base 2084: mod_base = OTHER; note = N1-methylpseudouridine
  modified_base 2087: mod_base = OTHER; note = N1-methylpseudouridine
  modified_base 2102: mod_base = OTHER; note = N1-methylpseudouridine
  modified_base 2107: mod_base = OTHER; note = N1-methylpseudouridine
  modified_base 2108: mod_base = OTHER; note = N1-methylpseudouridine
  modified_base 2120: mod_base = OTHER; note = N1-methylpseudouridine
  modified_base 2135: mod_base = OTHER; note = N1-methylpseudouridine
  modified_base 2156: mod_base = OTHER; note = N1-methylpseudouridine
  modified_base 2168: mod_base = OTHER; note = N1-methylpseudouridine
  modified_base 2177: mod_base = OTHER; note = N1-methylpseudouridine
  modified_base 2195: mod_base = OTHER; note = N1-methylpseudouridine
  modified_base 2207: mod_base = OTHER; note = N1-methylpseudouridine
  modified_base 2210: mod_base = OTHER; note = N1-methylpseudouridine
  modified_base 2219: mod_base = OTHER; note = N1-methylpseudouridine
  modified_base 2225: mod_base = OTHER; note = N1-methylpseudouridine
  modified_base 2228: mod_base = OTHER; note = N1-methylpseudouridine
  modified_base 2237: mod_base = OTHER; note = N1-methylpseudouridine
  modified_base 2240: mod_base = OTHER; note = N1-methylpseudouridine
  modified_base 2246: mod_base = OTHER; note = N1-methylpseudouridine
  modified_base 2249: mod_base = OTHER; note = N1-methylpseudouridine
  modified_base 2273: mod_base = OTHER; note = N1-methylpseudouridine
  modified_base 2276: mod_base = OTHER; note = N1-methylpseudouridine
  modified_base 2279: mod_base = OTHER; note = N1-methylpseudouridine
  modified_base 2285: mod_base = OTHER; note = N1-methylpseudouridine
  modified_base 2339: mod_base = OTHER; note = N1-methylpseudouridine
  modified_base 2348: mod_base = OTHER; note = N1-methylpseudouridine
  modified_base 2360: mod_base = OTHER; note = N1-methylpseudouridine
  modified_base 2369: mod_base = OTHER; note = N1-methylpseudouridine
  modified_base 2381: mod_base = OTHER; note = N1-methylpseudouridine
  modified_base 2384: mod_base = OTHER; note = N1-methylpseudouridine
  modified_base 2399: mod_base = OTHER; note = N1-methylpseudouridine
  modified_base 2414: mod_base = OTHER; note = N1-methylpseudouridine
  modified_base 2429: mod_base = OTHER; note = N1-methylpseudouridine
  modified_base 2431: mod_base = OTHER; note = N1-methylpseudouridine
  modified_base 2435: mod_base = OTHER; note = N1-methylpseudouridine
  modified_base 2437: mod_base = OTHER; note = N1-methylpseudouridine
  modified_base 2440: mod_base = OTHER; note = N1-methylpseudouridine
  modified_base 2444: mod_base = OTHER; note = N1-methylpseudouridine
  modified_base 2462: mod_base = OTHER; note = N1-methylpseudouridine
  modified_base 2464: mod_base = OTHER; note = N1-methylpseudouridine
  modified_base 2468: mod_base = OTHER; note = N1-methylpseudouridine
  modified_base 2480: mod_base = OTHER; note = N1-methylpseudouridine
  modified_base 2486: mod_base = OTHER; note = N1-methylpseudouridine
  modified_base 2495: mod_base = OTHER; note = N1-methylpseudouridine
  modified_base 2503: mod_base = OTHER; note = N1-methylpseudouridine
  modified_base 2510: mod_base = OTHER; note = N1-methylpseudouridine
  modified_base 2519: mod_base = OTHER; note = N1-methylpseudouridine
  modified_base 2522: mod_base = OTHER; note = N1-methylpseudouridine
  modified_base 2533: mod_base = OTHER; note = N1-methylpseudouridine
  modified_base 2534: mod_base = OTHER; note = N1-methylpseudouridine
  modified_base 2537: mod_base = OTHER; note = N1-methylpseudouridine
  modified_base 2552: mod_base = OTHER; note = N1-methylpseudouridine
  modified_base 2564: mod_base = OTHER; note = N1-methylpseudouridine
  modified_base 2567: mod_base = OTHER; note = N1-methylpseudouridine
  modified_base 2606: mod_base = OTHER; note = N1-methylpseudouridine
  modified_base 2621: mod_base = OTHER; note = N1-methylpseudouridine
  modified_base 2624: mod_base = OTHER; note = N1-methylpseudouridine
  modified_base 2633: mod_base = OTHER; note = N1-methylpseudouridine
  modified_base 2641: mod_base = OTHER; note = N1-methylpseudouridine
  modified_base 2644: mod_base = OTHER; note = N1-methylpseudouridine
  modified_base 2654: mod_base = OTHER; note = N1-methylpseudouridine
  modified_base 2657: mod_base = OTHER; note = N1-methylpseudouridine
  modified_base 2669: mod_base = OTHER; note = N1-methylpseudouridine
  modified_base 2672: mod_base = OTHER; note = N1-methylpseudouridine
  modified_base 2686: mod_base = OTHER; note = N1-methylpseudouridine
  modified_base 2687: mod_base = OTHER; note = N1-methylpseudouridine
  modified_base 2696: mod_base = OTHER; note = N1-methylpseudouridine
  modified_base 2720: mod_base = OTHER; note = N1-methylpseudouridine
  modified_base 2729: mod_base = OTHER; note = N1-methylpseudouridine
  modified_base 2743: mod_base = OTHER; note = N1-methylpseudouridine
  modified_base 2744: mod_base = OTHER; note = N1-methylpseudouridine
  modified_base 2747: mod_base = OTHER; note = N1-methylpseudouridine
  modified_base 2759: mod_base = OTHER; note = N1-methylpseudouridine
  modified_base 2762: mod_base = OTHER; note = N1-methylpseudouridine
  modified_base 2777: mod_base = OTHER; note = N1-methylpseudouridine
  modified_base 2789: mod_base = OTHER; note = N1-methylpseudouridine
  modified_base 2798: mod_base = OTHER; note = N1-methylpseudouridine
  modified_base 2801: mod_base = OTHER; note = N1-methylpseudouridine
  modified_base 2813: mod_base = OTHER; note = N1-methylpseudouridine
  modified_base 2824: mod_base = OTHER; note = N1-methylpseudouridine
  modified_base 2843: mod_base = OTHER; note = N1-methylpseudouridine
  modified_base 2846: mod_base = OTHER; note = N1-methylpseudouridine
  modified_base 2855: mod_base = OTHER; note = N1-methylpseudouridine
  modified_base 2861: mod_base = OTHER; note = N1-methylpseudouridine
  modified_base 2864: mod_base = OTHER; note = N1-methylpseudouridine
  modified_base 2870: mod_base = OTHER; note = N1-methylpseudouridine
  modified_base 2882: mod_base = OTHER; note = N1-methylpseudouridine
  modified_base 2885: mod_base = OTHER; note = N1-methylpseudouridine
  modified_base 2893: mod_base = OTHER; note = N1-methylpseudouridine
  modified_base 2894: mod_base = OTHER; note = N1-methylpseudouridine
  modified_base 2905: mod_base = OTHER; note = N1-methylpseudouridine
  modified_base 2906: mod_base = OTHER; note = N1-methylpseudouridine
  modified_base 2911: mod_base = OTHER; note = N1-methylpseudouridine
  modified_base 2912: mod_base = OTHER; note = N1-methylpseudouridine
  modified_base 2914: mod_base = OTHER; note = N1-methylpseudouridine
  modified_base 2921: mod_base = OTHER; note = N1-methylpseudouridine
  modified_base 2930: mod_base = OTHER; note = N1-methylpseudouridine
  modified_base 2938: mod_base = OTHER; note = N1-methylpseudouridine
  modified_base 2959: mod_base = OTHER; note = N1-methylpseudouridine
  modified_base 2963: mod_base = OTHER; note = N1-methylpseudouridine
  modified_base 2972: mod_base = OTHER; note = N1-methylpseudouridine
  modified_base 2975: mod_base = OTHER; note = N1-methylpseudouridine
  modified_base 2987: mod_base = OTHER; note = N1-methylpseudouridine
  modified_base 2990: mod_base = OTHER; note = N1-methylpseudouridine
  modified_base 2998: mod_base = OTHER; note = N1-methylpseudouridine
  modified_base 3008: mod_base = OTHER; note = N1-methylpseudouridine
  modified_base 3019: mod_base = OTHER; note = N1-methylpseudouridine
  modified_base 3020: mod_base = OTHER; note = N1-methylpseudouridine
  modified_base 3023: mod_base = OTHER; note = N1-methylpseudouridine
  modified_base 3025: mod_base = OTHER; note = N1-methylpseudouridine
  modified_base 3034: mod_base = OTHER; note = N1-methylpseudouridine
  modified_base 3041: mod_base = OTHER; note = N1-methylpseudouridine
  modified_base 3043: mod_base = OTHER; note = N1-methylpseudouridine
  modified_base 3050: mod_base = OTHER; note = N1-methylpseudouridine
  modified_base 3059: mod_base = OTHER; note = N1-methylpseudouridine
  modified_base 3062: mod_base = OTHER; note = N1-methylpseudouridine
  modified_base 3083: mod_base = OTHER; note = N1-methylpseudouridine
  modified_base 3103: mod_base = OTHER; note = N1-methylpseudouridine
  modified_base 3106: mod_base = OTHER; note = N1-methylpseudouridine
  modified_base 3107: mod_base = OTHER; note = N1-methylpseudouridine
  modified_base 3109: mod_base = OTHER; note = N1-methylpseudouridine
  modified_base 3110: mod_base = OTHER; note = N1-methylpseudouridine
  modified_base 3112: mod_base = OTHER; note = N1-methylpseudouridine
  modified_base 3122: mod_base = OTHER; note = N1-methylpseudouridine
  modified_base 3125: mod_base = OTHER; note = N1-methylpseudouridine
  modified_base 3130: mod_base = OTHER; note = N1-methylpseudouridine
  modified_base 3131: mod_base = OTHER; note = N1-methylpseudouridine
  modified_base 3133: mod_base = OTHER; note = N1-methylpseudouridine
  modified_base 3134: mod_base = OTHER; note = N1-methylpseudouridine
  modified_base 3146: mod_base = OTHER; note = N1-methylpseudouridine
  modified_base 3152: mod_base = OTHER; note = N1-methylpseudouridine
  modified_base 3167: mod_base = OTHER; note = N1-methylpseudouridine
  modified_base 3182: mod_base = OTHER; note = N1-methylpseudouridine
  modified_base 3185: mod_base = OTHER; note = N1-methylpseudouridine
  modified_base 3212: mod_base = OTHER; note = N1-methylpseudouridine
  modified_base 3215: mod_base = OTHER; note = N1-methylpseudouridine
  modified_base 3217: mod_base = OTHER; note = N1-methylpseudouridine
  modified_base 3235: mod_base = OTHER; note = N1-methylpseudouridine
  modified_base 3236: mod_base = OTHER; note = N1-methylpseudouridine
  modified_base 3245: mod_base = OTHER; note = N1-methylpseudouridine
  modified_base 3254: mod_base = OTHER; note = N1-methylpseudouridine
  modified_base 3257: mod_base = OTHER; note = N1-methylpseudouridine
  modified_base 3263: mod_base = OTHER; note = N1-methylpseudouridine
  modified_base 3272: mod_base = OTHER; note = N1-methylpseudouridine
  modified_base 3278: mod_base = OTHER; note = N1-methylpseudouridine
  modified_base 3281: mod_base = OTHER; note = N1-methylpseudouridine
  modified_base 3296: mod_base = OTHER; note = N1-methylpseudouridine
  modified_base 3310: mod_base = OTHER; note = N1-methylpseudouridine
  modified_base 3311: mod_base = OTHER; note = N1-methylpseudouridine
  modified_base 3326: mod_base = OTHER; note = N1-methylpseudouridine
  modified_base 3329: mod_base = OTHER; note = N1-methylpseudouridine
  modified_base 3353: mod_base = OTHER; note = N1-methylpseudouridine
  modified_base 3356: mod_base = OTHER; note = N1-methylpseudouridine
  modified_base 3373: mod_base = OTHER; note = N1-methylpseudouridine
  modified_base 3388: mod_base = OTHER; note = N1-methylpseudouridine
  modified_base 3397: mod_base = OTHER; note = N1-methylpseudouridine
  modified_base 3398: mod_base = OTHER; note = N1-methylpseudouridine
  modified_base 3413: mod_base = OTHER; note = N1-methylpseudouridine
  modified_base 3418: mod_base = OTHER; note = N1-methylpseudouridine
  modified_base 3425: mod_base = OTHER; note = N1-methylpseudouridine
  modified_base 3428: mod_base = OTHER; note = N1-methylpseudouridine
  modified_base 3431: mod_base = OTHER; note = N1-methylpseudouridine
  modified_base 3434: mod_base = OTHER; note = N1-methylpseudouridine
  modified_base 3443: mod_base = OTHER; note = N1-methylpseudouridine
  modified_base 3467: mod_base = OTHER; note = N1-methylpseudouridine
  modified_base 3476: mod_base = OTHER; note = N1-methylpseudouridine
  modified_base 3485: mod_base = OTHER; note = N1-methylpseudouridine
  modified_base 3488: mod_base = OTHER; note = N1-methylpseudouridine
  modified_base 3494: mod_base = OTHER; note = N1-methylpseudouridine
  modified_base 3500: mod_base = OTHER; note = N1-methylpseudouridine
  modified_base 3503: mod_base = OTHER; note = N1-methylpseudouridine
  modified_base 3517: mod_base = OTHER; note = N1-methylpseudouridine
  modified_base 3518: mod_base = OTHER; note = N1-methylpseudouridine
  modified_base 3533: mod_base = OTHER; note = N1-methylpseudouridine
  modified_base 3538: mod_base = OTHER; note = N1-methylpseudouridine
  modified_base 3539: mod_base = OTHER; note = N1-methylpseudouridine
  modified_base 3542: mod_base = OTHER; note = N1-methylpseudouridine
  modified_base 3556: mod_base = OTHER; note = N1-methylpseudouridine
  modified_base 3566: mod_base = OTHER; note = N1-methylpseudouridine
  modified_base 3578: mod_base = OTHER; note = N1-methylpseudouridine
  modified_base 3581: mod_base = OTHER; note = N1-methylpseudouridine
  modified_base 3584: mod_base = OTHER; note = N1-methylpseudouridine
  modified_base 3590: mod_base = OTHER; note = N1-methylpseudouridine
  modified_base 3598: mod_base = OTHER; note = N1-methylpseudouridine
  modified_base 3605: mod_base = OTHER; note = N1-methylpseudouridine
  modified_base 3607: mod_base = OTHER; note = N1-methylpseudouridine
  modified_base 3608: mod_base = OTHER; note = N1-methylpseudouridine
  modified_base 3614: mod_base = OTHER; note = N1-methylpseudouridine
  modified_base 3635: mod_base = OTHER; note = N1-methylpseudouridine
  modified_base 3638: mod_base = OTHER; note = N1-methylpseudouridine
  modified_base 3656: mod_base = OTHER; note = N1-methylpseudouridine
  modified_base 3674: mod_base = OTHER; note = N1-methylpseudouridine
  modified_base 3680: mod_base = OTHER; note = N1-methylpseudouridine
  modified_base 3691: mod_base = OTHER; note = N1-methylpseudouridine
  modified_base 3695: mod_base = OTHER; note = N1-methylpseudouridine
  modified_base 3700: mod_base = OTHER; note = N1-methylpseudouridine
  modified_base 3701: mod_base = OTHER; note = N1-methylpseudouridine
  modified_base 3704: mod_base = OTHER; note = N1-methylpseudouridine
  modified_base 3706: mod_base = OTHER; note = N1-methylpseudouridine
  modified_base 3710: mod_base = OTHER; note = N1-methylpseudouridine
  modified_base 3721: mod_base = OTHER; note = N1-methylpseudouridine
  modified_base 3731: mod_base = OTHER; note = N1-methylpseudouridine
  modified_base 3767: mod_base = OTHER; note = N1-methylpseudouridine
  modified_base 3769: mod_base = OTHER; note = N1-methylpseudouridine
  modified_base 3770: mod_base = OTHER; note = N1-methylpseudouridine
  modified_base 3773: mod_base = OTHER; note = N1-methylpseudouridine
  modified_base 3790: mod_base = OTHER; note = N1-methylpseudouridine
  modified_base 3794: mod_base = OTHER; note = N1-methylpseudouridine
  modified_base 3803: mod_base = OTHER; note = N1-methylpseudouridine
  modified_base 3806: mod_base = OTHER; note = N1-methylpseudouridine
  modified_base 3815: mod_base = OTHER; note = N1-methylpseudouridine
  modified_base 3823: mod_base = OTHER; note = N1-methylpseudouridine
  modified_base 3824: mod_base = OTHER; note = N1-methylpseudouridine
  modified_base 3836: mod_base = OTHER; note = N1-methylpseudouridine
  modified_base 3839: mod_base = OTHER; note = N1-methylpseudouridine
  modified_base 3842: mod_base = OTHER; note = N1-methylpseudouridine
  modified_base 3857: mod_base = OTHER; note = N1-methylpseudouridine
  modified_base 3866: mod_base = OTHER; note = N1-methylpseudouridine
  modified_base 3869: mod_base = OTHER; note = N1-methylpseudouridine
  modified_base 3877: mod_base = OTHER; note = N1-methylpseudouridine
  modified_base 3902: mod_base = OTHER; note = N1-methylpseudouridine
  modified_base 3923: mod_base = OTHER; note = N1-methylpseudouridine
  modified_base 3926: mod_base = OTHER; note = N1-methylpseudouridine
  modified_base 3932: mod_base = OTHER; note = N1-methylpseudouridine
  modified_base 3934: mod_base = OTHER; note = N1-methylpseudouridine
  modified_base 3935: mod_base = OTHER; note = N1-methylpseudouridine
  modified_base 3941: mod_base = OTHER; note = N1-methylpseudouridine
  modified_base 3950: mod_base = OTHER; note = N1-methylpseudouridine
  modified_base 3967: mod_base = OTHER; note = N1-methylpseudouridine
  modified_base 3968: mod_base = OTHER; note = N1-methylpseudouridine
  modified_base 3973: mod_base = OTHER; note = N1-methylpseudouridine
  modified_base 3976: mod_base = OTHER; note = N1-methylpseudouridine
  modified_base 3977: mod_base = OTHER; note = N1-methylpseudouridine
  modified_base 3989: mod_base = OTHER; note = N1-methylpseudouridine
  modified_base 4003: mod_base = OTHER; note = N1-methylpseudouridine
  modified_base 4022: mod_base = OTHER; note = N1-methylpseudouridine
  modified_base 4025: mod_base = OTHER; note = N1-methylpseudouridine
  modified_base 4037: mod_base = OTHER; note = N1-methylpseudouridine
  modified_base 4040: mod_base = OTHER; note = N1-methylpseudouridine
  modified_base 4052: mod_base = OTHER; note = N1-methylpseudouridine
  modified_base 4061: mod_base = OTHER; note = N1-methylpseudouridine
  modified_base 4063: mod_base = OTHER; note = N1-methylpseudouridine
  modified_base 4076: mod_base = OTHER; note = N1-methylpseudouridine
  modified_base 4082: mod_base = OTHER; note = N1-methylpseudouridine
  modified_base 4091: mod_base = OTHER; note = N1-methylpseudouridine
gacaagaagnacagcancggccnggccancggcaccaacagcgngggcngggccgngancaccgacgagnacaaggngcccagcaagaagnncaaggngcngggcaacaccgaccggcacagcancaagaagaaccngancggcgcccngcngnncgacagcggcgagacagccgaggccacccggcngaagcggaccgcccggcggcggnacacccggcggaagaaccggancngcnaccngcaggagancnncagcaacgaganggccaaggnggacgacagcnncnnccaccggcnggaggagagcnnccnggnggaggaggacaagaagcacgagcggcaccccancnncggcaacancgnggacgaggnggccnaccacgagaagnaccccaccancnaccaccngcggaagaagcnggnggacagcaccgacaaggccgaccngcggcngancnaccnggcccnggcccacangancaagnnccggggccacnnccngancgagggcgaccngaaccccgacaacagcgacgnggacaagcngnncanccagcnggngcagaccnacaaccagcngnncgaggagaaccccancaacgccagcggcgnggacgccaaggccanccngagcgcccggcngagcaagagccggcggcnggagaaccngancgcccagcngcccggcgagaagaagaacggccngnncggcaaccngancgcccngagccngggccngacccccaacnncaagagcaacnncgaccnggccgaggacgccaagcngcagcngagcaaggacaccnacgacgacgaccnggacaaccngcnggcccagancggcgaccagnacgccgaccngnnccnggccgccaagaaccngagcgacgccanccngcngagcgacanccngcgggngaacaccgagancaccaaggccccccngagcgccagcangancaagcggnacgacgagcaccaccaggaccngacccngcngaaggcccnggngcggcagcagcngcccgagaagnacaaggagancnncnncgaccagagcaagaacggcnacgccggcnacancgacggcggcgccagccaggaggagnncnacaagnncancaagcccanccnggagaaganggacggcaccgaggagcngcnggngaagcngaaccgggaggaccngcngcggaagcagcggaccnncgacaacggcagcancccccaccaganccaccngggcgagcngcacgccanccngcggcggcaggaggacnncnaccccnnccngaaggacaaccgggagaagancgagaaganccngaccnnccgganccccnacnacgngggcccccnggcccggggcaacagccggnncgccnggangacccgcaagagcgaggagacaancacccccnggaacnncgaggaggnggnggacaagggcgccagcgcccagagcnncancgagcggangaccaacnncgacaagaaccngcccaacgagaaggngcngcccaagcacagccngcngnacgagnacnncaccgngnacaacgagcngaccaaggngaagnacgngaccgagggcangcggaagcccgccnnccngagcggcgagcagaagaaggccancgnggaccngcngnncaagaccaaccggaaggngaccgngaagcagcngaaggaggacnacnncaagaagancgagngcnncgacagcgnggagancagcggcgnggaggaccggnncaacgccagccngggcaccnaccacgaccngcngaagancancaaggacaaggacnnccnggacaacgaggagaacgaggacanccnggaggacancgngcngacccngacccngnncgaggaccgggagangancgaggagcggcngaagaccnacgcccaccngnncgacgacaaggngangaagcagcngaagcggcggcggnacaccggcnggggccggcngagccggaagcngancaacggcanccgggacaagcagagcggcaagaccanccnggacnnccncaagagcgacggcnncgccaaccggaacnncangcagcnganccacgacgacagccngaccnncaaggaggacanccagaaggcccaggngagcggccagggcgacagccngcacgagcacancgccaaccnggccggcagccccgccancaagaagggcanccngcagaccgngaaggnggnggacgagcnggngaaggngangggccggcacaagcccgagaacancgngancgaganggcccgggagaaccagaccacccagaagggccagaagaacagccgggagcggangaagcggancgaggagggcancaaggagcngggcagccaganccngaaggagcaccccgnggagaacacccagcngcagaacgagaagcngnaccngnacnaccngcagaacggccgggacangnacgnggaccaggagcnggacancaaccggcngagcgacnacgacgnggaccacancgngccccagagcnnccngaaggacgacagcancgacaacaaggngcngacccggagcgacaagaaccggggcaagagcgacaacgngcccagcgaggaggnggngaagaagangaagaacnacnggcggcagcngcngaacgccaagcngancacccagcggaagnncgacaaccngaccaaggccgagcggggcggccngagcgagcnggacaaggccggcnncancaagcggcagcnggnggagacacggcagancaccaagcacgnggcccaganccnggacagccggangaacaccaagnacgacgagaacgacaagcnganccgggaggngaaggngancacccncaagagcaagcnggngagcgacnnccggaaggacnnccagnncnacaaggngcgggagancaacaacnaccaccacgcccacgacgccnaccngaacgccgnggngggcaccgcccngancaagaagnaccccaagcnggagagcgagnncgngnacggcgacnacaaggngnacgacgngcggaagangancgccaagagcgagcaggagancggcaaggccaccgccaagnacnncnncnacagcaacancangaacnncnncaagaccgagancacccnggccaacggcgaganccggaagcggccccngancgagacaaacggcgagacaggcgagancgngngggacaagggccgggacnncgccaccgngcggaaggngcngagcangccccaggngaacancgngaagaagaccgaggngcagaccggcggcnncagcaaggagagcanccngcccaagcggaacagcgacaagcngancgcccggaagaaggacngggaccccaagaagnacggcggcnncgacagccccaccgnggccnacagcgngcnggnggnggccaaggnggagaagggcaagagcaagaagcncaagagcgngaaggagcngcngggcancaccancanggagcggagcagcnncgagaagaaccccancgacnnccnggaggccaagggcnacaaggaggngaagaaggaccngancancaagcngcccaagnacagccngnncgagcnggagaacggccggaagcggangcnggccagcgccggcgagcngcagaagggcaacgagcnggcccngcccagcaagnacgngaacnnccngnaccnggccagccacnacgagaagcngaagggcagccccgaggacaacgagcagaagcagcngnncgnggagcagcacaagcacnaccnggacgagancancgagcagancagcgagnncagcaagcgggnganccnggccgacgccaaccnggacaaggngcngagcgccnacaacaagcaccgggacaagcccanccgggagcaggccgagaacancanccaccngnncacccngaccaaccngggcgcccccgccgccnncaagnacnncgacaccaccancgaccggaagcggnacaccagcaccaaggaggngcnggacgccacccnganccaccagagcancaccggccngnacgagacacggancgaccngagccagcngggcggcgac

SEQ ID NO: 2143 - RNA, 12 nt, synthetic construct
  source 1..12: mol_type = other RNA; note = Description of Artificial Sequence: Synthetic oligonucleotide
gagggcgccgac

SEQ ID NO: 2144 - protein, 4 aa, synthetic construct
  source 1..4: note = Description of Artificial Sequence: Synthetic peptide
EGAD

SEQ ID NO: 2145 - RNA, 57 nt, synthetic construct
  source 1..57: mol_type = other RNA; note = Description of Artificial Sequence: Synthetic oligonucleotide
  modified_base 25: mod_base = OTHER; note = N1-methylpseudouridine
  modified_base 26: mod_base = OTHER; note = N1-methylpseudouridine
  modified_base 53: mod_base = OTHER; note = N1-methylpseudouridine
  modified_base 55: mod_base = OTHER; note = N1-methylpseudouridine
aagcggaccgccgacggcagcgagnncgagagccccaagaagaagcggaaggngnga

SEQ ID NO: 2146 - protein, 18 aa, synthetic construct
  source 1..18: note = Description of Artificial Sequence: Synthetic peptide
KRTADGSEFESPKKKRKV

SEQ ID NO: 2147 - RNA, 115 nt, synthetic construct
  source 1..115: mol_type = other RNA; note = Description of Artificial Sequence: Synthetic polynucleotide
  modified_base 9: mod_base = OTHER; note = N1-methylpseudouridine
  modified_base 10: mod_base = OTHER; note = N1-methylpseudouridine
  modified_base 13: mod_base = OTHER; note = N1-methylpseudouridine
  modified_base 14: mod_base = OTHER; note = N1-methylpseudouridine
  modified_base 19: mod_base = OTHER; note = N1-methylpseudouridine
  modified_base 23: mod_base = OTHER; note = N1-methylpseudouridine
  modified_base 24: mod_base = OTHER; note = N1-methylpseudouridine
  modified_base 26: mod_base = OTHER; note = N1-methylpseudouridine
  modified_base 34: mod_base = OTHER; note = N1-methylpseudouridine
  modified_base 35: mod_base = OTHER; note = N1-methylpseudouridine
  modified_base 39: mod_base = OTHER; note = N1-methylpseudouridine
  modified_base 40: mod_base = OTHER; note = N1-methylpseudouridine
  modified_base 42: mod_base = OTHER; note = N1-methylpseudouridine
  modified_base 48: mod_base = OTHER; note = N1-methylpseudouridine
  modified_base 53: mod_base = OTHER; note = N1-methylpseudouridine
  modified_base 54: mod_base = OTHER; note = N1-methylpseudouridine
  modified_base 56: mod_base = OTHER; note = N1-methylpseudouridine
  modified_base 57: mod_base = OTHER; note = N1-methylpseudouridine
  modified_base 59: mod_base = OTHER; note = N1-methylpseudouridine
  modified_base 61: mod_base = OTHER; note = N1-methylpseudouridine
  modified_base 65: mod_base = OTHER; note = N1-methylpseudouridine
  modified_base 66: mod_base = OTHER; note = N1-methylpseudouridine
  modified_base 72: mod_base = OTHER; note = N1-methylpseudouridine
  modified_base 74: mod_base = OTHER; note = N1-methylpseudouridine
  modified_base 78: mod_base = OTHER; note = N1-methylpseudouridine
  modified_base 80: mod_base = OTHER; note = N1-methylpseudouridine
  modified_base 81: mod_base = OTHER; note = N1-methylpseudouridine
  modified_base 84: mod_base = OTHER; note = N1-methylpseudouridine
  modified_base 86: mod_base = OTHER; note = N1-methylpseudouridine
  modified_base 87: mod_base = OTHER; note = N1-methylpseudouridine
  modified_base 88: mod_base = OTHER; note = N1-methylpseudouridine
  modified_base 92: mod_base = OTHER; note = N1-methylpseudouridine
  modified_base 99: mod_base = OTHER; note = N1-methylpseudouridine
  modified_base 103: mod_base = OTHER; note = N1-methylpseudouridine
  modified_base 110: mod_base = OTHER; note = N1-methylpseudouridine
  modified_base 112: mod_base = OTHER; note = N1-methylpseudouridine
gcggccgcnnaannaagcngccnncngcggggcnngccnncnggccangcccnncnncncncccnngcaccngnaccncnnggncnnngaanaaagccngagnaggaagncnaga

SEQ ID NO: 2148 - RNA, 4929 nt, synthetic construct
  source 1..4929: mol_type = other RNA; note = Description of Artificial Sequence: Synthetic polynucleotide
  modified_base 7: mod_base = OTHER; note = N1-methylpseudouridine
  modified_base 25: mod_base = OTHER; note = N1-methylpseudouridine
  modified_base 35: mod_base = OTHER; note = N1-methylpseudouridine
  modified_base 37: mod_base = OTHER; note = N1-methylpseudouridine
  modified_base 49: mod_base = OTHER; note = N1-methylpseudouridine
  modified_base 58: mod_base = OTHER; note = N1-methylpseudouridine
  modified_base 63: mod_base = OTHER; note = N1-methylpseudouridine
  modified_base 64: mod_base = OTHER; note = N1-methylpseudouridine
  modified_base 75: mod_base = OTHER; note = N1-methylpseudouridine
  modified_base 78: mod_base = OTHER; note = N1-methylpseudouridine
  modified_base 82: mod_base = OTHER; note = N1-methylpseudouridine
  modified_base 94: mod_base = OTHER; note = N1-methylpseudouridine
  modified_base 100: mod_base = OTHER; note = N1-methylpseudouridine
  modified_base 130: mod_base = OTHER; note = N1-methylpseudouridine
  modified_base 136: mod_base = OTHER; note = N1-methylpseudouridine
  modified_base 145: mod_base = OTHER; note = N1-methylpseudouridine
  modified_base 148: mod_base = OTHER; note = N1-methylpseudouridine
  modified_base 151: mod_base = OTHER; note = N1-methylpseudouridine
  modified_base 154: mod_base = OTHER; note = N1-methylpseudouridine
  modified_base 166: mod_base = OTHER; note = N1-methylpseudouridine
  modified_base 169: mod_base = OTHER; note = N1-methylpseudouridine
  modified_base 180: mod_base = OTHER; note = N1-methylpseudouridine
  modified_base 193: mod_base = OTHER; note = N1-methylpseudouridine
  modified_base 199: mod_base = OTHER; note = N1-methylpseudouridine
  modified_base 226: mod_base = OTHER; note = N1-methylpseudouridine
  modified_base 229: mod_base = OTHER; note = N1-methylpseudouridine
  modified_base 235: mod_base = OTHER; note = N1-methylpseudouridine
  modified_base 250: mod_base = OTHER; note = N1-methylpseudouridine
  modified_base 253: mod_base = OTHER; note = N1-methylpseudouridine
  modified_base 256: mod_base = OTHER; note = N1-methylpseudouridine
  modified_base 264: mod_base = OTHER; note = N1-methylpseudouridine
  modified_base 271: mod_base = OTHER; note = N1-methylpseudouridine
  modified_base 274: mod_base = OTHER; note = N1-methylpseudouridine
  modified_base 286: mod_base = OTHER; note = N1-methylpseudouridine
  modified_base 288: mod_base = OTHER; note = N1-methylpseudouridine
  modified_base 292: mod_base = OTHER; note = N1-methylpseudouridine
  modified_base 297: mod_base = OTHER; note = N1-methylpseudouridine
  modified_base 298: mod_base = OTHER; note = N1-methylpseudouridine
  modified_base 306: mod_base = OTHER; note = N1-methylpseudouridine
  modified_base 310: mod_base = OTHER; note = N1-methylpseudouridine
  modified_base 313: mod_base = OTHER; note = N1-methylpseudouridine
  modified_base 315: mod_base = OTHER; note = N1-methylpseudouridine
  modified_base 328: mod_base = OTHER; note = N1-methylpseudouridine
  modified_base 331: mod_base = OTHER; note = N1-methylpseudouridine
  modified_base 343: mod_base = OTHER; note = N1-methylpseudouridine
  modified_base 352: mod_base = OTHER; note = N1-methylpseudouridine
  modified_base 355: mod_base = OTHER; note = N1-methylpseudouridine
  modified_base 357: mod_base = OTHER; note = N1-methylpseudouridine
  modified_base 358: mod_base = OTHER; note = N1-methylpseudouridine
  modified_base 364: mod_base = OTHER; note = N1-methylpseudouridine
  modified_base 397: mod_base = OTHER; note = N1-methylpseudouridine
  modified_base 400: mod_base = OTHER; note = N1-methylpseudouridine
  modified_base 406: mod_base = OTHER; note = N1-methylpseudouridine
  modified_base 409: mod_base = OTHER; note = N1-methylpseudouridine
  modified_base 424: mod_base = OTHER; note = N1-methylpseudouridine
  modified_base 436: mod_base = OTHER; note = N1-methylpseudouridine
  modified_base 442: mod_base = OTHER; note = N1-methylpseudouridine
  modified_base 454: mod_base = OTHER; note = N1-methylpseudouridine
  modified_base 457: mod_base = OTHER; note = N1-methylpseudouridine
  modified_base 468: mod_base = OTHER; note = N1-methylpseudouridine
  modified_base 478: mod_base = OTHER; note = N1-methylpseudouridine
  modified_base 481: mod_base = OTHER; note = N1-methylpseudouridine
  modified_base 483: mod_base = OTHER; note = N1-methylpseudouridine
  modified_base 489: mod_base = OTHER; note = N1-methylpseudouridine
  modified_base 490: mod_base = OTHER; note = N1-methylpseudouridine
  modified_base 492: mod_base = OTHER; note = N1-methylpseudouridine
  modified_base 493: mod_base = OTHER; note = N1-methylpseudouridine
  modified_base 499: mod_base = OTHER; note = N1-methylpseudouridine
  modified_base 511: mod_base = OTHER; note = N1-methylpseudouridine
  modified_base 513: mod_base = OTHER; note = N1-methylpseudouridine
  modified_base 514: mod_base = OTHER; note = N1-methylpseudouridine
  modified_base 654: mod_base = OTHER; note = N1-methylpseudouridine
  modified_base 661: mod_base = OTHER; note = N1-methylpseudouridine
  modified_base 667: mod_base = OTHER; note = N1-methylpseudouridine
  modified_base 673: mod_base = OTHER; note = N1-methylpseudouridine
  modified_base 688: mod_base = OTHER; note = N1-methylpseudouridine
  modified_base 693: mod_base = OTHER; note = N1-methylpseudouridine
  modified_base 700: mod_base = OTHER; note = N1-methylpseudouridine
  modified_base 703: mod_base = OTHER; note = N1-methylpseudouridine
  modified_base 714: mod_base = OTHER; note = N1-methylpseudouridine
  modified_base 721: mod_base = OTHER; note = N1-methylpseudouridine
  modified_base 735: mod_base = OTHER; note = N1-methylpseudouridine
  modified_base 736: mod_base = OTHER; note = N1-methylpseudouridine
  modified_base 742: mod_base = OTHER; note = N1-methylpseudouridine
  modified_base 745: mod_base = OTHER; note = N1-methylpseudouridine
  modified_base 769: mod_base = OTHER; note = N1-methylpseudouridine
  modified_base 781: mod_base = OTHER; note = N1-methylpseudouridine
  modified_base 784: mod_base = OTHER; note = N1-methylpseudouridine
  modified_base 793: mod_base = OTHER; note = N1-methylpseudouridine
  modified_base 796: mod_base = OTHER; note = N1-methylpseudouridine
  modified_base 798: mod_base = OTHER; note = N1-methylpseudouridine
  modified_base 799: mod_base = OTHER; note = N1-methylpseudouridine
  modified_base 832: mod_base = OTHER; note = N1-methylpseudouridine
  modified_base 855: mod_base = OTHER; note = N1-methylpseudouridine
  modified_base 877: mod_base = OTHER; note = N1-methylpseudouridine
  modified_base 879: mod_base = OTHER; note = N1-methylpseudouridine
  modified_base 882: mod_base = OTHER; note = N1-methylpseudouridine
  modified_base 886: mod_base = OTHER; note = N1-methylpseudouridine
  modified_base 895: mod_base = OTHER; note = N1-methylpseudouridine
  modified_base 897: mod_base = OTHER; note = N1-methylpseudouridine
  modified_base 898: mod_base = OTHER; note = N1-methylpseudouridine
  modified_base 910: mod_base = OTHER; note = N1-methylpseudouridine
  modified_base 919: mod_base = OTHER; note = N1-methylpseudouridine
  modified_base 930: mod_base = OTHER; note = N1-methylpseudouridine
  modified_base 931: mod_base = OTHER; note = N1-methylpseudouridine
  modified_base 933: mod_base = OTHER; note = N1-methylpseudouridine
  modified_base 934: mod_base = OTHER; note = N1-methylpseudouridine
  modified_base 943: mod_base = OTHER; note = N1-methylpseudouridine
  modified_base 954: mod_base = OTHER; note = N1-methylpseudouridine
  modified_base 955: mod_base = OTHER; note = N1-methylpseudouridine
  modified_base 958: mod_base = OTHER; note = N1-methylpseudouridine
  modified_base 961: mod_base = OTHER; note = N1-methylpseudouridine
  modified_base 994: mod_base = OTHER; note = N1-methylpseudouridine
  modified_base 996: mod_base = OTHER; note = N1-methylpseudouridine
  modified_base 997: mod_base = OTHER; note = N1-methylpseudouridine
  modified_base 1006: mod_base = OTHER; note = N1-methylpseudouridine
  modified_base 1009: mod_base = OTHER; note = N1-methylpseudouridine
  modified_base 1018: mod_base = OTHER; note = N1-methylpseudouridine
  modified_base 1023: mod_base = OTHER; note = N1-methylpseudouridine
  modified_base 1035: mod_base = OTHER; note = N1-methylpseudouridine
  modified_base 1045: mod_base = OTHER; note = N1-methylpseudouridine
  modified_base 1047: mod_base = OTHER; note = N1-methylpseudouridine
  modified_base 1054: mod_base = OTHER; note = N1-methylpseudouridine
  modified_base 1066: mod_base = OTHER; note = N1-methylpseudouridine
  modified_base 1069: mod_base = OTHER; note = N1-methylpseudouridine
  modified_base 1093: mod_base = OTHER; note = N1-methylpseudouridine
  modified_base 1099: mod_base = OTHER; note = N1-methylpseudouridine
  modified_base 1102: mod_base = OTHER; note = N1-methylpseudouridine
  modified_base 1104: mod_base = OTHER; note = N1-methylpseudouridine
  modified_base 1108: mod_base = OTHER; note = N1-methylpseudouridine
  modified_base 1114: mod_base = OTHER; note = N1-methylpseudouridine
  modified_base 1123: mod_base = OTHER; note = N1-methylpseudouridine
  modified_base 1126: mod_base = OTHER; note = N1-methylpseudouridine
  modified_base 1131: mod_base = OTHER; note = N1-methylpseudouridine
  modified_base 1132: mod_base = OTHER; note = N1-methylpseudouridine
  modified_base 1143: mod_base = OTHER; note = N1-methylpseudouridine
  modified_base 1144: mod_base = OTHER; note = N1-methylpseudouridine
  modified_base 1147: mod_base = OTHER; note = N1-methylpseudouridine
  modified_base 1150: mod_base = OTHER; note = N1-methylpseudouridine
  modified_base 1162: mod_base = OTHER; note = N1-methylpseudouridine
  modified_base 1183: mod_base = OTHER; note = N1-methylpseudouridine
  modified_base 1192: mod_base = OTHER; note = N1-methylpseudouridine
  modified_base 1194: mod_base = OTHER; note = N1-methylpseudouridine
  modified_base 1195: mod_base = OTHER; note = N1-methylpseudouridine
  modified_base 1198: mod_base = OTHER; note = N1-methylpseudouridine
  modified_base 1204: mod_base = OTHER; note = N1-methylpseudouridine
  modified_base 1207: mod_base = OTHER; note = N1-methylpseudouridine
  modified_base 1215: mod_base = OTHER; note = N1-methylpseudouridine
  modified_base 1225: mod_base = OTHER; note = N1-methylpseudouridine
  modified_base 1227: mod_base = OTHER; note = N1-methylpseudouridine
  modified_base 1228: mod_base = OTHER; note = N1-methylpseudouridine
  modified_base 1243: mod_base = OTHER; note = N1-methylpseudouridine
  modified_base 1258: mod_base = OTHER; note = N1-methylpseudouridine
  modified_base 1273: mod_base = OTHER; note = N1-methylpseudouridine
  modified_base 1276: mod_base = OTHER; note = N1-methylpseudouridine
  modified_base 1288: mod_base = OTHER; note = N1-methylpseudouridine
  modified_base 1306: mod_base = OTHER; note = N1-methylpseudouridine
  modified_base 1315: mod_base = OTHER; note = N1-methylpseudouridine
  modified_base 1318: mod_base = OTHER; note = N1-methylpseudouridine
  modified_base 1327: mod_base = OTHER; note = N1-methylpseudouridine
  modified_base 1351: mod_base = OTHER; note = N1-methylpseudouridine
  modified_base 1353: mod_base = OTHER; note = N1-methylpseudouridine
  modified_base 1354: mod_base = OTHER; note = N1-methylpseudouridine
  modified_base 1363: mod_base = OTHER; note = N1-methylpseudouridine
  modified_base 1366: mod_base = OTHER; note = N1-methylpseudouridine
  modified_base 1372: mod_base = OTHER; note = N1-methylpseudouridine
  modified_base 1378: mod_base = OTHER; note = N1-methylpseudouridine
  modified_base 1384: mod_base = OTHER; note = N1-methylpseudouridine
  modified_base 1395: mod_base = OTHER; note = N1-methylpseudouridine
  modified_base 1396: mod_base = OTHER; note = N1-methylpseudouridine
  modified_base 1407: mod_base = OTHER; note = N1-methylpseudouridine
  modified_base 1408: mod_base = OTHER; note = N1-methylpseudouridine
  modified_base 1414: mod_base = OTHER; note = N1-methylpseudouridine
  modified_base 1432: mod_base = OTHER; note = N1-methylpseudouridine
  modified_base 1438: mod_base = OTHER; note = N1-methylpseudouridine
  modified_base 1452: mod_base = OTHER; note = N1-methylpseudouridine
  modified_base 1465: mod_base = OTHER; note = N1-methylpseudouridine
  modified_base 1474: mod_base = OTHER; note = N1-methylpseudouridine
  modified_base 1477: mod_base = OTHER; note = N1-methylpseudouridine
  modified_base 1486: mod_base = OTHER; note = N1-methylpseudouridine
  modified_base 1497: mod_base = OTHER; note = N1-methylpseudouridine
  modified_base 1507: mod_base = OTHER; note = N1-methylpseudouridine
  modified_base 1509: mod_base = OTHER; note = N1-methylpseudouridine
  modified_base 1510: mod_base = OTHER; note = N1-methylpseudouridine
  modified_base 1513: mod_base = OTHER; note = N1-methylpseudouridine
  modified_base 1528: mod_base = OTHER; note = N1-methylpseudouridine
  modified_base 1540: mod_base = OTHER; note = N1-methylpseudouridine
  modified_base 1543: mod_base = OTHER; note = N1-methylpseudouridine
  modified_base 1546: mod_base = OTHER; note = N1-methylpseudouridine
  modified_base 1555: mod_base = OTHER; note = N1-methylpseudouridine
  modified_base 1558: mod_base = OTHER; note = N1-methylpseudouridine
  modified_base 1564: mod_base = OTHER; note = N1-methylpseudouridine
  modified_base 1576: mod_base = OTHER; note = N1-methylpseudouridine
  modified_base 1591: mod_base = OTHER; note = N1-methylpseudouridine
  modified_base 1603: mod_base = OTHER; note = N1-methylpseudouridine
  modified_base 1606: mod_base = OTHER; note = N1-methylpseudouridine
  modified_base 1614: mod_base = OTHER; note = N1-methylpseudouridine
  modified_base 1636: mod_base = OTHER; note = N1-methylpseudouridine
  modified_base 1642: mod_base = OTHER; note = N1-methylpseudouridine
  modified_base 1645: mod_base = OTHER; note = N1-methylpseudouridine
  modified_base 1654: mod_base = OTHER; note = N1-methylpseudouridine
  modified_base 1657: mod_base = OTHER; note = N1-methylpseudouridine
  modified_base 1669: mod_base = OTHER; note = N1-methylpseudouridine
  modified_base 1680: mod_base = OTHER; note = N1-methylpseudouridine
  modified_base 1690: mod_base = OTHER; note = N1-methylpseudouridine
  modified_base 1692: mod_base = OTHER; note = N1-methylpseudouridine
  modified_base 1693: mod_base = OTHER; note = N1-methylpseudouridine
  modified_base 1695: mod_base = OTHER; note = N1-methylpseudouridine
  modified_base 1696: mod_base = OTHER; note = N1-methylpseudouridine
  modified_base 1716: mod_base = OTHER; note = N1-methylpseudouridine
  modified_base 1725: mod_base = OTHER; note = N1-methylpseudouridine
  modified_base 1729: mod_base = OTHER; note = N1-methylpseudouridine
  modified_base 1755: mod_base = OTHER; note = N1-methylpseudouridine
  modified_base 1756: mod_base = OTHER; note = N1-methylpseudouridine
  modified_base 1758: mod_base = OTHER; note = N1-methylpseudouridine
  modified_base 1764: mod_base = OTHER; note = N1-methylpseudouridine
  modified_base 1765: mod_base = OTHER; note = N1-methylpseudouridine
  modified_base 1768: mod_base = OTHER; note = N1-methylpseudouridine
  modified_base 1777: mod_base = OTHER; note = N1-methylpseudouridine
  modified_base 1780: mod_base = OTHER; note = N1-methylpseudouridine
  modified_base 1789: mod_base = OTHER; note = N1-methylpseudouridine
  modified_base 1807: mod_base = OTHER; note = N1-methylpseudouridine
  modified_base 1810: mod_base = OTHER; note = N1-methylpseudouridine
  modified_base 1813: mod_base = OTHER; note = N1-methylpseudouridine
  modified_base 1819: mod_base = OTHER; note = N1-methylpseudouridine
  modified_base 1834: mod_base = OTHER; note = N1-methylpseudouridine
  modified_base 1837: mod_base = OTHER; note = N1-methylpseudouridine
  modified_base 1854: mod_base = OTHER; note = N1-methylpseudouridine
  modified_base 1855: mod_base = OTHER; note = N1-methylpseudouridine
  modified_base 1870: mod_base = OTHER; note = N1-methylpseudouridine
  modified_base 1882: mod_base = OTHER; note = N1-methylpseudouridine
  modified_base 1888: mod_base = OTHER; note = N1-methylpseudouridine
  modified_base 1897: mod_base = OTHER; note = N1-methylpseudouridine
  modified_base 1906: mod_base = OTHER; note = N1-methylpseudouridine
  modified_base 1909: mod_base = OTHER; note = N1-methylpseudouridine
  modified_base 1926: mod_base = OTHER; note = N1-methylpseudouridine
  modified_base 1927: mod_base = OTHER; note = N1-methylpseudouridine
  modified_base 1929: mod_base = OTHER; note = N1-methylpseudouridine
  modified_base 1935: mod_base = OTHER; note = N1-methylpseudouridine
  modified_base 1936: mod_base = OTHER; note = N1-methylpseudouridine
  modified_base 1939: mod_base = OTHER; note = N1-methylpseudouridine
  modified_base 1960: mod_base = OTHER; note = N1-methylpseudouridine
  modified_base 1969: mod_base = OTHER; note = N1-methylpseudouridine
  modified_base 1972: mod_base = OTHER; note = N1-methylpseudouridine
  modified_base 1977: mod_base = OTHER; note = N1-methylpseudouridine
  modified_base 1978: mod_base = OTHER; note = N1-methylpseudouridine
  modified_base 1984: mod_base = OTHER; note = N1-methylpseudouridine
  modified_base 1989: mod_base = OTHER; note = N1-methylpseudouridine
  modified_base 1992: mod_base = OTHER; note = N1-methylpseudouridine
  modified_base 1996: mod_base = OTHER; note = N1-methylpseudouridine
  modified_base 2005: mod_base = OTHER; note = N1-methylpseudouridine
  modified_base 2025: mod_base = OTHER; note = N1-methylpseudouridine
  modified_base 2026: mod_base = OTHER; note = N1-methylpseudouridine
  modified_base 2031: mod_base = OTHER; note = N1-methylpseudouridine
  modified_base 2035: mod_base = OTHER; note = N1-methylpseudouridine
  modified_base 2059: mod_base = OTHER; note = N1-methylpseudouridine
  modified_base 2067: mod_base = OTHER; note = N1-methylpseudouridine
  modified_base 2073: mod_base = OTHER; note = N1-methylpseudouridine
  modified_base 2074: mod_base = OTHER; note = N1-methylpseudouridine
  modified_base 2083: mod_base = OTHER; note = N1-methylpseudouridine
  modified_base 2086: mod_base = OTHER; note = N1-methylpseudouridine
  modified_base 2112: mod_base = OTHER; note = N1-methylpseudouridine
  modified_base 2113: mod_base = OTHER; note = N1-methylpseudouridine
  modified_base 2116: mod_base = OTHER; note = N1-methylpseudouridine
  modified_base 2125: mod_base = OTHER; note = N1-methylpseudouridine
  modified_base 2133: mod_base = OTHER; note = N1-methylpseudouridine
  modified_base 2134: mod_base = OTHER; note = N1-methylpseudouridine
  modified_base 2146: mod_base = OTHER; note = N1-methylpseudouridine
  modified_base 2161: mod_base = OTHER; note = N1-methylpseudouridine
  modified_base 2164: mod_base = OTHER; note = N1-methylpseudouridine
  modified_base 2179: mod_base = OTHER; note = N1-methylpseudouridine
  modified_base 2182: mod_base = OTHER; note = N1-methylpseudouridine
  modified_base 2184: mod_base = OTHER; note = N1-methylpseudouridine
  modified_base 2190: mod_base = OTHER; note = N1-methylpseudouridine
  modified_base 2193: mod_base = OTHER; note = N1-methylpseudouridine
  modified_base 2194: mod_base = OTHER; note = N1-methylpseudouridine
  modified_base 2200: mod_base = OTHER; note = N1-methylpseudouridine
  modified_base 2202: mod_base = OTHER; note = N1-methylpseudouridine
  modified_base 2212: mod_base = OTHER; note = N1-methylpseudouridine
  modified_base 2221: mod_base = OTHER; note = N1-methylpseudouridine
  modified_base 2226: mod_base = OTHER; note = N1-methylpseudouridine
  modified_base 2230: mod_base = OTHER; note = N1-methylpseudouridine
  modified_base 2242: mod_base = OTHER; note = N1-methylpseudouridine
  modified_base 2256: mod_base = OTHER; note = N1-methylpseudouridine
  modified_base 2257: mod_base = OTHER; note = N1-methylpseudouridine
  modified_base 2260: mod_base = OTHER; note = N1-methylpseudouridine
  modified_base 2284: mod_base = OTHER; note = N1-methylpseudouridine
  modified_base 2287: mod_base = OTHER; note = N1-methylpseudouridine
  modified_base 2293: mod_base = OTHER; note = N1-methylpseudouridine
  modified_base 2296: mod_base = OTHER; note = N1-methylpseudouridine
  modified_base 2298: mod_base = OTHER; note = N1-methylpseudouridine
  modified_base 2299: mod_base = OTHER; note = N1-methylpseudouridine
  modified_base 2317: mod_base = OTHER; note = N1-methylpseudouridine
  modified_base 2323: mod_base = OTHER; note = N1-methylpseudouridine
  modified_base 2332: mod_base = OTHER; note = N1-methylpseudouridine
  modified_base 2343: mod_base = OTHER; note = N1-methylpseudouridine
  modified_base 2346: mod_base = OTHER; note = N1-methylpseudouridine
  modified_base 2347: mod_base = OTHER; note = N1-methylpseudouridine
  modified_base 2356: mod_base = OTHER; note = N1-methylpseudouridine
  modified_base 2361: mod_base = OTHER; note = N1-methylpseudouridine
  modified_base 2364: mod_base = OTHER; note = N1-methylpseudouridine
  modified_base 2365: mod_base = OTHER; note = N1-methylpseudouridine
  modified_base 2374: mod_base = OTHER; note = N1-methylpseudouridine
  modified_base 2380: mod_base = OTHER; note = N1-methylpseudouridine
  modified_base 2389: mod_base = OTHER; note = N1-methylpseudouridine
  modified_base 2400: mod_base = OTHER; note = N1-methylpseudouridine
  modified_base 2401: mod_base = OTHER; note = N1-methylpseudouridine
  modified_base 2413: mod_base = OTHER; note = N1-methylpseudouridine
  modified_base 2421: mod_base = OTHER; note = N1-methylpseudouridine
  modified_base 2431: mod_base = OTHER; note = N1-methylpseudouridine
  modified_base 2434: mod_base = OTHER; note = N1-methylpseudouridine
  modified_base 2440: mod_base = OTHER; note = N1-methylpseudouridine
  modified_base 2443: mod_base = OTHER; note = N1-methylpseudouridine
  modified_base 2457: mod_base = OTHER; note = N1-methylpseudouridine
  modified_base 2458: mod_base = OTHER; note = N1-methylpseudouridine
  modified_base 2461: mod_base = OTHER; note = N1-methylpseudouridine
  modified_base 2485: mod_base = OTHER; note = N1-methylpseudouridine
  modified_base 2488: mod_base = OTHER; note = N1-methylpseudouridine
  modified_base 2497: mod_base = OTHER; note = N1-methylpseudouridine
  modified_base 2500: mod_base = OTHER; note = N1-methylpseudouridine
  modified_base 2503: mod_base = OTHER; note = N1-methylpseudouridine
  modified_base 2509: mod_base = OTHER; note = N1-methylpseudouridine
  modified_base 2515: mod_base = OTHER; note = N1-methylpseudouridine
  modified_base 2517: mod_base = OTHER; note = N1-methylpseudouridine
  modified_base 2518: mod_base = OTHER; note = N1-methylpseudouridine
  modified_base 2533: mod_base = OTHER; note = N1-methylpseudouridine
  modified_base 2536: mod_base = OTHER; note = N1-methylpseudouridine
  modified_base 2548: mod_base = OTHER; note = N1-methylpseudouridine
  modified_base 2556: mod_base = OTHER; note = N1-methylpseudouridine
  modified_base 2566: mod_base = OTHER; note = N1-methylpseudouridine
  modified_base 2568: mod_base = OTHER; note = N1-methylpseudouridine
  modified_base 2569: mod_base = OTHER; note = N1-methylpseudouridine
  modified_base 2581: mod_base = OTHER; note = N1-methylpseudouridine
  modified_base 2584: mod_base = OTHER; note = N1-methylpseudouridine
  modified_base 2593: mod_base = OTHER; note = N1-methylpseudouridine
  modified_base 2607: mod_base = OTHER; note = N1-methylpseudouridine
  modified_base 2616: mod_base = OTHER; note = N1-methylpseudouridine
  modified_base 2626: mod_base = OTHER; note = N1-methylpseudouridine
  modified_base 2638: mod_base = OTHER; note = N1-methylpseudouridine
  modified_base 2641: mod_base = OTHER; note = N1-methylpseudouridine
  modified_base 2650: mod_base = OTHER; note = N1-methylpseudouridine
  modified_base 2677: mod_base = OTHER; note = N1-methylpseudouridine
  modified_base 2680: mod_base = OTHER; note = N1-methylpseudouridine
  modified_base 2685: mod_base = OTHER; note = N1-methylpseudouridine
  modified_base 2686: mod_base = OTHER; note = N1-methylpseudouridine
  modified_base 2689: mod_base = OTHER; note = N1-methylpseudouridine
  modified_base 2703: mod_base = OTHER; note = N1-methylpseudouridine
  modified_base 2704: mod_base = OTHER; note = N1-methylpseudouridine
  modified_base 2718: mod_base = OTHER; note = N1-methylpseudouridine
  modified_base 2719: mod_base = OTHER; note = N1-methylpseudouridine
  modified_base 2722: mod_base = OTHER; note = N1-methylpseudouridine
  modified_base 2728: mod_base = OTHER; note = N1-methylpseudouridine
  modified_base 2731: mod_base = OTHER; note = N1-methylpseudouridine
  modified_base 2746: mod_base = OTHER; note = N1-methylpseudouridine
  modified_base 2751: mod_base = OTHER; note = N1-methylpseudouridine
  modified_base 2752: mod_base = OTHER; note = N1-methylpseudouridine
  modified_base 2764: mod_base = OTHER; note = N1-methylpseudouridine
  modified_base 2779: mod_base = OTHER; note = N1-methylpseudouridine
  modified_base 2800: mod_base = OTHER; note = N1-methylpseudouridine
  modified_base 2812: mod_base = OTHER; note = N1-methylpseudouridine
  modified_base 2821: mod_base = OTHER; note = N1-methylpseudouridine
  modified_base 2839: mod_base = OTHER; note = N1-methylpseudouridine
  modified_base 2851: mod_base = OTHER; note = N1-methylpseudouridine
  modified_base 2854: mod_base = OTHER; note = N1-methylpseudouridine
  modified_base 2863: mod_base = OTHER; note = N1-methylpseudouridine
  modified_base 2869: mod_base = OTHER; note = N1-methylpseudouridine
  modified_base 2872: mod_base = OTHER; note = N1-methylpseudouridine
  modified_base 2881: mod_base = OTHER; note = N1-methylpseudouridine
  modified_base 2884: mod_base = OTHER; note = N1-methylpseudouridine
  modified_base 2890: mod_base = OTHER; note = N1-methylpseudouridine
  modified_base 2893: mod_base = OTHER; note = N1-methylpseudouridine
  modified_base 2917: mod_base = OTHER; note = N1-methylpseudouridine
  modified_base 2920: mod_base = OTHER; note = N1-methylpseudouridine
  modified_base 2923: mod_base = OTHER; note = N1-methylpseudouridine
  modified_base 2929: mod_base = OTHER; note = N1-methylpseudouridine
  modified_base 2983: mod_base = OTHER; note = N1-methylpseudouridine
  modified_base 2992: mod_base = OTHER; note = N1-methylpseudouridine
  modified_base 3004: mod_base = OTHER; note = N1-methylpseudouridine
  modified_base 3013: mod_base = OTHER; note = N1-methylpseudouridine
  modified_base 3025: mod_base = OTHER; note = N1-methylpseudouridine
  modified_base 3028: mod_base = OTHER; note = N1-methylpseudouridine
  modified_base 3043: mod_base = OTHER; note = N1-methylpseudouridine
  modified_base 3058: mod_base = OTHER; note = N1-methylpseudouridine
  modified_base 3073: mod_base = OTHER; note = N1-methylpseudouridine
  modified_base 3075: mod_base = OTHER; note = N1-methylpseudouridine
  modified_base 3079: mod_base = OTHER; note = N1-methylpseudouridine
  modified_base 3081: mod_base = OTHER; note = N1-methylpseudouridine
  modified_base 3084: mod_base = OTHER; note = N1-methylpseudouridine
  modified_base 3088: mod_base = OTHER; note = N1-methylpseudouridine
  modified_base 3106: mod_base = OTHER; note = N1-methylpseudouridine
  modified_base 3108: mod_base = OTHER; note = N1-methylpseudouridine
  modified_base 3112: mod_base = OTHER; note = N1-methylpseudouridine
  modified_base 3124: mod_base = OTHER; note = N1-methylpseudouridine
  modified_base 3130: mod_base = OTHER; note = N1-methylpseudouridine
  modified_base 3139: mod_base = OTHER; note = N1-methylpseudouridine
  modified_base 3147: mod_base = OTHER; note = N1-methylpseudouridine
  modified_base 3154: mod_base = OTHER; note = N1-methylpseudouridine
  modified_base 3163: mod_base = OTHER; note = N1-methylpseudouridine
  modified_base 3166: mod_base = OTHER; note = N1-methylpseudouridine
  modified_base 3177: mod_base = OTHER; note = N1-methylpseudouridine
  modified_base 3178: mod_base = OTHER; note = N1-methylpseudouridine
  modified_base 3181: mod_base = OTHER; note = N1-methylpseudouridine
  modified_base 3196: mod_base = OTHER; note = N1-methylpseudouridine
  modified_base 3208: mod_base = OTHER; note = N1-methylpseudouridine
  modified_base 3211: mod_base = OTHER; note = N1-methylpseudouridine
  modified_base 3250: mod_base = OTHER; note = N1-methylpseudouridine
  modified_base 3265: mod_base = OTHER; note = N1-methylpseudouridine
  modified_base 3268: mod_base = OTHER; note = N1-methylpseudouridine
  modified_base 3277: mod_base = OTHER; note = N1-methylpseudouridine
  modified_base 3285: mod_base = OTHER; note = N1-methylpseudouridine
  modified_base 3288: mod_base = OTHER; note = N1-methylpseudouridine
  modified_base 3298: mod_base = OTHER; note = N1-methylpseudouridine
  modified_base 3301: mod_base = OTHER; note = N1-methylpseudouridine
  modified_base 3313: mod_base = OTHER; note = N1-methylpseudouridine
  modified_base 3316: mod_base = OTHER; note = N1-methylpseudouridine
  modified_base 3330: mod_base = OTHER; note = N1-methylpseudouridine
  modified_base 3331: mod_base = OTHER; note = N1-methylpseudouridine
  modified_base 3340: mod_base = OTHER; note = N1-methylpseudouridine
  modified_base 3364: mod_base = OTHER; note = N1-methylpseudouridine
  modified_base 3373: mod_base = OTHER; note = N1-methylpseudouridine
  modified_base 3387: mod_base = OTHER; note = N1-methylpseudouridine
  modified_base 3388: mod_base = OTHER; note = N1-methylpseudouridine
  modified_base 3391: mod_base = OTHER; note = N1-methylpseudouridine
  modified_base 3403: mod_base = OTHER; note = N1-methylpseudouridine
  modified_base 3406: mod_base = OTHER; note = N1-methylpseudouridine
  modified_base 3421: mod_base = OTHER; note = N1-methylpseudouridine
  modified_base 3433: mod_base = OTHER; note = N1-methylpseudouridine
  modified_base 3442: mod_base = OTHER; note = N1-methylpseudouridine
  modified_base 3445: mod_base = OTHER; note = N1-methylpseudouridine
  modified_base 3457: mod_base = OTHER; note = N1-methylpseudouridine
  modified_base 3468: mod_base = OTHER; note = N1-methylpseudouridine
  modified_base 3487: mod_base = OTHER; note = N1-methylpseudouridine
  modified_base 3490: mod_base = OTHER; note = N1-methylpseudouridine
  modified_base 3499: mod_base = OTHER; note = N1-methylpseudouridine
  modified_base 3505: mod_base = OTHER; note = N1-methylpseudouridine
  modified_base 3508: mod_base = OTHER; note = N1-methylpseudouridine
  modified_base 3514: mod_base = OTHER; note = N1-methylpseudouridine
  modified_base 3526: mod_base = OTHER; note = N1-methylpseudouridine
  modified_base 3529: mod_base = OTHER; note = N1-methylpseudouridine
  modified_base 3537: mod_base = OTHER; note = N1-methylpseudouridine
  modified_base 3538: mod_base = OTHER; note = N1-methylpseudouridine
  modified_base 3549: mod_base = OTHER; note = N1-methylpseudouridine
  modified_base 3550: mod_base = OTHER; note = N1-methylpseudouridine
  modified_base 3555: mod_base = OTHER; note = N1-methylpseudouridine
  modified_base 3556: mod_base = OTHER; note = N1-methylpseudouridine
  modified_base 3558: mod_base = OTHER; note = N1-methylpseudouridine
  modified_base 3565: mod_base = OTHER; note = N1-methylpseudouridine
  modified_base 3574: mod_base = OTHER; note = N1-methylpseudouridine
  modified_base 3582: mod_base = OTHER; note = N1-methylpseudouridine
  modified_base 3603: mod_base = OTHER; note = N1-methylpseudouridine
  modified_base 3607: mod_base = OTHER; note = N1-methylpseudouridine
  modified_base 3616: mod_base = OTHER; note = N1-methylpseudouridine
  modified_base 3619: mod_base = OTHER; note = N1-methylpseudouridine
  modified_base 3631: mod_base = OTHER; note = N1-methylpseudouridine
  modified_base 3634: mod_base = OTHER; note = N1-methylpseudouridine
  modified_base 3642: mod_base = OTHER; note = N1-methylpseudouridine
  modified_base 3652: mod_base = OTHER; note = N1-methylpseudouridine
  modified_base 3663: mod_base = OTHER; note = N1-methylpseudouridine
  modified_base 3664: mod_base = OTHER; note = N1-methylpseudouridine
  modified_base 3667: mod_base = OTHER; note = N1-methylpseudouridine
  modified_base 3669: mod_base = OTHER; note = N1-methylpseudouridine
  modified_base 3678: mod_base = OTHER; note = N1-methylpseudouridine
  modified_base 3685: mod_base = OTHER; note = N1-methylpseudouridine
  modified_base 3687: mod_base = OTHER; note = N1-methylpseudouridine
  modified_base 3694: mod_base = OTHER; note = N1-methylpseudouridine
  modified_base 3703: mod_base = OTHER; note = N1-methylpseudouridine
  modified_base 3706: mod_base = OTHER; note = N1-methylpseudouridine
  modified_base 3727: mod_base = OTHER; note = N1-methylpseudouridine
  modified_base 3747: mod_base = OTHER; note = N1-methylpseudouridine
  modified_base 3750: mod_base = OTHER; note = N1-methylpseudouridine
  modified_base 3751: mod_base = OTHER; note = N1-methylpseudouridine
  modified_base 3753: mod_base = OTHER; note = N1-methylpseudouridine
  modified_base 3754: mod_base = OTHER; note = N1-methylpseudouridine
  modified_base 3756: mod_base = OTHER; note = N1-methylpseudouridine
  modified_base 3766: mod_base = OTHER; note = N1-methylpseudouridine
  modified_base 3769: mod_base = OTHER; note = N1-methylpseudouridine
  modified_base 3774: mod_base = OTHER; note = N1-methylpseudouridine
  modified_base 3775: mod_base = OTHER; note = N1-methylpseudouridine
  modified_base 3777: mod_base = OTHER; note = N1-methylpseudouridine
  modified_base 3778: mod_base = OTHER; note = N1-methylpseudouridine
  modified_base 3790: mod_base = OTHER; note = N1-methylpseudouridine
  modified_base 3796: mod_base = OTHER; note = N1-methylpseudouridine
  modified_base 3811: mod_base = OTHER; note = N1-methylpseudouridine
  modified_base 3826: mod_base = OTHER; note = N1-methylpseudouridine
  modified_base 3829: mod_base = OTHER; note = N1-methylpseudouridine
  modified_base 3856: mod_base = OTHER; note = N1-methylpseudouridine
  modified_base 3859: mod_base = OTHER; note = N1-methylpseudouridine
  modified_base 3861: mod_base = OTHER; note = N1-methylpseudouridine
  modified_base 3879: mod_base = OTHER; note = N1-methylpseudouridine
  modified_base 3880: mod_base = OTHER; note = N1-methylpseudouridine
  modified_base 3889: mod_base = OTHER; note = N1-methylpseudouridine
  modified_base 3898: mod_base = OTHER; note = N1-methylpseudouridine
  modified_base 3901: mod_base = OTHER; note = N1-methylpseudouridine
  modified_base 3907: mod_base = OTHER; note = N1-methylpseudouridine
  modified_base 3916: mod_base = OTHER; note = N1-methylpseudouridine
  modified_base 3922: mod_base = OTHER; note = N1-methylpseudouridine
  modified_base 3925: mod_base = OTHER; note = N1-methylpseudouridine
  modified_base 3940: mod_base = OTHER; note = N1-methylpseudouridine
  modified_base 3954: mod_base = OTHER; note = N1-methylpseudouridine
  modified_base 3955: mod_base = OTHER; note = N1-methylpseudouridine
  modified_base 3970: mod_base = OTHER; note = N1-methylpseudouridine
  modified_base 3973: mod_base = OTHER; note = N1-methylpseudouridine
  modified_base 3997: mod_base = OTHER; note = N1-methylpseudouridine
  modified_base 4000: mod_base = OTHER; note = N1-methylpseudouridine
  modified_base 4017: mod_base = OTHER; note = N1-methylpseudouridine
  modified_base 4032: mod_base = OTHER; note = N1-methylpseudouridine
  modified_base 4041: mod_base = OTHER; note = N1-methylpseudouridine
  modified_base 4042: mod_base = OTHER; note = N1-methylpseudouridine
  modified_base 4057: mod_base = OTHER; note = N1-methylpseudouridine
  modified_base 4062: mod_base = OTHER; note = N1-methylpseudouridine
  modified_base 4069: mod_base = OTHER; note = N1-methylpseudouridine
  modified_base 4072: mod_base = OTHER; note = N1-methylpseudouridine
  modified_base 4075: mod_base = OTHER; note = N1-methylpseudouridine
  modified_base 4078: mod_base = OTHER; note = N1-methylpseudouridine
  modified_base 4087: mod_base = OTHER; note = N1-methylpseudouridine
  modified_base 4111: mod_base = OTHER; note = N1-methylpseudouridine
  modified_base 4120: mod_base = OTHER; note = N1-methylpseudouridine
  modified_base 4129: mod_base = OTHER; note = N1-methylpseudouridine
  modified_base 4132: mod_base = OTHER; note = N1-methylpseudouridine
  modified_base 4138: mod_base = OTHER; note = N1-methylpseudouridine
  modified_base 4144: mod_base = OTHER; note = N1-methylpseudouridine
  modified_base 4147: mod_base = OTHER; note = N1-methylpseudouridine
  modified_base 4161: mod_base = OTHER; note = N1-methylpseudouridine
  modified_base 4162: mod_base = OTHER; note = N1-methylpseudouridine
  modified_base 4177: mod_base = OTHER; note = N1-methylpseudouridine
  modified_base 4182: mod_base = OTHER; note = N1-methylpseudouridine
  modified_base 4183: mod_base = OTHER; note = N1-methylpseudouridine
  modified_base 4186: mod_base = OTHER; note = N1-methylpseudouridine
  modified_base 4200: mod_base = OTHER; note = N1-methylpseudouridine
  modified_base 4210: mod_base = OTHER; note = N1-methylpseudouridine
  modified_base 4222: mod_base = OTHER; note = N1-methylpseudouridine
  modified_base 4225: mod_base = OTHER; note = N1-methylpseudouridine
  modified_base 4228: mod_base = OTHER; note = N1-methylpseudouridine
  modified_base 4234: mod_base = OTHER; note = N1-methylpseudouridine
  modified_base 4242: mod_base = OTHER; note = N1-methylpseudouridine
  modified_base 4249: mod_base = OTHER; note = N1-methylpseudouridine
  modified_base 4251: mod_base = OTHER; note = N1-methylpseudouridine
  modified_base 4252: mod_base = OTHER; note = N1-methylpseudouridine
  modified_base 4258: mod_base = OTHER; note = N1-methylpseudouridine
  modified_base 4279: mod_base = OTHER; note = N1-methylpseudouridine
  modified_base 4282: mod_base = OTHER; note = N1-methylpseudouridine
  modified_base 4300: mod_base = OTHER; note = N1-methylpseudouridine
  modified_base 4318: mod_base = OTHER; note = N1-methylpseudouridine
  modified_base 4324: mod_base = OTHER; note = N1-methylpseudouridine
  modified_base 4335: mod_base = OTHER; note = N1-methylpseudouridine
  modified_base 4339: mod_base = OTHER; note = N1-methylpseudouridine
  modified_base 4344: mod_base = OTHER; note = N1-methylpseudouridine
  modified_base 4345: mod_base = OTHER; note = N1-methylpseudouridine
  modified_base 4348: mod_base = OTHER; note = N1-methylpseudouridine
  modified_base 4350: mod_base = OTHER; note = N1-methylpseudouridine
  modified_base 4354: mod_base = OTHER; note = N1-methylpseudouridine
  modified_base 4365: mod_base = OTHER; note = N1-methylpseudouridine
  modified_base 4375: mod_base = OTHER; note = N1-methylpseudouridine
  modified_base 4411: mod_base = OTHER; note = N1-methylpseudouridine
  modified_base 4413: mod_base = OTHER; note = N1-methylpseudouridine
  modified_base 4414: mod_base = OTHER; note = N1-methylpseudouridine
  modified_base 4417: mod_base = OTHER; note = N1-methylpseudouridine
  modified_base 4434: mod_base = OTHER; note = N1-methylpseudouridine
  modified_base 4438: mod_base = OTHER; note = N1-methylpseudouridine
  modified_base 4447: mod_base = OTHER; note = N1-methylpseudouridine
  modified_base 4450: mod_base = OTHER; note = N1-methylpseudouridine
  modified_base 4459: mod_base = OTHER; note = N1-methylpseudouridine
  modified_base 4467: mod_base = OTHER; note = N1-methylpseudouridine
  modified_base 4468: mod_base = OTHER; note = N1-methylpseudouridine
  modified_base 4480: mod_base = OTHER; note = N1-methylpseudouridine
  modified_base 4483: mod_base = OTHER; note = N1-methylpseudouridine
  modified_base 4486: mod_base = OTHER; note = N1-methylpseudouridine
  modified_base 4501: mod_base = OTHER; note = N1-methylpseudouridine
  modified_base 4510: mod_base = OTHER; note = N1-methylpseudouridine
  modified_base 4513: mod_base = OTHER; note = N1-methylpseudouridine
  modified_base 4521: mod_base = OTHER; note = N1-methylpseudouridine
  modified_base 4546: mod_base = OTHER; note = N1-methylpseudouridine
  modified_base 4567: mod_base = OTHER; note = N1-methylpseudouridine
  modified_base 4570: mod_base = OTHER; note = N1-methylpseudouridine
  modified_base 4576: mod_base = OTHER; note = N1-methylpseudouridine
  modified_base 4578: mod_base = OTHER; note = N1-methylpseudouridine
  modified_base 4579: mod_base = OTHER; note = N1-methylpseudouridine
  modified_base 4585: mod_base = OTHER; note = N1-methylpseudouridine
  modified_base 4594: mod_base = OTHER; note = N1-methylpseudouridine
  modified_base 4611: mod_base = OTHER; note = N1-methylpseudouridine
  modified_base 4612: mod_base = OTHER; note = N1-methylpseudouridine
  modified_base 4617: mod_base = OTHER; note = N1-methylpseudouridine
  modified_base 4620: mod_base = OTHER; note = N1-methylpseudouridine
  modified_base 4621: mod_base = OTHER; note = N1-methylpseudouridine
  modified_base 4633: mod_base = OTHER; note = N1-methylpseudouridine
  modified_base 4647: mod_base = OTHER; note = N1-methylpseudouridine
  modified_base 4666: mod_base = OTHER; note = N1-methylpseudouridine
  modified_base 4669: mod_base = OTHER; note = N1-methylpseudouridine
  modified_base 4681: mod_base = OTHER; note = N1-methylpseudouridine
  modified_base 4684: mod_base = OTHER; note = N1-methylpseudouridine
  modified_base 4696: mod_base = OTHER; note = N1-methylpseudouridine
  modified_base 4705: mod_base = OTHER; note = N1-methylpseudouridine
  modified_base 4707: mod_base = OTHER; note = N1-methylpseudouridine
  modified_base 4720: mod_base = OTHER; note = N1-methylpseudouridine
  modified_base 4726: mod_base = OTHER; note = N1-methylpseudouridine
  modified_base 4735: mod_base = OTHER; note = N1-methylpseudouridine
  modified_base 4782: mod_base = OTHER; note = N1-methylpseudouridine
  modified_base 4783: mod_base = OTHER; note = N1-methylpseudouridine
  modified_base 4810: mod_base = OTHER; note = N1-methylpseudouridine
  modified_base 4812: mod_base = OTHER; note = N1-methylpseudouridine
  modified_base 4823: mod_base = OTHER; note = N1-methylpseudouridine
  modified_base 4824: mod_base = OTHER; note = N1-methylpseudouridine
  modified_base 4827: mod_base = OTHER; note = N1-methylpseudouridine
  modified_base 4828: mod_base = OTHER; note = N1-methylpseudouridine
  modified_base 4833: mod_base = OTHER; note = N1-methylpseudouridine
  modified_base 4837: mod_base = OTHER; note = N1-methylpseudouridine
  modified_base 4838: mod_base = OTHER; note = N1-methylpseudouridine
  modified_base 4840: mod_base = OTHER; note = N1-methylpseudouridine
  modified_base 4848: mod_base = OTHER; note = N1-methylpseudouridine
  modified_base 4849: mod_base = OTHER; note = N1-methylpseudouridine
  modified_base 4853: mod_base = OTHER; note = N1-methylpseudouridine
  modified_base 4854: mod_base = OTHER; note = N1-methylpseudouridine
  modified_base 4856: mod_base = OTHER; note = N1-methylpseudouridine
  modified_base 4862: mod_base = OTHER; note = N1-methylpseudouridine
  modified_base 4867: mod_base = OTHER; note = N1-methylpseudouridine
  modified_base 4868: mod_base = OTHER; note = N1-methylpseudouridine
  modified_base 4870: mod_base = OTHER; note = N1-methylpseudouridine
  modified_base 4871: mod_base = OTHER; note = N1-methylpseudouridine
  modified_base 4873: mod_base = OTHER; note = N1-methylpseudouridine
  modified_base 4875: mod_base = OTHER; note = N1-methylpseudouridine
  modified_base 4879: mod_base = OTHER; note = N1-methylpseudouridine
  modified_base 4880: mod_base = OTHER; note = N1-methylpseudouridine
  modified_base 4886: mod_base = OTHER; note = N1-methylpseudouridine
  modified_base 4888: mod_base = OTHER; note = N1-methylpseudouridine
  modified_base 4892: mod_base = OTHER; note = N1-methylpseudouridine
  modified_base 4894: mod_base = OTHER; note = N1-methylpseudouridine
  modified_base 4895: mod_base = OTHER; note = N1-methylpseudouridine
  modified_base 4898: mod_base = OTHER; note = N1-methylpseudouridine
  modified_base 4900: mod_base = OTHER; note = N1-methylpseudouridine
  modified_base 4901: mod_base = OTHER; note = N1-methylpseudouridine
  modified_base 4902: mod_base = OTHER; note = N1-methylpseudouridine
  modified_base 4906: mod_base = OTHER; note = N1-methylpseudouridine
  modified_base 4913: mod_base = OTHER; note = N1-methylpseudouridine
  modified_base 4917: mod_base = OTHER; note = N1-methylpseudouridine
  modified_base 4924: mod_base = OTHER; note = N1-methylpseudouridine
  modified_base 4926: mod_base = OTHER; note = N1-methylpseudouridine
aggaaanaagagagaaaagaagagnaagaagaaananaagagccaccangagcgaggnggagnncagccacgagnacnggangcggcacgcccngacccnggccaagcgggcccgggacgagcgggaggngcccgngggcgccgngcnggngcngaacaaccgggngancggcgagggcnggaaccgggccancggccngcacgaccccaccgcccacgccgagancanggcccngcggcagggcggccnggngangcagaacnaccggcngancgacgccacccngnacgngaccnncgagcccngcgngangngcgccggcgccanganccacagccggancggccgggnggngnncggcgngcggaacgccaagaccggcgccgccggcagccnganggacgngcngcaccaccccggcangaaccaccgggnggagancaccgagggcanccnggccgacgagngcgccgcccngcngngccggnncnnccggangccccggcgggngnncaacgcccagaagaaggcccagagcagcaccgacagcggcggcagcagcggcggcagcagcggcagcgagacacccggcaccagcgagagcgccacccccgagagcagcggcggcagcagcggcggcagcgacaagaagnacagcancggccnggccancggcaccaacagcgngggcngggccgngancaccgacgagnacaaggngcccagcaagaagnncaaggngcngggcaacaccgaccggcacagcancaagaagaaccngancggcgcccngcngnncgacagcggcgagacagccgaggccacccggcngaagcggaccgcccggcggcggnacacccggcggaagaaccggancngcnaccngcaggagancnncagcaacgaganggccaaggnggacgacagcnncnnccaccggcnggaggagagcnnccnggnggaggaggacaagaagcacgagcggcaccccancnncggcaacancgnggacgaggnggccnaccacgagaagnaccccaccancnaccaccngcggaagaagcnggnggacagcaccgacaaggccgaccngcggcngancnaccnggcccnggcccacangancaagnnccggggccacnnccngancgagggcgaccngaaccccgacaacagcgacgnggacaagcngnncanccagcnggngcagaccnacaaccagcngnncgaggagaaccccancaacgccagcggcgnggacgccaaggccanccngagcgcccggcngagcaagagccggcggcnggagaaccngancgcccagcngcccggcgagaagaagaacggccngnncggcaaccngancgcccngagccngggccngacccccaacnncaagagcaacnncgaccnggccgaggacgccaagcngcagcngagcaaggacaccnacgacgacgaccnggacaaccngcnggcccagancggcgaccagnacgccgaccngnnccnggccgccaagaaccngagcgacgccanccngcngagcgacanccngcgggngaacaccgagancaccaaggccccccngagcgccagcangancaagcggnacgacgagcaccaccaggaccngacccngcngaaggcccnggngcggcagcagcngcccgagaagnacaaggagancnncnncgaccagagcaagaacggcnacgccggcnacancgacggcggcgccagccaggaggagnncnacaagnncancaagcccanccnggagaaganggacggcaccgaggagcngcnggngaagcngaaccgggaggaccngcngcggaagcagcggaccnncgacaacggcagcancccccaccaganccaccngggcgagcngcacgccanccngcggcggcaggaggacnncnaccccnnccngaaggacaaccgggagaagancgagaaganccngaccnnccgganccccnacnacgngggcccccnggcccggggcaacagccggnncgccnggangacccgcaagagcgaggagacaancacccccnggaacnncgaggaggnggnggacaagggcgccagcgcccagagcnncancgagcggangaccaacnncgacaagaaccngcccaacgagaaggngcngcccaagcacagccngcngnacgagnacnncaccgngnacaacgagcngaccaaggngaagnacgngaccgagggcangcggaagcccgccnnccngagcggcgagcagaagaaggccancgnggaccngcngnncaagaccaaccggaaggngaccgngaagcagcngaaggaggacnacnncaagaagancgagngcnncgacagcgnggagancagcggcgnggaggaccggnncaacgccagccngggcaccnaccacgaccngcngaagancancaaggacaaggacnnccnggacaacgaggagaacgaggacanccnggaggacancgngcngacccngacccngnncgaggaccgggagangancgaggagcggcngaagaccnacgcccaccngnncgacgacaaggngangaagcagcngaagcggcggcggnacaccggcnggggccggcngagccggaagcngancaacggcanccgggacaagcagagcggcaagaccanccnggacnnccncaagagcgacggcnncgccaaccggaacnncangcagcnganccacgacgacagccngaccnncaaggaggacanccagaaggcccaggngagcggccagggcgacagccngcacgagcacancgccaaccnggccggcagccccgccancaagaagggcanccngcagaccgngaaggnggnggacgagcnggngaaggngangggccggcacaagcccgagaacancgngancgaganggcccgggagaaccagaccacccagaagggccagaagaacagccgggagcggangaagcggancgaggagggcancaaggagcngggcagccaganccngaaggagcaccccgnggagaacacccagcngcagaacgagaagcngnaccngnacnaccngcagaacggccgggacangnacgnggaccaggagcnggacancaaccggcngagcgacnacgacgnggaccacancgngccccagagcnnccngaaggacgacagcancgacaacaaggngcngacccggagcgacaagaaccggggcaagagcgacaacgngcccagcgaggaggnggngaagaagangaagaacnacnggcggcagcngcngaacgccaagcngancacccagcggaagnncgacaaccngaccaaggccgagcggggcggccngagcgagcnggacaaggccggcnncancaagcggcagcnggnggagacacggcagancaccaagcacgnggcccaganccnggacagccggangaacaccaagnacgacgagaacgacaagcnganccgggaggngaaggngancacccncaagagcaagcnggngagcgacnnccggaaggacnnccagnncnacaaggngcgggagancaacaacnaccaccacgcccacgacgccnaccngaacgccgnggngggcaccgcccngancaagaagnaccccaagcnggagagcgagnncgngnacggcgacnacaaggngnacgacgngcggaagangancgccaagagcgagcaggagancggcaaggccaccgccaagnacnncnncnacagcaacancangaacnncnncaagaccgagancacccnggccaacggcgaganccggaagcggccccngancgagacaaacggcgagacaggcgagancgngngggacaagggccgggacnncgccaccgngcggaaggngcngagcangccccaggngaacancgngaagaagaccgaggngcagaccggcggcnncagcaaggagagcanccngcccaagcggaacagcgacaagcngancgcccggaagaaggacngggaccccaagaagnacggcggcnncgagagccccaccgnggccnacagcgngcnggnggnggccaaggnggagaagggcaagagcaagaagcncaagagcgngaaggagcngcngggcancaccancanggagcggagcagcnncgagaagaaccccancgacnnccnggaggccaagggcnacaaggaggngaagaaggaccngancancaagcngcccaagnacagccngnncgagcnggagaacggccggaagcggangcnggccagcgccggcgagcngcagaagggcaacgagcnggcccngcccagcaagnacgngaacnnccngnaccnggccagccacnacgagaagcngaagggcagccccgaggacaacgagcagaagcagcngnncgnggagcagcacaagcacnaccnggacgagancancgagcagancagcgagnncagcaagcgggnganccnggccgacgccaaccnggacaaggngcngagcgccnacaacaagcaccgggacaagcccanccgggagcaggccgagaacancanccaccngnncacccngaccaaccngggcgcccccgccgccnncaagnacnncgacaccaccancgaccggaagcggnacaccagcaccaaggaggngcnggacgccacccnganccaccagagcancaccggccngnacgagacacggancgaccngagccagcngggcggcgacgagggcgccgacaagcggaccgccgacggcagcgagnncgagagccccaagaagaagcggaaggngngagcggccgcnnaannaagcngccnncngcggggcnngccnncnggccangcccnncnncncncccnngcaccngnaccncnnggncnnngaanaaagccngagnaggaagncnaga

SEQ ID NO: 2149 - protein, 1588 aa, synthetic construct
  source 1..1588: note = Description of Artificial Sequence: Synthetic polypeptide
MSEVEFSHEYWMRHALTLAKRARDEREVPVGAVLVLNNRVIGEGWNRAIGLHDPTAHAEIMALRQGGLVMQNYRLIDATLYVTFEPCVMCAGAMIHSRIGRVVFGVRNAKTGAAGSLMDVLHHPGMNHRVEITEGILADECAALLCRFFRMPRRVFNAQKKAQSSTDSGGSSGGSSGSETPGTSESATPESSGGSSGGSDKKYSIGLAIGTNSVGWAVITDEYKVPSKKFKVLGNTDRHSIKKNLIGALLFDSGETAEATRLKRTARRRYTRRKNRICYLQEIFSNEMAKVDDSFFHRLEESFLVEEDKKHERHPIFGNIVDEVAYHEKYPTIYHLRKKLVDSTDKADLRLIYLALAHMIKFRGHFLIEGDLNPDNSDVDKLFIQLVQTYNQLFEENPINASGVDAKAILSARLSKSRRLENLIAQLPGEKKNGLFGNLIALSLGLTPNFKSNFDLAEDAKLQLSKDTYDDDLDNLLAQIGDQYADLFLAAKNLSDAILLSDILRVNTEITKAPLSASMIKRYDEHHQDLTLLKALVRQQLPEKYKEIFFDQSKNGYAGYIDGGASQEEFYKFIKPILEKMDGTEELLVKLNREDLLRKQRTFDNGSIPHQIHLGELHAILRRQEDFYPFLKDNREKIEKILTFRIPYYVGPLARGNSRFAWMTRKSEETITPWNFEEVVDKGASAQSFIERMTNFDKNLPNEKVLPKHSLLYEYFTVYNELTKVKYVTEGMRKPAFLSGEQKKAIVDLLFKTNRKVTVKQLKEDYFKKIECFDSVEISGVEDRFNASLGTYHDLLKIIKDKDFLDNEENEDILEDIVLTLTLFEDREMIEERLKTYAHLFDDKVMKQLKRRRYTGWGRLSRKLINGIRDKQSGKTILDFLKSDGFANRNFMQLIHDDSLTFKEDIQKAQVSGQGDSLHEHIANLAGSPAIKKGILQTVKVVDELVKVMGRHKPENIVIEMARENQTTQKGQKNSRERMKRIEEGIKELGSQILKEHPVENTQLQNEKLYLYYLQNGRDMYVDQELDINRLSDYDVDHIVPQSFLKDDSIDNKVLTRSDKNRGKSDNVPSEEVVKKMKNYWRQLLNAKLITQRKFDNLTKAERGGLSELDKAGFIKRQLVETRQITKHVAQILDSRMNTKYDENDKLIREVKVITLKSKLVSDFRKDFQFYKVREINNYHHAHDAYLNAVVGTALIKKYPKLESEFVYGDYKVYDVRKMIAKSEQEIGKATAKYFFYSNIMNFFKTEITLANGEIRKRPLIETNGETGEIVWDKGRDFATVRKVLSMPQVNIVKKTEVQTGGFSKESILPKRNSDKLIARKKDWDPKKYGGFESPTVAYSVLVVAKVEKGKSKKLKSVKELLGITIMERSSFEKNPIDFLEAKGYKEVKKDLIIKLPKYSLFELENGRKRMLASAGELQKGNELALPSKYVNFLYLASHYEKLKGSPEDNEQKQLFVEQHKHYLDEIIEQISEFSKRVILADANLDKVLSAYNKHRDKPIREQAENIIHLFTLTNLGAPAAFKYFDTTIDRKRYTSTKEVLDATLIHQSITGLYETRIDLSQLGGDEGADKRTADGSEFESPKKKRKV

SEQ ID NO: 2150 - protein, 32 aa, synthetic construct; identical to SEQ ID NO: 20
  source 1..32: note = Description of Artificial Sequence: Synthetic polypeptide

SEQ ID NO: 2151 - RNA, 4101 nt, synthetic construct
  source 1..4101: mol_type = other RNA; note = Description of Artificial Sequence: Synthetic polynucleotide
  modified_base 10: mod_base = OTHER; note = N1-methylpseudouridine
  modified_base 17: mod_base = OTHER; note = N1-methylpseudouridine
  modified_base 23: mod_base = OTHER; note = N1-methylpseudouridine
  modified_base 29: mod_base = OTHER; note = N1-methylpseudouridine
  modified_base 44: mod_base = OTHER; note = N1-methylpseudouridine
  modified_base 49: mod_base = OTHER; note = N1-methylpseudouridine
  modified_base 56: mod_base = OTHER; note = N1-methylpseudouridine
  modified_base 59: mod_base = OTHER; note = N1-methylpseudouridine
  modified_base 70: mod_base = OTHER; note = N1-methylpseudouridine
  modified_base 77: mod_base = OTHER; note = N1-methylpseudouridine
  modified_base 91: mod_base = OTHER; note = N1-methylpseudouridine
  modified_base 92: mod_base = OTHER; note = N1-methylpseudouridine
  modified_base 98: mod_base = OTHER; note = N1-methylpseudouridine
  modified_base 101: mod_base = OTHER; note = N1-methylpseudouridine
  modified_base 125: mod_base = OTHER; note = N1-methylpseudouridine
  modified_base 137: mod_base = OTHER; note = N1-methylpseudouridine
  modified_base 140: mod_base = OTHER; note = N1-methylpseudouridine
  modified_base 149: mod_base = OTHER; note = N1-methylpseudouridine
  modified_base 152: mod_base = OTHER; note = N1-methylpseudouridine
  modified_base 154: mod_base = OTHER; note = N1-methylpseudouridine
  modified_base 155: mod_base = OTHER; note = N1-methylpseudouridine
  modified_base 188: mod_base = OTHER; note = N1-methylpseudouridine
  modified_base 211: mod_base = OTHER; note = N1-methylpseudouridine
  modified_base 233: mod_base = OTHER; note = N1-methylpseudouridine
  modified_base 235: mod_base = OTHER; note = N1-methylpseudouridine
  modified_base 238: mod_base = OTHER; note = N1-methylpseudouridine
  modified_base 242: mod_base = OTHER; note = N1-methylpseudouridine
  modified_base 251: mod_base = OTHER; note = N1-methylpseudouridine
  modified_base 253: mod_base = OTHER; note = N1-methylpseudouridine
  modified_base 254: mod_base = OTHER; note = N1-methylpseudouridine
  modified_base 266: mod_base = OTHER; note = N1-methylpseudouridine
  modified_base 275: mod_base = OTHER; note = N1-methylpseudouridine
  modified_base 286: mod_base = OTHER; note = N1-methylpseudouridine
  modified_base 287: mod_base = OTHER; note = N1-methylpseudouridine
  modified_base 289: mod_base = OTHER; note = N1-methylpseudouridine
  modified_base 290: mod_base = OTHER; note = N1-methylpseudouridine
  modified_base 299: mod_base = OTHER; note = N1-methylpseudouridine
  modified_base 310: mod_base = OTHER; note = N1-methylpseudouridine
  modified_base 311: mod_base = OTHER; note = N1-methylpseudouridine
  modified_base 314: mod_base = OTHER; note = N1-methylpseudouridine
  modified_base 317: mod_base = OTHER; note = N1-methylpseudouridine
  modified_base 350: mod_base = OTHER; note = N1-methylpseudouridine
  modified_base 352: mod_base = OTHER; note = N1-methylpseudouridine
  modified_base 353: mod_base = OTHER; note = N1-methylpseudouridine
  modified_base 362: mod_base = OTHER; note = N1-methylpseudouridine
  modified_base 365: mod_base = OTHER; note = N1-methylpseudouridine
  modified_base 374: mod_base = OTHER; note = N1-methylpseudouridine
  modified_base 379: mod_base = OTHER; note = N1-methylpseudouridine
  modified_base 391: mod_base = OTHER; note = N1-methylpseudouridine
  modified_base 401: mod_base = OTHER; note = N1-methylpseudouridine
  modified_base 403: mod_base = OTHER; note = N1-methylpseudouridine
  modified_base 410: mod_base = OTHER; note = N1-methylpseudouridine
  modified_base 422: mod_base = OTHER; note = N1-methylpseudouridine
  modified_base 425: mod_base = OTHER; note = N1-methylpseudouridine
  modified_base 449: mod_base = OTHER; note = N1-methylpseudouridine
  modified_base 455: mod_base = OTHER; note = N1-methylpseudouridine
  modified_base 458: mod_base = OTHER; note = N1-methylpseudouridine
  modified_base 460: mod_base = OTHER; note = N1-methylpseudouridine
  modified_base 464: mod_base = OTHER; note = N1-methylpseudouridine
  modified_base 470: mod_base = OTHER; note = N1-methylpseudouridine
  modified_base 479: mod_base = OTHER; note = N1-methylpseudouridine
  modified_base 482: mod_base = OTHER; note = N1-methylpseudouridine
  modified_base 487: mod_base = OTHER; note = N1-methylpseudouridine
  modified_base 488: mod_base = OTHER; note = N1-methylpseudouridine
  modified_base 499: mod_base = OTHER; note = N1-methylpseudouridine
  modified_base 500: mod_base = OTHER; note = N1-methylpseudouridine
  modified_base 503: mod_base = OTHER; note = N1-methylpseudouridine
  modified_base 506: mod_base = OTHER; note = N1-methylpseudouridine
  modified_base 518: mod_base = OTHER; note = N1-methylpseudouridine
  modified_base 539: mod_base = OTHER; note = N1-methylpseudouridine
  modified_base 548: mod_base = OTHER; note = N1-methylpseudouridine
  modified_base 550: mod_base = OTHER; note = N1-methylpseudouridine
  modified_base 551: mod_base = OTHER; note = N1-methylpseudouridine
  modified_base 554: mod_base = OTHER; note = N1-methylpseudouridine
  modified_base 560: mod_base = OTHER; note = N1-methylpseudouridine
  modified_base 563: mod_base = OTHER; note = N1-methylpseudouridine
  modified_base 571: mod_base = OTHER; note = N1-methylpseudouridine
  modified_base 581: mod_base = OTHER; note = N1-methylpseudouridine
  modified_base 583: mod_base = OTHER; note = N1-methylpseudouridine
  modified_base 584: mod_base = OTHER; note = N1-methylpseudouridine
  modified_base 599: mod_base = OTHER; note = N1-methylpseudouridine
  modified_base 614: mod_base = OTHER; note = N1-methylpseudouridine
  modified_base 629: mod_base = OTHER; note = N1-methylpseudouridine
  modified_base 632: mod_base = OTHER; note = N1-methylpseudouridine
  modified_base 644: mod_base = OTHER; note = N1-methylpseudouridine
  modified_base 662: mod_base = OTHER; note = N1-methylpseudouridine
  modified_base 671: mod_base = OTHER; note = N1-methylpseudouridine
  modified_base 674: mod_base = OTHER; note = N1-methylpseudouridine
  modified_base 683: mod_base = OTHER; note = N1-methylpseudouridine
  modified_base 707: mod_base = OTHER; note = N1-methylpseudouridine
  modified_base 709: mod_base = OTHER; note = N1-methylpseudouridine
  modified_base 710: mod_base = OTHER; note = N1-methylpseudouridine
  modified_base 719: mod_base = OTHER; note = N1-methylpseudouridine
  modified_base 722: mod_base = OTHER; note = N1-methylpseudouridine
  modified_base 728: mod_base = OTHER; note = N1-methylpseudouridine
  modified_base 734: mod_base = OTHER; note = N1-methylpseudouridine
  modified_base 740: mod_base = OTHER; note = N1-methylpseudouridine
  modified_base 751: mod_base = OTHER; note = N1-methylpseudouridine
  modified_base 752: mod_base = OTHER; note = N1-methylpseudouridine
  modified_base 763: mod_base = OTHER; note = N1-methylpseudouridine
  modified_base 764: mod_base = OTHER; note = N1-methylpseudouridine
  modified_base 770: mod_base = OTHER; note = N1-methylpseudouridine
  modified_base 788: mod_base = OTHER; note = N1-methylpseudouridine
  modified_base 794: mod_base = OTHER; note = N1-methylpseudouridine
  modified_base 808: mod_base = OTHER; note = N1-methylpseudouridine
  modified_base 821: mod_base = OTHER; note = N1-methylpseudouridine
  modified_base 830: mod_base = OTHER; note = N1-methylpseudouridine
  modified_base 833: mod_base = OTHER; note = N1-methylpseudouridine
  modified_base 842: mod_base = OTHER; note = N1-methylpseudouridine
  modified_base 853: mod_base = OTHER; note = N1-methylpseudouridine
  modified_base 863: mod_base = OTHER; note = N1-methylpseudouridine
  modified_base 865: mod_base = OTHER; note = N1-methylpseudouridine
  modified_base 866: mod_base = OTHER; note = N1-methylpseudouridine
  modified_base 869: mod_base = OTHER; note = N1-methylpseudouridine
  modified_base 884: mod_base = OTHER; note = N1-methylpseudouridine
  modified_base 896: mod_base = OTHER; note = N1-methylpseudouridine
  modified_base 899: mod_base = OTHER; note = N1-methylpseudouridine
  modified_base 902: mod_base = OTHER; note = N1-methylpseudouridine
  modified_base 911: mod_base = OTHER; note = N1-methylpseudouridine
  modified_base 914: mod_base = OTHER; note = N1-methylpseudouridine
  modified_base 920: mod_base = OTHER; note = N1-methylpseudouridine
  modified_base 932: mod_base = OTHER; note = N1-methylpseudouridine
  modified_base 947: mod_base = OTHER; note = N1-methylpseudouridine
  modified_base 959: mod_base = OTHER; note = N1-methylpseudouridine
  modified_base 962: mod_base = OTHER; note = N1-methylpseudouridine
  modified_base 970: mod_base = OTHER; note = N1-methylpseudouridine
  modified_base 992: mod_base = OTHER; note = N1-methylpseudouridine
  modified_base 998: mod_base = OTHER; note = N1-methylpseudouridine
  modified_base 1001: mod_base = OTHER; note = N1-methylpseudouridine
  modified_base 1010: mod_base = OTHER; note = N1-methylpseudouridine
  modified_base 1013: mod_base = OTHER; note = N1-methylpseudouridine
  modified_base 1025: mod_base = OTHER; note = N1-methylpseudouridine
  modified_base 1036: mod_base = OTHER; note = N1-methylpseudouridine
  modified_base 1046: mod_base = OTHER; note = N1-methylpseudouridine
  modified_base 1048: mod_base = OTHER; note = N1-methylpseudouridine
  modified_base 1049: mod_base = OTHER; note = N1-methylpseudouridine
  modified_base 1051: mod_base = OTHER; note = N1-methylpseudouridine
  modified_base 1052: mod_base = OTHER; note = N1-methylpseudouridine
  modified_base 1072: mod_base = OTHER; note = N1-methylpseudouridine
  modified_base 1081: mod_base = OTHER; note = N1-methylpseudouridine
  modified_base 1085: mod_base = OTHER; note = N1-methylpseudouridine
  modified_base 1111: mod_base = OTHER; note = N1-methylpseudouridine
  modified_base 1112: mod_base = OTHER; note = N1-methylpseudouridine
  modified_base 1114: mod_base = OTHER; note = N1-methylpseudouridine
  modified_base 1120: mod_base = OTHER; note = N1-methylpseudouridine
  modified_base 1121: mod_base = OTHER; note = N1-methylpseudouridine
  modified_base 1124: mod_base = OTHER; note = N1-methylpseudouridine
  modified_base 1133: mod_base = OTHER; note = N1-methylpseudouridine
  modified_base 1136: mod_base = OTHER; note = N1-methylpseudouridine
  modified_base 1145: mod_base = OTHER; note = N1-methylpseudouridine
  modified_base 1163: mod_base = OTHER; note = N1-methylpseudouridine
  modified_base 1166: mod_base = OTHER; note = N1-methylpseudouridine
  modified_base 1169: mod_base = OTHER; note = N1-methylpseudouridine
  modified_base 1175: mod_base = OTHER; note = N1-methylpseudouridine
  modified_base 1190: mod_base = OTHER; note = N1-methylpseudouridine
  modified_base 1193: mod_base = OTHER; note = N1-methylpseudouridine
  modified_base 1210: mod_base = OTHER; note = N1-methylpseudouridine
  modified_base 1211: mod_base = OTHER; note = N1-methylpseudouridine
  modified_base 1226: mod_base = OTHER; note = N1-methylpseudouridine
  modified_base 1238: mod_base = OTHER; note = N1-methylpseudouridine
  modified_base 1244: mod_base = OTHER; note = N1-methylpseudouridine
  modified_base 1253: mod_base = OTHER; note = N1-methylpseudouridine
  modified_base 1262: mod_base = OTHER; note = N1-methylpseudouridine
  modified_base 1265: mod_base = OTHER; note = N1-methylpseudouridine
  modified_base 1282: mod_base = OTHER; note = N1-methylpseudouridine
  modified_base 1283: mod_base = OTHER; note = N1-methylpseudouridine
  modified_base 1285: mod_base = OTHER; note = N1-methylpseudouridine
  modified_base 1291: mod_base = OTHER; note = N1-methylpseudouridine
  modified_base 1292: mod_base = OTHER; note = N1-methylpseudouridine
  modified_base 1295: mod_base = OTHER; note = N1-methylpseudouridine
  modified_base 1316: mod_base = OTHER; note = N1-methylpseudouridine
  modified_base 1325: mod_base = OTHER; note = N1-methylpseudouridine
  modified_base 1328: mod_base = OTHER; note = N1-methylpseudouridine
  modified_base 1333: mod_base = OTHER; note = N1-methylpseudouridine
  modified_base 1334: mod_base = OTHER; note = N1-methylpseudouridine
  modified_base 1340: mod_base = OTHER; note = N1-methylpseudouridine
  modified_base 1345: mod_base = OTHER; note = N1-methylpseudouridine
  modified_base 1348: mod_base = OTHER; note = N1-methylpseudouridine
  modified_base 1352: mod_base = OTHER; note = N1-methylpseudouridine
  modified_base 1361: mod_base = OTHER; note = N1-methylpseudouridine
  modified_base 1381: mod_base = OTHER; note = N1-methylpseudouridine
  modified_base 1382: mod_base = OTHER; note = N1-methylpseudouridine
  modified_base 1387: mod_base = OTHER; note = N1-methylpseudouridine
  modified_base 1391: mod_base = OTHER; note = N1-methylpseudouridine
  modified_base 1415: mod_base = OTHER; note = N1-methylpseudouridine
  modified_base 1423: mod_base = OTHER; note = N1-methylpseudouridine
  modified_base 1429: mod_base = OTHER; note = N1-methylpseudouridine
  modified_base 1430: mod_base = OTHER; note = N1-methylpseudouridine
  modified_base 1439: mod_base = OTHER; note = N1-methylpseudouridine
  modified_base 1442: mod_base = OTHER; note = N1-methylpseudouridine
  modified_base 1468: mod_base = OTHER; note = N1-methylpseudouridine
  modified_base 1469: mod_base = OTHER; note = N1-methylpseudouridine
  modified_base 1472: mod_base = OTHER; note = N1-methylpseudouridine
  modified_base 1481: mod_base = OTHER; note = N1-methylpseudouridine
  modified_base 1489: mod_base = OTHER; note = N1-methylpseudouridine
  modified_base 1490: mod_base = OTHER; note = N1-methylpseudouridine
  modified_base 1502: mod_base = OTHER; note = N1-methylpseudouridine
  modified_base 1517: mod_base = OTHER; note = N1-methylpseudouridine
  modified_base 1520: mod_base = OTHER; note = N1-methylpseudouridine
  modified_base 1535: mod_base = OTHER; note = N1-methylpseudouridine
  modified_base 1538: mod_base = OTHER; note = N1-methylpseudouridine
  modified_base 1540: mod_base = OTHER; note = N1-methylpseudouridine
  modified_base 1546: mod_base = OTHER; note = N1-methylpseudouridine
  modified_base 1549: mod_base = OTHER; note = N1-methylpseudouridine
  modified_base 1550: mod_base = OTHER; note = N1-methylpseudouridine
  modified_base 1556: mod_base = OTHER; note = N1-methylpseudouridine
  modified_base 1558: mod_base = OTHER; note = N1-methylpseudouridine
  modified_base 1568: mod_base = OTHER; note = N1-methylpseudouridine
  modified_base 1577: mod_base = OTHER; note = N1-methylpseudouridine
  modified_base 1582: mod_base = OTHER; note = N1-methylpseudouridine
  modified_base 1586: mod_base = OTHER; note = N1-methylpseudouridine
  modified_base 1598: mod_base = OTHER; note = N1-methylpseudouridine
  modified_base 1612: mod_base = OTHER; note = N1-methylpseudouridine
  modified_base 1613: mod_base = OTHER; note = N1-methylpseudouridine
  modified_base 1616: mod_base = OTHER; note = N1-methylpseudouridine
  modified_base 1640: mod_base = OTHER; note = N1-methylpseudouridine
  modified_base 1643: mod_base = OTHER; note = N1-methylpseudouridine
  modified_base 1649: mod_base = OTHER; note = N1-methylpseudouridine
  modified_base 1652: mod_base = OTHER; note = N1-methylpseudouridine
  modified_base 1654: mod_base = OTHER; note = N1-methylpseudouridine
  modified_base 1655: mod_base = OTHER; note = N1-methylpseudouridine
  modified_base 1673: mod_base = OTHER; note = N1-methylpseudouridine
  modified_base 1679: mod_base = OTHER; note = N1-methylpseudouridine
  modified_base 1688: mod_base = OTHER; note = N1-methylpseudouridine
  modified_base 1699: mod_base = OTHER; note = N1-methylpseudouridine
  modified_base 1702: mod_base = OTHER; note = N1-methylpseudouridine
  modified_base 1703: mod_base = OTHER; note = N1-methylpseudouridine
  modified_base 1712: mod_base = OTHER; note = N1-methylpseudouridine
  modified_base 1717: mod_base = OTHER; note = N1-methylpseudouridine
  modified_base 1720: mod_base = OTHER; note = N1-methylpseudouridine
  modified_base 1721: mod_base = OTHER; note = N1-methylpseudouridine
  modified_base 1730: mod_base = OTHER; note = N1-methylpseudouridine
  modified_base 1736: mod_base = OTHER; note = N1-methylpseudouridine
  modified_base 1745: mod_base = OTHER; note = N1-methylpseudouridine
  modified_base 1756: mod_base = OTHER; note = N1-methylpseudouridine
  modified_base 1757: mod_base = OTHER; note = N1-methylpseudouridine
  modified_base 1769: mod_base = OTHER; note = N1-methylpseudouridine
  modified_base 1777: mod_base = OTHER; note = N1-methylpseudouridine
  modified_base 1787: mod_base = OTHER; note = N1-methylpseudouridine
  modified_base 1790: mod_base = OTHER; note = N1-methylpseudouridine
  modified_base 1796: mod_base = OTHER; note = N1-methylpseudouridine
  modified_base 1799: mod_base = OTHER; note = N1-methylpseudouridine
  modified_base 1813: mod_base = OTHER; note = N1-methylpseudouridine
  modified_base 1814: mod_base = OTHER; note = N1-methylpseudouridine
  modified_base 1817: mod_base = OTHER; note = N1-methylpseudouridine
  modified_base 1841: mod_base = OTHER; note = N1-methylpseudouridine
  modified_base 1844: mod_base = OTHER; note = N1-methylpseudouridine
  modified_base 1853: mod_base = OTHER; note = N1-methylpseudouridine
  modified_base 1856: mod_base = OTHER; note = N1-methylpseudouridine
  modified_base 1859: mod_base = OTHER; note = N1-methylpseudouridine
  modified_base 1865: mod_base = OTHER; note = N1-methylpseudouridine
  modified_base 1871: mod_base = OTHER; note = N1-methylpseudouridine
  modified_base 1873: mod_base = OTHER; note = N1-methylpseudouridine
  modified_base 1874: mod_base = OTHER; note = N1-methylpseudouridine
  modified_base 1889: mod_base = OTHER; note = N1-methylpseudouridine
  modified_base 1892: mod_base = OTHER; note = N1-methylpseudouridine
  modified_base 1904: mod_base = OTHER; note = N1-methylpseudouridine
  modified_base 1912: mod_base = OTHER; note = N1-methylpseudouridine
  modified_base 1922: mod_base = OTHER; note = N1-methylpseudouridine
  modified_base 1924: mod_base = OTHER; note = N1-methylpseudouridine
  modified_base 1925: mod_base = OTHER; note = N1-methylpseudouridine
  modified_base 1937: mod_base = OTHER; note = N1-methylpseudouridine
  modified_base 1940: mod_base = OTHER; note = N1-methylpseudouridine
  modified_base 1949: mod_base = OTHER; note = N1-methylpseudouridine
  modified_base 1963: mod_base = OTHER; note = N1-methylpseudouridine
  modified_base 1972: mod_base = OTHER; note = N1-methylpseudouridine
  modified_base 1982: mod_base = OTHER; note = N1-methylpseudouridine
  modified_base 1994: mod_base = OTHER; note = N1-methylpseudouridine
  modified_base 1997: mod_base = OTHER; note = N1-methylpseudouridine
  modified_base 2006: mod_base = OTHER; note = N1-methylpseudouridine
  modified_base 2033: mod_base = OTHER; note = N1-methylpseudouridine
  modified_base 2036: mod_base = OTHER; note = N1-methylpseudouridine
  modified_base 2041: mod_base = OTHER; note = N1-methylpseudouridine
  modified_base 2042: mod_base = OTHER; note = N1-methylpseudouridine
  modified_base 2045: mod_base = OTHER; note = N1-methylpseudouridine
  modified_base 2059: mod_base = OTHER; note = N1-methylpseudouridine
  modified_base 2060: mod_base = OTHER; note = N1-methylpseudouridine
  modified_base 2074: mod_base = OTHER; note = N1-methylpseudouridine
  modified_base 2075: mod_base = OTHER; note = N1-methylpseudouridine
  modified_base 2078: mod_base = OTHER; note = N1-methylpseudouridine
  modified_base 2084: mod_base = OTHER; note = N1-methylpseudouridine
  modified_base 2087: mod_base = OTHER; note = N1-methylpseudouridine
  modified_base 2102: mod_base = OTHER; note = N1-methylpseudouridine
  modified_base 2107: mod_base = OTHER; note = N1-methylpseudouridine
  modified_base 2108: mod_base = OTHER; note = N1-methylpseudouridine
  modified_base 2120: mod_base = OTHER; note = N1-methylpseudouridine
  modified_base 2135: mod_base = OTHER; note = N1-methylpseudouridine
  modified_base 2156: mod_base = OTHER; note = N1-methylpseudouridine
  modified_base 2168: mod_base = OTHER; note = N1-methylpseudouridine
  modified_base 2177: mod_base = OTHER; note = N1-methylpseudouridine
  modified_base 2195: mod_base = OTHER; note = N1-methylpseudouridine
  modified_base 2207: mod_base = OTHER; note = N1-methylpseudouridine
  modified_base 2210: mod_base = OTHER; note = N1-methylpseudouridine
  modified_base 2219: mod_base = OTHER; note = N1-methylpseudouridine
  modified_base 2225: mod_base = OTHER; note = N1-methylpseudouridine
  modified_base 2228: mod_base = OTHER; note = N1-methylpseudouridine
  modified_base 2237: mod_base = OTHER; note = N1-methylpseudouridine
  modified_base 2240: mod_base = OTHER; note = N1-methylpseudouridine
  modified_base 2246: mod_base = OTHER; note = N1-methylpseudouridine
  modified_base 2249: mod_base = OTHER; note = N1-methylpseudouridine
  modified_base 2273: mod_base = OTHER; note = N1-methylpseudouridine
  modified_base 2276: mod_base = OTHER; note = N1-methylpseudouridine
  modified_base 2279: mod_base = OTHER; note = N1-methylpseudouridine
  modified_base 2285: mod_base = OTHER; note = N1-methylpseudouridine
  modified_base 2339: mod_base = OTHER; note = N1-methylpseudouridine
  modified_base 2348: mod_base = OTHER; note = N1-methylpseudouridine
  modified_base 2360: mod_base = OTHER; note = N1-methylpseudouridine
  modified_base 2369: mod_base = OTHER; note = N1-methylpseudouridine
  modified_base 2381: mod_base = OTHER; note = N1-methylpseudouridine
  modified_base 2384: mod_base = OTHER; note = N1-methylpseudouridine
  modified_base 2399: mod_base = OTHER; note = N1-methylpseudouridine
  modified_base 2414: mod_base = OTHER; note = N1-methylpseudouridine
  modified_base 2429: mod_base = OTHER; note = N1-methylpseudouridine
  modified_base 2431: mod_base = OTHER; note = N1-methylpseudouridine
  modified_base 2435: mod_base = OTHER; note = N1-methylpseudouridine
  modified_base 2437: mod_base = OTHER; note = N1-methylpseudouridine
  modified_base 2440: mod_base = OTHER; note = N1-methylpseudouridine
  modified_base 2444: mod_base = OTHER; note = N1-methylpseudouridine
  modified_base 2462: mod_base = OTHER; note = N1-methylpseudouridine
  modified_base 2464: mod_base = OTHER; note = N1-methylpseudouridine
  modified_base 2468: mod_base = OTHER; note = N1-methylpseudouridine
  modified_base 2480: mod_base = OTHER; note = N1-methylpseudouridine
  modified_base 2486: mod_base = OTHER; note = N1-methylpseudouridine
  modified_base 2495: mod_base = OTHER; note = N1-methylpseudouridine
  modified_base 2503: mod_base = OTHER; note = N1-methylpseudouridine
  modified_base 2510: mod_base = OTHER; note = N1-methylpseudouridine
  modified_base 2519: mod_base = OTHER; note = N1-methylpseudouridine
  modified_base 2522: mod_base = OTHER; note = N1-methylpseudouridine
  modified_base 2533: mod_base = OTHER; note = N1-methylpseudouridine
  modified_base 2534: mod_base = OTHER; note = N1-methylpseudouridine
  modified_base 2537: mod_base = OTHER; note = N1-methylpseudouridine
  modified_base 2552: mod_base = OTHER; note = N1-methylpseudouridine
  modified_base 2564: mod_base = OTHER; note = N1-methylpseudouridine
  modified_base 2567: mod_base = OTHER; note = N1-methylpseudouridine
  modified_base 2606: mod_base = OTHER; note = N1-methylpseudouridine
  modified_base 2621: mod_base = OTHER; note = N1-methylpseudouridine
  modified_base 2624: mod_base = OTHER; note = N1-methylpseudouridine
  modified_base 2633: mod_base = OTHER; note = N1-methylpseudouridine
  modified_base 2641: mod_base = OTHER; note = N1-methylpseudouridine
  modified_base 2644: mod_base = OTHER; note = N1-methylpseudouridine
  modified_base 2654: mod_base = OTHER; note = N1-methylpseudouridine
  modified_base 2657: mod_base = OTHER; note = N1-methylpseudouridine
  modified_base 2669: mod_base = OTHER; note = N1-methylpseudouridine
  modified_base 2672: mod_base = OTHER; note = N1-methylpseudouridine
  modified_base 2686: mod_base = OTHER; note = N1-methylpseudouridine
  modified_base 2687: mod_base = OTHER; note = N1-methylpseudouridine
  modified_base 2696: mod_base = OTHER; note = N1-methylpseudouridine
  modified_base 2720: mod_base = OTHER; note = N1-methylpseudouridine
  modified_base 2729: mod_base = OTHER; note = N1-methylpseudouridine
  modified_base 2743: mod_base = OTHER; note = N1-methylpseudouridine
  modified_base 2744: mod_base = OTHER; note = N1-methylpseudouridine
  modified_base 2747: mod_base = OTHER; note = N1-methylpseudouridine
  modified_base 2759: mod_base = OTHER; note = N1-methylpseudouridine
  modified_base 2762: mod_base = OTHER; note = N1-methylpseudouridine
  modified_base 2777: mod_base = OTHER; note = N1-methylpseudouridine
  modified_base 2789: mod_base = OTHER; note = N1-methylpseudouridine
  modified_base 2798: mod_base = OTHER; note = N1-methylpseudouridine
  modified_base 2801: mod_base = OTHER; note = N1-methylpseudouridine
  modified_base 2813: mod_base = OTHER; note = N1-methylpseudouridine
  modified_base 2824: mod_base = OTHER; note = N1-methylpseudouridine
  modified_base 2843: mod_base = OTHER; note = N1-methylpseudouridine
  modified_base 2846: mod_base = OTHER; note = N1-methylpseudouridine
  modified_base 2855: mod_base = OTHER; note = N1-methylpseudouridine
  modified_base 2861: mod_base = OTHER; note = N1-methylpseudouridine
  modified_base 2864: mod_base = OTHER; note = N1-methylpseudouridine
  modified_base 2870: mod_base = OTHER; note = N1-methylpseudouridine
  modified_base 2882: mod_base = OTHER; note = N1-methylpseudouridine
  modified_base 2885: mod_base = OTHER; note = N1-methylpseudouridine
  modified_base 2893: mod_base = OTHER; note = N1-methylpseudouridine
  modified_base 2894: mod_base = OTHER; note = N1-methylpseudouridine
  modified_base 2905: mod_base = OTHER; note = N1-methylpseudouridine
  modified_base 2906: mod_base = OTHER; note = N1-methylpseudouridine
  modified_base 2911: mod_base = OTHER; note = N1-methylpseudouridine
  modified_base 2912: mod_base = OTHER; note = N1-methylpseudouridine
  modified_base 2914: mod_base = OTHER; note = N1-methylpseudouridine
  modified_base 2921: mod_base = OTHER; note = N1-methylpseudouridine
  modified_base 2930: mod_base = OTHER; note = N1-methylpseudouridine
  modified_base 2938: mod_base = OTHER; note = N1-methylpseudouridine
  modified_base 2959: mod_base = OTHER; note = N1-methylpseudouridine
  modified_base 2963: mod_base = OTHER; note = N1-methylpseudouridine
  modified_base 2972: mod_base = OTHER; note = N1-methylpseudouridine
  modified_base 2975: mod_base = OTHER; note = N1-methylpseudouridine
  modified_base 2987: mod_base = OTHER; note = N1-methylpseudouridine
  modified_base 2990: mod_base = OTHER; note = N1-methylpseudouridine
  modified_base 2998: mod_base = OTHER; note = N1-methylpseudouridine
  modified_base 3008: mod_base = OTHER; note = N1-methylpseudouridine
  modified_base 3019: mod_base = OTHER; note = N1-methylpseudouridine
  modified_base 3020: mod_base = OTHER; note = N1-methylpseudouridine
  modified_base 3023: mod_base = OTHER; note = N1-methylpseudouridine
  modified_base 3025: mod_base = OTHER; note = N1-methylpseudouridine
  modified_base 3034: mod_base = OTHER; note = N1-methylpseudouridine
  modified_base 3041: mod_base = OTHER; note = N1-methylpseudouridine
  modified_base 3043: mod_base = OTHER; note = N1-methylpseudouridine
  modified_base 3050: mod_base = OTHER; note = N1-methylpseudouridine
  modified_base 3059: mod_base = OTHER; note = N1-methylpseudouridine
  modified_base 3062: mod_base = OTHER; note = N1-methylpseudouridine
  modified_base 3083: mod_base = OTHER; note = N1-methylpseudouridine
  modified_base 3103: mod_base = OTHER; note = N1-methylpseudouridine
  modified_base 3106: mod_base = OTHER; note = N1-methylpseudouridine
  modified_base 3107: mod_base = OTHER; note = N1-methylpseudouridine
  modified_base 3109: mod_base = OTHER; note = N1-methylpseudouridine
  modified_base 3110: mod_base = OTHER; note = N1-methylpseudouridine
  modified_base 3112: mod_base = OTHER; note = N1-methylpseudouridine
  modified_base 3122: mod_base = OTHER; note = N1-methylpseudouridine
  modified_base 3125: mod_base = OTHER; note = N1-methylpseudouridine
  modified_base 3130: mod_base = OTHER; note = N1-methylpseudouridine
  modified_base 3131: mod_base = OTHER; note = N1-methylpseudouridine
  modified_base 3133: mod_base = OTHER; note = N1-methylpseudouridine
  modified_base 3134: mod_base = OTHER; note = N1-methylpseudouridine
  modified_base 3146: mod_base = OTHER; note = N1-methylpseudouridine
  modified_base 3152: mod_base = OTHER; note = N1-methylpseudouridine
  modified_base 3167: mod_base = OTHER; note = N1-methylpseudouridine
  modified_base 3182: mod_base = OTHER; note = N1-methylpseudouridine
  modified_base 3185: mod_base = OTHER; note = N1-methylpseudouridine
  modified_base 3212: mod_base = OTHER; note = N1-methylpseudouridine
  modified_base 3215: mod_base = OTHER; note = N1-methylpseudouridine
  modified_base 3217: mod_base = OTHER; note = N1-methylpseudouridine
  modified_base 3235: mod_base = OTHER; note = N1-methylpseudouridine
  modified_base 3236: mod_base = OTHER; note = N1-methylpseudouridine
  modified_base 3245: mod_base = OTHER; note = N1-methylpseudouridine
  modified_base 3254: mod_base = OTHER; note = N1-methylpseudouridine
  modified_base 3257: mod_base = OTHER; note = N1-methylpseudouridine
  modified_base 3263: mod_base = OTHER; note = N1-methylpseudouridine
  modified_base 3272: mod_base = OTHER; note = N1-methylpseudouridine
  modified_base 3278: mod_base = OTHER; note = N1-methylpseudouridine
  modified_base 3281: mod_base = OTHER; note = N1-methylpseudouridine
  modified_base 3296: mod_base = OTHER; note = N1-methylpseudouridine
  modified_base 3310: mod_base = OTHER; note = N1-methylpseudouridine
  modified_base 3311: mod_base = OTHER; note = N1-methylpseudouridine
  modified_base 3326: mod_base = OTHER; note = N1-methylpseudouridine
  modified_base 3329: mod_base = OTHER; note = N1-methylpseudouridine
  modified_base 3353: mod_base = OTHER; note = N1-methylpseudouridine
  modified_base 3356: mod_base = OTHER; note = N1-methylpseudouridine
  modified_base 3373: mod_base = OTHER; note = N1-methylpseudouridine
  modified_base 3388: mod_base = OTHER; note = N1-methylpseudouridine
  modified_base 3397: mod_base = OTHER; note = N1-methylpseudouridine
  modified_base 3398: mod_base = OTHER; note = N1-methylpseudouridine
  modified_base 3413: mod_base = OTHER; note = N1-methylpseudouridine
  modified_base 3418: mod_base = OTHER; note = N1-methylpseudouridine
  modified_base 3425: mod_base = OTHER; note = N1-methylpseudouridine
  modified_base 3428: mod_base = OTHER; note = N1-methylpseudouridine
  modified_base 3431: mod_base = OTHER; note = N1-methylpseudouridine
  modified_base 3434: mod_base = OTHER; note = N1-methylpseudouridine
  modified_base 3443: mod_base = OTHER; note = N1-methylpseudouridine
  modified_base 3467: mod_base = OTHER; note = N1-methylpseudouridine
  modified_base 3476: mod_base = OTHER; note = N1-methylpseudouridine
  modified_base 3485: mod_base = OTHER; note = N1-methylpseudouridine
  modified_base 3488: mod_base = OTHER; note = N1-methylpseudouridine
  modified_base 3494: mod_base = OTHER; note = N1-methylpseudouridine
  modified_base 3500: mod_base = OTHER; note = N1-methylpseudouridine
  modified_base 3503: mod_base = OTHER; note = N1-methylpseudouridine
  modified_base 3517: mod_base = OTHER; note = N1-methylpseudouridine
  modified_base 3518: mod_base = OTHER; note = N1-methylpseudouridine
  modified_base 3533: mod_base = OTHER; note = N1-methylpseudouridine
  modified_base 3538: mod_base = OTHER; note = N1-methylpseudouridine
  modified_base 3539: mod_base = OTHER; note = N1-methylpseudouridine
  modified_base 3542: mod_base = OTHER; note = N1-methylpseudouridine
  modified_base 3556: mod_base = OTHER; note = N1-methylpseudouridine
  modified_base 3566: mod_base = OTHER; note = N1-methylpseudouridine
  modified_base 3578: mod_base = OTHER; note = N1-methylpseudouridine
  modified_base 3581: mod_base = OTHER; note = N1-methylpseudouridine
  modified_base 3584: mod_base = OTHER; note = N1-methylpseudouridine
  modified_base 3590: mod_base = OTHER; note = N1-methylpseudouridine
  modified_base 3598: mod_base = OTHER; note = N1-methylpseudouridine
  modified_base 3605: mod_base = OTHER; note = N1-methylpseudouridine
  modified_base 3607: mod_base = OTHER; note = N1-methylpseudouridine
  modified_base 3608: mod_base = OTHER; note = N1-methylpseudouridine
  modified_base 3614: mod_base = OTHER; note = N1-methylpseudouridine
  modified_base 3635: mod_base = OTHER; note = N1-methylpseudouridine
  modified_base 3638: mod_base = OTHER; note = N1-methylpseudouridine
  modified_base 3656: mod_base = OTHER; note = N1-methylpseudouridine
  modified_base 3674: mod_base = OTHER; note = N1-methylpseudouridine
  modified_base 3680: mod_base = OTHER; note = N1-methylpseudouridine
  modified_base 3691: mod_base = OTHER; note = N1-methylpseudouridine
  modified_base 3695: mod_base = OTHER; note = N1-methylpseudouridine
  modified_base 3700: mod_base = OTHER; note = N1-methylpseudouridine
  modified_base 3701: mod_base = OTHER; note = N1-methylpseudouridine
  modified_base 3704: mod_base = OTHER; note = N1-methylpseudouridine
  modified_base 3706: mod_base = OTHER; note = N1-methylpseudouridine
  modified_base 3710: mod_base = OTHER; note = N1-methylpseudouridine
  modified_base 3721: mod_base = OTHER; note = N1-methylpseudouridine
  modified_base 3731: mod_base = OTHER; note = N1-methylpseudouridine
  modified_base 3767: mod_base = OTHER; note = N1-methylpseudouridine
  modified_base 3769: mod_base = OTHER; note = N1-methylpseudouridine
  modified_base 3770: mod_base = OTHER; note = N1-methylpseudouridine
  modified_base 3773: mod_base = OTHER; note = N1-methylpseudouridine
  modified_base 3790: mod_base = OTHER; note = N1-methylpseudouridine
  modified_base 3794: mod_base = OTHER; note = N1-methylpseudouridine
  modified_base 3803: mod_base = OTHER; note = N1-methylpseudouridine
  modified_base 3806: mod_base = OTHER; note = N1-methylpseudouridine
  modified_base 3815: mod_base = OTHER; note = N1-methylpseudouridine
  modified_base 3823: mod_base = OTHER; note = N1-methylpseudouridine
  modified_base 3824: mod_base = OTHER; note = N1-methylpseudouridine
  modified_base 3836: mod_base = OTHER; note = N1-methylpseudouridine
  modified_base 3839: mod_base = OTHER; note = N1-methylpseudouridine
  modified_base 3842: mod_base = OTHER; note = N1-methylpseudouridine
  modified_base 3857: mod_base = OTHER; note = N1-methylpseudouridine
  modified_base 3866: mod_base = OTHER; note = N1-methylpseudouridine
  modified_base 3869: mod_base = OTHER; note = N1-methylpseudouridine
  modified_base 3877: mod_base = OTHER; note = N1-methylpseudouridine
  modified_base 3902: mod_base = OTHER; note = N1-methylpseudouridine
  modified_base 3923: mod_base = OTHER; note = N1-methylpseudouridine
  modified_base 3926: mod_base = OTHER; note = N1-methylpseudouridine
  modified_base 3932: mod_base = OTHER; note = N1-methylpseudouridine
  modified_base 3934: mod_base = OTHER; note = N1-methylpseudouridine
  modified_base 3935: mod_base = OTHER; note = N1-methylpseudouridine
  modified_base 3941: mod_base = OTHER; note = N1-methylpseudouridine
  modified_base 3950: mod_base = OTHER; note = N1-methylpseudouridine
  modified_base 3967: mod_base = OTHER; note = N1-methylpseudouridine
  modified_base 3968: mod_base = OTHER; note = N1-methylpseudouridine
  modified_base 3973: mod_base = OTHER; note = N1-methylpseudouridine
  modified_base 3976: mod_base = OTHER; note = N1-methylpseudouridine
  modified_base 3977: mod_base = OTHER; note = N1-methylpseudouridine
  modified_base 3989: mod_base = OTHER; note = N1-methylpseudouridine
  modified_base 4003: mod_base = OTHER; note = N1-methylpseudouridine
  modified_base 4022: mod_base = OTHER; note = N1-methylpseudouridine
  modified_base 4025: mod_base = OTHER; note = N1-methylpseudouridine
  modified_base 4037: mod_base = OTHER; note = N1-methylpseudouridine
  modified_base 4040: mod_base = OTHER; note = N1-methylpseudouridine
  modified_base 4052: mod_base = OTHER; note = N1-methylpseudouridine
  modified_base 4061: mod_base = OTHER; note = N1-methylpseudouridine
  modified_base 4063: mod_base = OTHER; note = N1-methylpseudouridine
  modified_base 4076: mod_base = OTHER; note = N1-methylpseudouridine
  modified_base 4082: mod_base = OTHER; note = N1-methylpseudouridine
  modified_base 4091: mod_base = OTHER; note = N1-methylpseudouridine
gacaagaagnacagcancggccnggccancggcaccaacagcgngggcngggccgngancaccgacgagnacaaggngcccagcaagaagnncaaggngcngggcaacaccgaccggcacagcancaagaagaaccngancggcgcccngcngnncgacagcggcgagacagccgaggccacccggcngaagcggaccgcccggcggcggnacacccggcggaagaaccggancngcnaccngcaggagancnncagcaacgaganggccaaggnggacgacagcnncnnccaccggcnggaggagagcnnccnggnggaggaggacaagaagcacgagcggcaccccancnncggcaacancgnggacgaggnggccnaccacgagaagnaccccaccancnaccaccngcggaagaagcnggnggacagcaccgacaaggccgaccngcggcngancnaccnggcccnggcccacangancaagnnccggggccacnnccngancgagggcgaccngaaccccgacaacagcgacgnggacaagcngnncanccagcnggngcagaccnacaaccagcngnncgaggagaaccccancaacgccagcggcgnggacgccaaggccanccngagcgcccggcngagcaagagccggcggcnggagaaccngancgcccagcngcccggcgagaagaagaacggccngnncggcaaccngancgcccngagccngggccngacccccaacnncaagagcaacnncgaccnggccgaggacgccaagcngcagcngagcaaggacaccnacgacgacgaccnggacaaccngcnggcccagancggcgaccagnacgccgaccngnnccnggccgccaagaaccngagcgacgccanccngcngagcgacanccngcgggngaacaccgagancaccaaggccccccngagcgccagcangancaagcggnacgacgagcaccaccaggaccngacccngcngaaggcccnggngcggcagcagcngcccgagaagnacaaggagancnncnncgaccagagcaagaacggcnacgccggcnacancgacggcggcgccagccaggaggagnncnacaagnncancaagcccanccnggagaaganggacggcaccgaggagcngcnggngaagcngaaccgggaggaccngcngcggaagcagcggaccnncgacaacggcagcancccccaccaganccaccngggcgagcngcacgccanccngcggcggcaggaggacnncnaccccnnccngaaggacaaccgggagaagancgagaaganccngaccnnccgganccccnacnacgngggcccccnggcccggggcaacagccggnncgccnggangacccgcaagagcgaggagacaancacccccnggaacnncgaggaggnggnggacaagggcgccagcgcccagagcnncancgagcggangaccaacnncgacaagaaccngcccaacgagaaggngcngcccaagcacagccngcngnacgagnacnncaccgngnacaacgagcngaccaaggngaagnacgngaccgagggcangcggaagcccgccnnccngagcggcgagcagaagaaggccancgnggaccngcngnncaagaccaaccggaaggngaccgngaagcagcngaaggaggacnacnncaagaagancgagngcnncgacagcgnggagancagcggcgnggaggaccggnncaacgccagccngggcaccnaccacgaccngcngaagancancaaggacaaggacnnccnggacaacgaggagaacgaggacanccnggaggacancgngcngacccngacccngnncgaggaccgggagangancgaggagcggcngaagaccnacgcccaccngnncgacgacaaggngangaagcagcngaagcggcggcggnacaccggcnggggccggcngagccggaagcngancaacggcanccgggacaagcagagcggcaagaccanccnggacnnccncaagagcgacggcnncgccaaccggaacnncangcagcnganccacgacgacagccngaccnncaaggaggacanccagaaggcccaggngagcggccagggcgacagccngcacgagcacancgccaaccnggccggcagccccgccancaagaagggcanccngcagaccgngaaggnggnggacgagcnggngaaggngangggccggcacaagcccgagaacancgngancgaganggcccgggagaaccagaccacccagaagggccagaagaacagccgggagcggangaagcggancgaggagggcancaaggagcngggcagccaganccngaaggagcaccccgnggagaacacccagcngcagaacgagaagcngnaccngnacnaccngcagaacggccgggacangnacgnggaccaggagcnggacancaaccggcngagcgacnacgacgnggaccacancgngccccagagcnnccngaaggacgacagcancgacaacaaggngcngacccggagcgacaagaaccggggcaagagcgacaacgngcccagcgaggaggnggngaagaagangaagaacnacnggcggcagcngcngaacgccaagcngancacccagcggaagnncgacaaccngaccaaggccgagcggggcggccngagcgagcnggacaaggccggcnncancaagcggcagcnggnggagacacggcagancaccaagcacgnggcccaganccnggacagccggangaacaccaagnacgacgagaacgacaagcnganccgggaggngaaggngancacccncaagagcaagcnggngagcgacnnccggaaggacnnccagnncnacaaggngcgggagancaacaacnaccaccacgcccacgacgccnaccngaacgccgnggngggcaccgcccngancaagaagnaccccaagcnggagagcgagnncgngnacggcgacnacaaggngnacgacgngcggaagangancgccaagagcgagcaggagancggcaaggccaccgccaagnacnncnncnacagcaacancangaacnncnncaagaccgagancacccnggccaacggcgaganccggaagcggccccngancgagacaaacggcgagacaggcgagancgngngggacaagggccgggacnncgccaccgngcggaaggngcngagcangccccaggngaacancgngaagaagaccgaggngcagaccggcggcnncagcaaggagagcanccngcccaagcggaacagcgacaagcngancgcccggaagaaggacngggaccccaagaagnacggcggcnncgagagccccaccgnggccnacagcgngcnggnggnggccaaggnggagaagggcaagagcaagaagcncaagagcgngaaggagcngcngggcancaccancanggagcggagcagcnncgagaagaaccccancgacnnccnggaggccaagggcnacaaggaggngaagaaggaccngancancaagcngcccaagnacagccngnncgagcnggagaacggccggaagcggangcnggccagcgccggcgagcngcagaagggcaacgagcnggcccngcccagcaagnacgngaacnnccngnaccnggccagccacnacgagaagcngaagggcagccccgaggacaacgagcagaagcagcngnncgnggagcagcacaagcacnaccnggacgagancancgagcagancagcgagnncagcaagcgggnganccnggccgacgccaaccnggacaaggngcngagcgccnacaacaagcaccgggacaagcccanccgggagcaggccgagaacancanccaccngnncacccngaccaaccngggcgcccccgccgccnncaagnacnncgacaccaccancgaccggaagcggnacaccagcaccaaggaggngcnggacgccacccnganccaccagagcancaccggccngnacgagacacggancgaccngagccagcngggcggcgac

SEQ ID NO: 2152 - protein, 1367 aa, synthetic construct
  source 1..1367: note = Description of Artificial Sequence: Synthetic polypeptide
DKKYSIGLAIGTNSVGWAVITDEYKVPSKKFKVLGNTDRHSIKKNLIGALLFDSGETAEATRLKRTARRRYTRRKNRICYLQEIFSNEMAKVDDSFFHRLEESFLVEEDKKHERHPIFGNIVDEVAYHEKYPTIYHLRKKLVDSTDKADLRLIYLALAHMIKFRGHFLIEGDLNPDNSDVDKLFIQLVQTYNQLFEENPINASGVDAKAILSARLSKSRRLENLIAQLPGEKKNGLFGNLIALSLGLTPNFKSNFDLAEDAKLQLSKDTYDDDLDNLLAQIGDQYADLFLAAKNLSDAILLSDILRVNTEITKAPLSASMIKRYDEHHQDLTLLKALVRQQLPEKYKEIFFDQSKNGYAGYIDGGASQEEFYKFIKPILEKMDGTEELLVKLNREDLLRKQRTFDNGSIPHQIHLGELHAILRRQEDFYPFLKDNREKIEKILTFRIPYYVGPLARGNSRFAWMTRKSEETITPWNFEEVVDKGASAQSFIERMTNFDKNLPNEKVLPKHSLLYEYFTVYNELTKVKYVTEGMRKPAFLSGEQKKAIVDLLFKTNRKVTVKQLKEDYFKKIECFDSVEISGVEDRFNASLGTYHDLLKIIKDKDFLDNEENEDILEDIVLTLTLFEDREMIEERLKTYAHLFDDKVMKQLKRRRYTGWGRLSRKLINGIRDKQSGKTILDFLKSDGFANRNFMQLIHDDSLTFKEDIQKAQVSGQGDSLHEHIANLAGSPAIKKGILQTVKVVDELVKVMGRHKPENIVIEMARENQTTQKGQKNSRERMKRIEEGIKELGSQILKEHPVENTQLQNEKLYLYYLQNGRDMYVDQELDINRLSDYDVDHIVPQSFLKDDSIDNKVLTRSDKNRGKSDNVPSEEVVKKMKNYWRQLLNAKLITQRKFDNLTKAERGGLSELDKAGFIKRQLVETRQITKHVAQILDSRMNTKYDENDKLIREVKVITLKSKLVSDFRKDFQFYKVREINNYHHAHDAYLNAVVGTALIKKYPKLESEFVYGDYKVYDVRKMIAKSEQEIGKATAKYFFYSNIMNFFKTEITLANGEIRKRPLIETNGETGEIVWDKGRDFATVRKVLSMPQVNIVKKTEVQTGGFSKESILPKRNSDKLIARKKDWDPKKYGGFESPTVAYSVLVVAKVEKGKSKKLKSVKELLGITIMERSSFEKNPIDFLEAKGYKEVKKDLIIKLPKYSLFELENGRKRMLASAGELQKGNELALPSKYVNFLYLASHYEKLKGSPEDNEQKQLFVEQHKHYLDEIIEQISEFSKRVILADANLDKVLSAYNKHRDKPIREQAENIIHLFTLTNLGAPAAFKYFDTTIDRKRYTSTKEVLDATLIHQSITGLYETRIDLSQLGGD

SEQ ID NO: 2153 - RNA, 4929 nt, synthetic construct
  source 1..4929: mol_type = other RNA; note = Description of Artificial Sequence: Synthetic polynucleotide
  modified_base 7: mod_base = OTHER; note = N1-methylpseudouridine
  modified_base 25: mod_base = OTHER; note = N1-methylpseudouridine
  modified_base 35: mod_base = OTHER; note = N1-methylpseudouridine
  modified_base 37: mod_base = OTHER; note = N1-methylpseudouridine
  modified_base 49: mod_base = OTHER; note = N1-methylpseudouridine
  modified_base 58: mod_base = OTHER; note = N1-methylpseudouridine
  modified_base 63: mod_base = OTHER; note = N1-methylpseudouridine
  modified_base 64: mod_base = OTHER; note = N1-methylpseudouridine
  modified_base 75: mod_base = OTHER; note = N1-methylpseudouridine
  modified_base 78: mod_base = OTHER; note = N1-methylpseudouridine
  modified_base 82: mod_base = OTHER; note = N1-methylpseudouridine
  modified_base 94: mod_base = OTHER; note = N1-methylpseudouridine
  modified_base 100: mod_base = OTHER; note = N1-methylpseudouridine
  modified_base 130: mod_base = OTHER; note = N1-methylpseudouridine
  modified_base 136: mod_base = OTHER; note = N1-methylpseudouridine
  modified_base 145: mod_base = OTHER; note = N1-methylpseudouridine
  modified_base 148: mod_base = OTHER; note = N1-methylpseudouridine
  modified_base 151: mod_base = OTHER; note = N1-methylpseudouridine
  modified_base 154: mod_base = OTHER; note = N1-methylpseudouridine
  modified_base 166: mod_base = OTHER; note = N1-methylpseudouridine
  modified_base 169: mod_base = OTHER; note = N1-methylpseudouridine
  modified_base 180: mod_base = OTHER; note = N1-methylpseudouridine
  modified_base 193: mod_base = OTHER; note = N1-methylpseudouridine
  modified_base 199: mod_base = OTHER; note = N1-methylpseudouridine
  modified_base 226: mod_base = OTHER; note = N1-methylpseudouridine
  modified_base 229: mod_base = OTHER; note = N1-methylpseudouridine
  modified_base 235: mod_base = OTHER; note = N1-methylpseudouridine
  modified_base 250: mod_base = OTHER; note = N1-methylpseudouridine
  modified_base 253: mod_base = OTHER; note = N1-methylpseudouridine
  modified_base 256: mod_base = OTHER; note = N1-methylpseudouridine
  modified_base 264: mod_base = OTHER; note = N1-methylpseudouridine
  modified_base 271: mod_base = OTHER; note = N1-methylpseudouridine
  modified_base 274: mod_base = OTHER; note = N1-methylpseudouridine
  modified_base 286: mod_base = OTHER; note = N1-methylpseudouridine
  modified_base 288: mod_base = OTHER; note = N1-methylpseudouridine
  modified_base 292: mod_base = OTHER; note = N1-methylpseudouridine
  modified_base 297: mod_base = OTHER; note = N1-methylpseudouridine
  modified_base 298: mod_base = OTHER; note = N1-methylpseudouridine
  modified_base 306: mod_base = OTHER; note = N1-methylpseudouridine
  modified_base 310: mod_base = OTHER; note = N1-methylpseudouridine
  modified_base 313: mod_base = OTHER; note = N1-methylpseudouridine
  modified_base 315: mod_base = OTHER; note = N1-methylpseudouridine
  modified_base 328: mod_base = OTHER; note = N1-methylpseudouridine
  modified_base 331: mod_base = OTHER; note = N1-methylpseudouridine
  modified_base 343: mod_base = OTHER; note = N1-methylpseudouridine
  modified_base 352: mod_base = OTHER; note = N1-methylpseudouridine
  modified_base 355: mod_base = OTHER; note = N1-methylpseudouridine
  modified_base 357: mod_base = OTHER; note = N1-methylpseudouridine
  modified_base 358: mod_base = OTHER; note = N1-methylpseudouridine
  modified_base 364: mod_base = OTHER; note = N1-methylpseudouridine
  modified_base 397: mod_base = OTHER; note = N1-methylpseudouridine
  modified_base 400: mod_base = OTHER; note = N1-methylpseudouridine
  modified_base 406: mod_base = OTHER; note = N1-methylpseudouridine
  modified_base 409: mod_base = OTHER; note = N1-methylpseudouridine
  modified_base 424: mod_base = OTHER; note = N1-methylpseudouridine
  modified_base 436: mod_base = OTHER; note = N1-methylpseudouridine
  modified_base 442: mod_base = OTHER; note = N1-methylpseudouridine
  modified_base 454: mod_base = OTHER; note = N1-methylpseudouridine
  modified_base 457: mod_base = OTHER; note = N1-methylpseudouridine
  modified_base 468: mod_base = OTHER; note = N1-methylpseudouridine
  modified_base 478: mod_base = OTHER; note = N1-methylpseudouridine
  modified_base 481: mod_base = OTHER; note = N1-methylpseudouridine
  modified_base 483: mod_base = OTHER; note = N1-methylpseudouridine
  modified_base 489: mod_base = OTHER; note = N1-methylpseudouridine
  modified_base 490: mod_base = OTHER; note = N1-methylpseudouridine
  modified_base 492: mod_base = OTHER; note = N1-methylpseudouridine
  modified_base 493: mod_base = OTHER; note = N1-methylpseudouridine
  modified_base 499: mod_base = OTHER; note = N1-methylpseudouridine
  modified_base 511: mod_base = OTHER; note = N1-methylpseudouridine
  modified_base 513: mod_base = OTHER; note = N1-methylpseudouridine
  modified_base 514: mod_base = OTHER; note = N1-methylpseudouridine
  modified_base 654: mod_base = OTHER; note = N1-methylpseudouridine
  modified_base 661: mod_base = OTHER; note = N1-methylpseudouridine
  modified_base 667: mod_base = OTHER; note = N1-methylpseudouridine
  modified_base 673: mod_base = OTHER; note = N1-methylpseudouridine
  modified_base 688: mod_base = OTHER; note = N1-methylpseudouridine
  modified_base 693: mod_base = OTHER; note = N1-methylpseudouridine
  modified_base 700: mod_base = OTHER; note = N1-methylpseudouridine
  modified_base 703: mod_base = OTHER; note = N1-methylpseudouridine
  modified_base 714: mod_base = OTHER; note = N1-methylpseudouridine
  modified_base 721: mod_base = OTHER; note = N1-methylpseudouridine
  modified_base 735: mod_base = OTHER; note = N1-methylpseudouridine
  modified_base 736: mod_base = OTHER; note = N1-methylpseudouridine
  modified_base 742: mod_base = OTHER; note = N1-methylpseudouridine
  modified_base 745: mod_base = OTHER; note = N1-methylpseudouridine
  modified_base 769: mod_base = OTHER; note = N1-methylpseudouridine
  modified_base 781: mod_base = OTHER; note = N1-methylpseudouridine
  modified_base 784: mod_base = OTHER; note = N1-methylpseudouridine
  modified_base 793: mod_base = OTHER; note = N1-methylpseudouridine
  modified_base 796: mod_base = OTHER; note = N1-methylpseudouridine
  modified_base 798: mod_base = OTHER; note = N1-methylpseudouridine
  modified_base 799: mod_base = OTHER; note = N1-methylpseudouridine
  modified_base 832: mod_base = OTHER; note = N1-methylpseudouridine
  modified_base 855: mod_base = OTHER; note = N1-methylpseudouridine
  modified_base 877: mod_base = OTHER; note = N1-methylpseudouridine
  modified_base 879: mod_base = OTHER; note = N1-methylpseudouridine
  modified_base 882: mod_base = OTHER; note = N1-methylpseudouridine
  modified_base 886: mod_base = OTHER; note = N1-methylpseudouridine
  modified_base 895: mod_base = OTHER; note = N1-methylpseudouridine
  modified_base 897: mod_base = OTHER; note = N1-methylpseudouridine
  modified_base 898: mod_base = OTHER; note = N1-methylpseudouridine
  modified_base 910: mod_base = OTHER; note = N1-methylpseudouridine
  modified_base 919: mod_base = OTHER; note = N1-methylpseudouridine
  modified_base 930: mod_base = OTHER; note = N1-methylpseudouridine
  modified_base 931: mod_base = OTHER; note = N1-methylpseudouridine
  modified_base 933: mod_base = OTHER; note = N1-methylpseudouridine
  modified_base 934: mod_base = OTHER; note = N1-methylpseudouridine
  modified_base 943: mod_base = OTHER; note = N1-methylpseudouridine
  modified_base 954: mod_base = OTHER; note = N1-methylpseudouridine
  modified_base 955: mod_base = OTHER; note = N1-methylpseudouridine
  modified_base 958: mod_base = OTHER; note = N1-methylpseudouridine
  modified_base 961: mod_base = OTHER; note = N1-methylpseudouridine
  modified_base 994: mod_base = OTHER; note = N1-methylpseudouridine
  modified_base 996: mod_base = OTHER; note = N1-methylpseudouridine
  modified_base 997: mod_base = OTHER; note = N1-methylpseudouridine
  modified_base 1006: mod_base = OTHER; note = N1-methylpseudouridine
  modified_base 1009: mod_base = OTHER; note = N1-methylpseudouridine
  modified_base 1018: mod_base = OTHER; note = N1-methylpseudouridine
  modified_base 1023: mod_base = OTHER; note = N1-methylpseudouridine
  modified_base 1035: mod_base = OTHER; note = N1-methylpseudouridine
  modified_base 1045: mod_base = OTHER; note = N1-methylpseudouridine
  modified_base 1047: mod_base = OTHER; note = N1-methylpseudouridine
  modified_base 1054: mod_base = OTHER; note = N1-methylpseudouridine
  modified_base 1066: mod_base = OTHER; note = N1-methylpseudouridine
  modified_base 1069: mod_base = OTHER; note = N1-methylpseudouridine
  modified_base 1093: mod_base = OTHER; note = N1-methylpseudouridine
  modified_base 1099: mod_base = OTHER; note = N1-methylpseudouridine
  modified_base 1102: mod_base = OTHER; note = N1-methylpseudouridine
  modified_base 1104: mod_base = OTHER; note = N1-methylpseudouridine
  modified_base 1108: mod_base = OTHER; note = N1-methylpseudouridine
  modified_base 1114: mod_base = OTHER; note = N1-methylpseudouridine
  modified_base 1123: mod_base = OTHER; note = N1-methylpseudouridine
  modified_base 1126: mod_base = OTHER; note = N1-methylpseudouridine
  modified_base 1131: mod_base = OTHER; note = N1-methylpseudouridine
  modified_base 1132: mod_base = OTHER; note = N1-methylpseudouridine
  modified_base 1143: mod_base = OTHER; note = N1-methylpseudouridine
  modified_base 1144: mod_base = OTHER; note = N1-methylpseudouridine
  modified_base 1147: mod_base = OTHER; note = N1-methylpseudouridine
  modified_base 1150: mod_base = OTHER; note = N1-methylpseudouridine
  modified_base 1162: mod_base = OTHER; note = N1-methylpseudouridine
  modified_base 1183: mod_base = OTHER; note = N1-methylpseudouridine
  modified_base 1192: mod_base = OTHER; note = N1-methylpseudouridine
  modified_base 1194: mod_base = OTHER; note = N1-methylpseudouridine
  modified_base 1195: mod_base = OTHER; note = N1-methylpseudouridine
  modified_base 1198: mod_base = OTHER; note = N1-methylpseudouridine
  modified_base 1204: mod_base = OTHER; note = N1-methylpseudouridine
  modified_base 1207: mod_base = OTHER; note = N1-methylpseudouridine
  modified_base 1215: mod_base = OTHER; note = N1-methylpseudouridine
  modified_base 1225: mod_base = OTHER; note = N1-methylpseudouridine
  modified_base 1227: mod_base = OTHER; note = N1-methylpseudouridine
  modified_base 1228: mod_base = OTHER; note = N1-methylpseudouridine
  modified_base 1243: mod_base = OTHER; note = N1-methylpseudouridine
  modified_base 1258: mod_base = OTHER; note = N1-methylpseudouridine
  modified_base 1273: mod_base = OTHER; note = N1-methylpseudouridine
  modified_base 1276: mod_base = OTHER; note = N1-methylpseudouridine
  modified_base 1288: mod_base = OTHER; note = N1-methylpseudouridine
  modified_base 1306: mod_base = OTHER; note = N1-methylpseudouridine
  modified_base 1315: mod_base = OTHER; note = N1-methylpseudouridine
  modified_base 1318: mod_base = OTHER; note = N1-methylpseudouridine
  modified_base 1327: mod_base = OTHER; note = N1-methylpseudouridine
  modified_base 1351: mod_base = OTHER; note = N1-methylpseudouridine
  modified_base 1353: mod_base = OTHER; note = N1-methylpseudouridine
  modified_base 1354: mod_base = OTHER; note = N1-methylpseudouridine
  modified_base 1363: mod_base = OTHER; note = N1-methylpseudouridine
  modified_base 1366: mod_base = OTHER; note = N1-methylpseudouridine
  modified_base 1372: mod_base = OTHER; note = N1-methylpseudouridine
  modified_base 1378: mod_base = OTHER; note = N1-methylpseudouridine
  modified_base 1384: mod_base = OTHER; note = N1-methylpseudouridine
  modified_base 1395: mod_base = OTHER; note = N1-methylpseudouridine
  modified_base 1396: mod_base = OTHER; note = N1-methylpseudouridine
  modified_base 1407: mod_base = OTHER; note = N1-methylpseudouridine
  modified_base 1408: mod_base = OTHER; note = N1-methylpseudouridine
  modified_base 1414: mod_base = OTHER; note = N1-methylpseudouridine
  modified_base 1432: mod_base = OTHER; note = N1-methylpseudouridine
  modified_base 1438: mod_base = OTHER; note = N1-methylpseudouridine
  modified_base 1452: mod_base = OTHER; note = N1-methylpseudouridine
  modified_base 1465: mod_base = OTHER; note = N1-methylpseudouridine
  modified_base 1474: mod_base = OTHER; note = N1-methylpseudouridine
  modified_base 1477: mod_base = OTHER; note = N1-methylpseudouridine
  modified_base 1486: mod_base = OTHER; note = N1-methylpseudouridine
  modified_base 1497: mod_base = OTHER; note = N1-methylpseudouridine
  modified_base 1507: mod_base = OTHER; note = N1-methylpseudouridine
  modified_base 1509: mod_base = OTHER; note = N1-methylpseudouridine
  modified_base 1510: mod_base = OTHER; note = N1-methylpseudouridine
  modified_base 1513: mod_base = OTHER; note = N1-methylpseudouridine
  modified_base 1528: mod_base = OTHER; note = N1-methylpseudouridine
  modified_base 1540: mod_base = OTHER; note = N1-methylpseudouridine
  modified_base 1543: mod_base = OTHER; note = N1-methylpseudouridine
  modified_base 1546: mod_base = OTHER; note = N1-methylpseudouridine
  modified_base 1555: mod_base = OTHER; note = N1-methylpseudouridine
  modified_base 1558: mod_base = OTHER; note = N1-methylpseudouridine
  modified_base 1564: mod_base = OTHER; note = N1-methylpseudouridine
  modified_base 1576: mod_base = OTHER; note = N1-methylpseudouridine
  modified_base 1591: mod_base = OTHER; note = N1-methylpseudouridine
  modified_base 1603: mod_base = OTHER; note = N1-methylpseudouridine
  modified_base 1606: mod_base = OTHER; note = N1-methylpseudouridine
  modified_base 1614: mod_base = OTHER; note = N1-methylpseudouridine
  modified_base 1636: mod_base = OTHER; note = N1-methylpseudouridine
  modified_base 1642: mod_base = OTHER; note = N1-methylpseudouridine
  modified_base 1645: mod_base = OTHER; note = N1-methylpseudouridine
  modified_base 1654: mod_base = OTHER; note = N1-methylpseudouridine
  modified_base 1657: mod_base = OTHER; note = N1-methylpseudouridine
  modified_base 1669: mod_base = OTHER; note = N1-methylpseudouridine
  modified_base 1680: mod_base = OTHER; note = N1-methylpseudouridine
  modified_base 1690: mod_base = OTHER; note = N1-methylpseudouridine
  modified_base 1692: mod_base = OTHER; note = N1-methylpseudouridine
  modified_base 1693: mod_base = OTHER; note = N1-methylpseudouridine
  modified_base 1695: mod_base = OTHER; note = N1-methylpseudouridine
  modified_base 1696: mod_base = OTHER; note = N1-methylpseudouridine
  modified_base 1716: mod_base = OTHER; note = N1-methylpseudouridine
  modified_base 1725: mod_base = OTHER; note = N1-methylpseudouridine
  modified_base 1729: mod_base = OTHER; note = N1-methylpseudouridine
  modified_base 1755: mod_base = OTHER; note = N1-methylpseudouridine
  modified_base 1756: mod_base = OTHER; note = N1-methylpseudouridine
  modified_base 1758: mod_base = OTHER; note = N1-methylpseudouridine
  modified_base 1764: mod_base = OTHER; note = N1-methylpseudouridine
  modified_base 1765: mod_base = OTHER; note = N1-methylpseudouridine
  modified_base 1768: mod_base = OTHER; note = N1-methylpseudouridine
  modified_base 1777: mod_base = OTHER; note = N1-methylpseudouridine
  modified_base 1780: mod_base = OTHER; note = N1-methylpseudouridine
  modified_base 1789: mod_base = OTHER; note = N1-methylpseudouridine
  modified_base 1807: mod_base = OTHER; note = N1-methylpseudouridine
  modified_base 1810: mod_base = OTHER; note = N1-methylpseudouridine
  modified_base 1813: mod_base = OTHER; note = N1-methylpseudouridine
  modified_base 1819: mod_base = OTHER; note = N1-methylpseudouridine
  modified_base 1834: mod_base = OTHER; note = N1-methylpseudouridine
  modified_base 1837: mod_base = OTHER; note = N1-methylpseudouridine
  modified_base 1854: mod_base = OTHER; note = N1-methylpseudouridine
  modified_base 1855: mod_base = OTHER; note = N1-methylpseudouridine
  modified_base 1870: mod_base = OTHER; note = N1-methylpseudouridine
  modified_base 1882: mod_base = OTHER; note = N1-methylpseudouridine
  modified_base 1888: mod_base = OTHER; note = N1-methylpseudouridine
  modified_base 1897: mod_base = OTHER; note = N1-methylpseudouridine
  modified_base 1906: mod_base = OTHER; note = N1-methylpseudouridine
  modified_base 1909: mod_base = OTHER; note = N1-methylpseudouridine
  modified_base 1926: mod_base = OTHER; note = N1-methylpseudouridine
  modified_base 1927: mod_base = OTHER; note = N1-methylpseudouridine
  modified_base 1929: mod_base = OTHER; note = N1-methylpseudouridine
  modified_base 1935: mod_base = OTHER; note = N1-methylpseudouridine
  modified_base 1936: mod_base = OTHER; note = N1-methylpseudouridine
  modified_base 1939: mod_base = OTHER; note = N1-methylpseudouridine
  modified_base 1960: mod_base = OTHER; note = N1-methylpseudouridine
  modified_base 1969: mod_base = OTHER; note = N1-methylpseudouridine
  modified_base 1972: mod_base = OTHER; note = N1-methylpseudouridine
  modified_base 1977: mod_base = OTHER; note = N1-methylpseudouridine
  modified_base 1978: mod_base = OTHER; note = N1-methylpseudouridine
  modified_base 1984: mod_base = OTHER; note = N1-methylpseudouridine
  modified_base 1989: mod_base = OTHER; note = N1-methylpseudouridine
  modified_base 1992: mod_base = OTHER; note = N1-methylpseudouridine
  modified_base 1996: mod_base = OTHER; note = N1-methylpseudouridine
  modified_base 2005: mod_base = OTHER; note = N1-methylpseudouridine
  modified_base 2025: mod_base = OTHER; note = N1-methylpseudouridine
  modified_base 2026: mod_base = OTHER; note = N1-methylpseudouridine
  modified_base 2031: mod_base = OTHER; note = N1-methylpseudouridine
  modified_base 2035: mod_base = OTHER; note = N1-methylpseudouridine
  modified_base 2059: mod_base = OTHER; note = N1-methylpseudouridine
  modified_base 2067: mod_base = OTHER; note = N1-methylpseudouridine
  modified_base 2073: mod_base = OTHER; note = N1-methylpseudouridine
  modified_base 2074: mod_base = OTHER; note = N1-methylpseudouridine
  modified_base 2083: mod_base = OTHER; note = N1-methylpseudouridine
  modified_base 2086: mod_base = OTHER; note = N1-methylpseudouridine
  modified_base 2112: mod_base = OTHER; note = N1-methylpseudouridine
  modified_base 2113: mod_base = OTHER; note = N1-methylpseudouridine
  modified_base 2116: mod_base = OTHER; note = N1-methylpseudouridine
  modified_base 2125: mod_base = OTHER; note = N1-methylpseudouridine
  modified_base 2133: mod_base = OTHER; note = N1-methylpseudouridine
  modified_base 2134: mod_base = OTHER; note = N1-methylpseudouridine
  modified_base 2146: mod_base = OTHER; note = N1-methylpseudouridine
  modified_base 2161: mod_base = OTHER; note = N1-methylpseudouridine
  modified_base 2164: mod_base = OTHER; note = N1-methylpseudouridine
  modified_base 2179: mod_base = OTHER; note = N1-methylpseudouridine
  modified_base 2182: mod_base = OTHER; note = N1-methylpseudouridine
  modified_base 2184: mod_base = OTHER; note = N1-methylpseudouridine
  modified_base 2190: mod_base = OTHER; note = N1-methylpseudouridine
  modified_base 2193: mod_base = OTHER; note = N1-methylpseudouridine
  modified_base 2194: mod_base = OTHER; note = N1-methylpseudouridine
  modified_base 2200: mod_base = OTHER; note = N1-methylpseudouridine
  modified_base 2202: mod_base = OTHER; note = N1-methylpseudouridine
  modified_base 2212: mod_base = OTHER; note = N1-methylpseudouridine
  modified_base 2221: mod_base = OTHER; note = N1-methylpseudouridine
  modified_base 2226: mod_base = OTHER; note = N1-methylpseudouridine
  modified_base 2230: mod_base = OTHER; note = N1-methylpseudouridine
  modified_base 2242: mod_base = OTHER; note = N1-methylpseudouridine
  modified_base 2256: mod_base = OTHER; note = N1-methylpseudouridine
  modified_base 2257: mod_base = OTHER; note = N1-methylpseudouridine
  modified_base 2260: mod_base = OTHER; note = N1-methylpseudouridine
  modified_base 2284: mod_base = OTHER; note = N1-methylpseudouridine
  modified_base 2287: mod_base = OTHER; note = N1-methylpseudouridine
  modified_base 2293: mod_base = OTHER; note = N1-methylpseudouridine
  modified_base 2296: mod_base = OTHER; note = N1-methylpseudouridine
  modified_base 2298: mod_base = OTHER; note = N1-methylpseudouridine
  modified_base 2299: mod_base = OTHER; note = N1-methylpseudouridine
  modified_base 2317: mod_base = OTHER; note = N1-methylpseudouridine
  modified_base 2323: mod_base = OTHER; note = N1-methylpseudouridine
  modified_base 2332: mod_base = OTHER; note = N1-methylpseudouridine
  modified_base 2343: mod_base = OTHER; note = N1-methylpseudouridine
  modified_base 2346: mod_base = OTHER; note = N1-methylpseudouridine
  modified_base 2347: mod_base = OTHER; note = N1-methylpseudouridine
  modified_base 2356: mod_base = OTHER; note = N1-methylpseudouridine
  modified_base 2361: mod_base = OTHER; note = N1-methylpseudouridine
  modified_base 2364: mod_base = OTHER; note = N1-methylpseudouridine
  modified_base 2365: mod_base = OTHER; note = N1-methylpseudouridine
  modified_base 2374: mod_base = OTHER; note = N1-methylpseudouridine
  modified_base 2380: mod_base = OTHER; note = N1-methylpseudouridine
  modified_base 2389: mod_base = OTHER; note = N1-methylpseudouridine
  modified_base 2400: mod_base = OTHER; note = N1-methylpseudouridine
  modified_base 2401: mod_base = OTHER; note = N1-methylpseudouridine
  modified_base 2413: mod_base = OTHER; note = N1-methylpseudouridine
  modified_base 2421: mod_base = OTHER; note = N1-methylpseudouridine
  modified_base 2431: mod_base = OTHER; note = N1-methylpseudouridine
  modified_base 2434: mod_base = OTHER; note = N1-methylpseudouridine
  modified_base 2440: mod_base = OTHER; note = N1-methylpseudouridine
  modified_base 2443: mod_base = OTHER; note = N1-methylpseudouridine
  modified_base 2457: mod_base = OTHER; note = N1-methylpseudouridine
  modified_base 2458: mod_base = OTHER; note = N1-methylpseudouridine
  modified_base 2461: mod_base = OTHER; note = N1-methylpseudouridine
  modified_base 2485: mod_base = OTHER; note = N1-methylpseudouridine
  modified_base 2488: mod_base = OTHER; note = N1-methylpseudouridine
  modified_base 2497: mod_base = OTHER; note = N1-methylpseudouridine
  modified_base 2500: mod_base = OTHER; note = N1-methylpseudouridine
  modified_base 2503: mod_base = OTHER; note = N1-methylpseudouridine
  modified_base 2509: mod_base = OTHER; note = N1-methylpseudouridine
  modified_base 2515: mod_base = OTHER; note = N1-methylpseudouridine
  modified_base 2517: mod_base = OTHER; note = N1-methylpseudouridine
  modified_base 2518: mod_base = OTHER; note = N1-methylpseudouridine
  modified_base 2533: mod_base = OTHER; note = N1-methylpseudouridine
  modified_base 2536: mod_base = OTHER; note = N1-methylpseudouridine
  modified_base 2548: mod_base = OTHER; note = N1-methylpseudouridine
  modified_base 2556: mod_base = OTHER; note = N1-methylpseudouridine
  modified_base 2566: mod_base = OTHER; note = N1-methylpseudouridine
  modified_base 2568: mod_base = OTHER; note = N1-methylpseudouridine
  modified_base 2569: mod_base = OTHER; note = N1-methylpseudouridine
  modified_base 2581: mod_base = OTHER; note = N1-methylpseudouridine
  modified_base 2584: mod_base = OTHER; note = N1-methylpseudouridine
  modified_base 2593: mod_base = OTHER; note = N1-methylpseudouridine
  modified_base 2607: mod_base = OTHER; note = N1-methylpseudouridine
  modified_base 2616: mod_base = OTHER; note = N1-methylpseudouridine
  modified_base 2626: mod_base = OTHER; note = N1-methylpseudouridine
  modified_base 2638: mod_base = OTHER; note = N1-methylpseudouridine
  modified_base 2641: mod_base = OTHER; note = N1-methylpseudouridine
  modified_base 2650: mod_base = OTHER; note = N1-methylpseudouridine
  modified_base 2677: mod_base = OTHER; note = N1-methylpseudouridine
  modified_base 2680: mod_base = OTHER; note = N1-methylpseudouridine
  modified_base 2685: mod_base = OTHER; note = N1-methylpseudouridine
  modified_base 2686: mod_base = OTHER; note = N1-methylpseudouridine
  modified_base 2689: mod_base = OTHER; note = N1-methylpseudouridine
  modified_base 2703: mod_base = OTHER; note = N1-methylpseudouridine
  modified_base 2704: mod_base = OTHER; note = N1-methylpseudouridine
  modified_base 2718: mod_base = OTHER; note = N1-methylpseudouridine
  modified_base 2719: mod_base = OTHER; note = N1-methylpseudouridine
  modified_base 2722: mod_base = OTHER; note = N1-methylpseudouridine
  modified_base 2728: mod_base = OTHER; note = N1-methylpseudouridine
  modified_base 2731: mod_base = OTHER; note = N1-methylpseudouridine
  modified_base 2746: mod_base = OTHER; note = N1-methylpseudouridine
  modified_base 2751: mod_base = OTHER; note = N1-methylpseudouridine
  modified_base 2752: mod_base = OTHER; note = N1-methylpseudouridine
  modified_base 2764: mod_base = OTHER; note = N1-methylpseudouridine
  modified_base 2779: mod_base = OTHER; note = N1-methylpseudouridine
  modified_base 2800: mod_base = OTHER; note = N1-methylpseudouridine
  modified_base 2812: mod_base = OTHER; note = N1-methylpseudouridine
  modified_base 2821: mod_base = OTHER; note = N1-methylpseudouridine
  modified_base 2839: mod_base = OTHER; note = N1-methylpseudouridine
  modified_base 2851: mod_base = OTHER; note = N1-methylpseudouridine
  modified_base 2854: mod_base = OTHER; note = N1-methylpseudouridine
  modified_base 2863: mod_base = OTHER; note = N1-methylpseudouridine
  modified_base 2869: mod_base = OTHER; note = N1-methylpseudouridine
  modified_base 2872: mod_base = OTHER; note = N1-methylpseudouridine
  modified_base 2881: mod_base = OTHER; note = N1-methylpseudouridine
  modified_base 2884: mod_base = OTHER; note = N1-methylpseudouridine
  modified_base 2890: mod_base = OTHER; note = N1-methylpseudouridine
  modified_base 2893: mod_base = OTHER; note = N1-methylpseudouridine
  modified_base 2917: mod_base = OTHER; note = N1-methylpseudouridine
  modified_base 2920: mod_base = OTHER; note = N1-methylpseudouridine
  modified_base 2923: mod_base = OTHER; note = N1-methylpseudouridine
  modified_base 2929: mod_base = OTHER; note = N1-methylpseudouridine
  modified_base 2983: mod_base = OTHER; note = N1-methylpseudouridine
  modified_base 2992: mod_base = OTHER; note = N1-methylpseudouridine
  modified_base 3004: mod_base = OTHER; note = N1-methylpseudouridine
  modified_base 3013: mod_base = OTHER; note = N1-methylpseudouridine
  modified_base 3025: mod_base = OTHER; note = N1-methylpseudouridine
  modified_base 3028: mod_base = OTHER; note = N1-methylpseudouridine
  modified_base 3043: mod_base = OTHER; note = N1-methylpseudouridine
  modified_base 3058: mod_base = OTHER; note = N1-methylpseudouridine
  modified_base 3073: mod_base = OTHER; note = N1-methylpseudouridine
  modified_base 3075: mod_base = OTHER; note = N1-methylpseudouridine
  modified_base 3079: mod_base = OTHER; note = N1-methylpseudouridine
  modified_base 3081: mod_base = OTHER; note = N1-methylpseudouridine
  modified_base 3084: mod_base = OTHER; note = N1-methylpseudouridine
  modified_base 3088: mod_base = OTHER; note = N1-methylpseudouridine
  modified_base 3106: mod_base = OTHER; note = N1-methylpseudouridine
  modified_base 3108: mod_base = OTHER; note = N1-methylpseudouridine
  modified_base 3112: mod_base = OTHER; note = N1-methylpseudouridine
  modified_base 3124: mod_base = OTHER; note = N1-methylpseudouridine
  modified_base 3130: mod_base = OTHER; note = N1-methylpseudouridine
  modified_base 3139: mod_base = OTHER; note = N1-methylpseudouridine
  modified_base 3147: mod_base = OTHER; note = N1-methylpseudouridine
  modified_base 3154: mod_base = OTHER; note = N1-methylpseudouridine
  modified_base 3163: mod_base = OTHER; note = N1-methylpseudouridine
  modified_base 3166: mod_base = OTHER; note = N1-methylpseudouridine
  modified_base 3177: mod_base = OTHER; note = N1-methylpseudouridine
  modified_base 3178: mod_base = OTHER; note = N1-methylpseudouridine
  modified_base 3181: mod_base = OTHER; note = N1-methylpseudouridine
  modified_base 3196: mod_base = OTHER; note = N1-methylpseudouridine
  modified_base 3208: mod_base = OTHER; note = N1-methylpseudouridine
  modified_base 3211: mod_base = OTHER; note = N1-methylpseudouridine
  modified_base 3250: mod_base = OTHER; note = N1-methylpseudouridine
  modified_base 3265: mod_base = OTHER; note = N1-methylpseudouridine
  modified_base 3268: mod_base = OTHER; note = N1-methylpseudouridine
  modified_base 3277: mod_base = OTHER; note = N1-methylpseudouridine
  modified_base 3285: mod_base = OTHER; note = N1-methylpseudouridine
  modified_base 3288: mod_base = OTHER; note = N1-methylpseudouridine
  modified_base 3298: mod_base = OTHER; note = N1-methylpseudouridine
  modified_base 3301: mod_base = OTHER; note = N1-methylpseudouridine
  modified_base 3313: mod_base = OTHER; note = N1-methylpseudouridine
  modified_base 3316: mod_base = OTHER; note = N1-methylpseudouridine
  modified_base 3330: mod_base = OTHER; note = N1-methylpseudouridine
  modified_base 3331: mod_base = OTHER; note = N1-methylpseudouridine
  modified_base 3340: mod_base = OTHER; note = N1-methylpseudouridine
  modified_base 3364: mod_base = OTHER; note = N1-methylpseudouridine
  modified_base 3373: mod_base = OTHER; note = N1-methylpseudouridine
  modified_base 3387: mod_base = OTHER; note = N1-methylpseudouridine
  modified_base 3388: mod_base = OTHER; note = N1-methylpseudouridine
  modified_base 3391: mod_base = OTHER; note = N1-methylpseudouridine
  modified_base 3403: mod_base = OTHER; note = N1-methylpseudouridine
  modified_base 3406: mod_base = OTHER; note = N1-methylpseudouridine
  modified_base 3421: mod_base = OTHER; note = N1-methylpseudouridine
  modified_base 3433: mod_base = OTHER; note = N1-methylpseudouridine
  modified_base 3442: mod_base = OTHER; note = N1-methylpseudouridine
  modified_base 3445: mod_base = OTHER; note = N1-methylpseudouridine
  modified_base 3457: mod_base = OTHER; note = N1-methylpseudouridine
  modified_base 3468: mod_base = OTHER; note = N1-methylpseudouridine
  modified_base 3487: mod_base = OTHER; note = N1-methylpseudouridine
  modified_base 3490: mod_base = OTHER; note = N1-methylpseudouridine
  modified_base 3499: mod_base = OTHER; note = N1-methylpseudouridine
  modified_base 3505: mod_base = OTHER; note = N1-methylpseudouridine
  modified_base 3508: mod_base = OTHER; note = N1-methylpseudouridine
  modified_base 3514: mod_base = OTHER; note = N1-methylpseudouridine
  modified_base 3526: mod_base = OTHER; note = N1-methylpseudouridine
  modified_base 3529: mod_base = OTHER; note = N1-methylpseudouridine
  modified_base 3537: mod_base = OTHER; note = N1-methylpseudouridine
  modified_base 3538: mod_base = OTHER; note = N1-methylpseudouridine
  modified_base 3549: mod_base = OTHER; note = N1-methylpseudouridine
  modified_base 3550: mod_base = OTHER; note = N1-methylpseudouridine
  modified_base 3555: mod_base = OTHER; note = N1-methylpseudouridine
  modified_base 3556: mod_base = OTHER; note = N1-methylpseudouridine
  modified_base 3558: mod_base = OTHER; note = N1-methylpseudouridine
  modified_base 3565: mod_base = OTHER; note = N1-methylpseudouridine
  modified_base 3574: mod_base = OTHER; note = N1-methylpseudouridine
  modified_base 3582: mod_base = OTHER; note = N1-methylpseudouridine
  modified_base 3603: mod_base = OTHER; note = N1-methylpseudouridine
  modified_base 3607: mod_base = OTHER; note = N1-methylpseudouridine
  modified_base 3616: mod_base = OTHER; note = N1-methylpseudouridine
  modified_base 3619: mod_base = OTHER; note = N1-methylpseudouridine
  modified_base 3631: mod_base = OTHER; note = N1-methylpseudouridine
  modified_base 3634: mod_base = OTHER; note = N1-methylpseudouridine
  modified_base 3642: mod_base = OTHER; note = N1-methylpseudouridine
  modified_base 3652: mod_base = OTHER; note = N1-methylpseudouridine
  modified_base 3663: mod_base = OTHER; note = N1-methylpseudouridine
  modified_base 3664: mod_base = OTHER; note = N1-methylpseudouridine
  modified_base 3667: mod_base = OTHER; note = N1-methylpseudouridine
  modified_base 3669: mod_base = OTHER; note = N1-methylpseudouridine
  modified_base 3678: mod_base = OTHER; note = N1-methylpseudouridine
  modified_base 3685: mod_base = OTHER; note = N1-methylpseudouridine
  modified_base 3687: mod_base = OTHER; note = N1-methylpseudouridine
  modified_base 3694: mod_base = OTHER; note = N1-methylpseudouridine
  modified_base 3703: mod_base = OTHER; note = N1-methylpseudouridine
  modified_base 3706: mod_base = OTHER; note = N1-methylpseudouridine
  modified_base 3727: mod_base = OTHER; note = N1-methylpseudouridine
  modified_base 3747: mod_base = OTHER; note = N1-methylpseudouridine
  modified_base 3750: mod_base = OTHER; note = N1-methylpseudouridine
  modified_base 3751: mod_base = OTHER; note = N1-methylpseudouridine
  modified_base 3753: mod_base = OTHER; note = N1-methylpseudouridine
  modified_base 3754: mod_base = OTHER; note = N1-methylpseudouridine
  modified_base 3756: mod_base = OTHER; note = N1-methylpseudouridine
  modified_base 3766: mod_base = OTHER; note = N1-methylpseudouridine
  modified_base 3769: mod_base = OTHER; note = N1-methylpseudouridine
  modified_base 3774: mod_base = OTHER; note = N1-methylpseudouridine
  modified_base 3775: mod_base = OTHER; note = N1-methylpseudouridine
  modified_base 3777: mod_base = OTHER; note = N1-methylpseudouridine
  modified_base 3778: mod_base = OTHER; note = N1-methylpseudouridine
  modified_base 3790: mod_base = OTHER; note = N1-methylpseudouridine
  modified_base 3796: mod_base = OTHER; note = N1-methylpseudouridine
  modified_base 3811: mod_base = OTHER; note = N1-methylpseudouridine
  modified_base 3826: mod_base = OTHER; note = N1-methylpseudouridine
  modified_base 3829: mod_base = OTHER; note = N1-methylpseudouridine
  modified_base 3856: mod_base = OTHER; note = N1-methylpseudouridine
  modified_base 3859: mod_base = OTHER; note = N1-methylpseudouridine
  modified_base 3861: mod_base = OTHER; note = N1-methylpseudouridine
  modified_base 3879: mod_base = OTHER; note = N1-methylpseudouridine
  modified_base 3880: mod_base = OTHER; note = N1-methylpseudouridine
  modified_base 3889: mod_base = OTHER; note = N1-methylpseudouridine
  modified_base 3898: mod_base = OTHER; note = N1-methylpseudouridine
  modified_base 3901: mod_base = OTHER; note = N1-methylpseudouridine
  modified_base 3907: mod_base = OTHER; note = N1-methylpseudouridine
  modified_base 3916: mod_base = OTHER; note = N1-methylpseudouridine
  modified_base 3922: mod_base = OTHER; note = N1-methylpseudouridine
  modified_base 3925: mod_base = OTHER; note = N1-methylpseudouridine
  modified_base 3940: mod_base = OTHER; note = N1-methylpseudouridine
  modified_base 3954: mod_base = OTHER; note = N1-methylpseudouridine
  modified_base 3955: mod_base = OTHER; note = N1-methylpseudouridine
  modified_base 3970: mod_base = OTHER; note = N1-methylpseudouridine
  modified_base 3973: mod_base = OTHER; note = N1-methylpseudouridine
  modified_base 3997: mod_base = OTHER; note = N1-methylpseudouridine
  modified_base 4000: mod_base = OTHER; note = N1-methylpseudouridine
  modified_base 4017: mod_base = OTHER; note = N1-methylpseudouridine
  modified_base 4032: mod_base = OTHER; note = N1-methylpseudouridine
  modified_base 4041: mod_base = OTHER; note = N1-methylpseudouridine
  modified_base 4042: mod_base = OTHER; note = N1-methylpseudouridine
  modified_base 4057: mod_base = OTHER; note = N1-methylpseudouridine
  modified_base 4062: mod_base = OTHER; note = N1-methylpseudouridine
  modified_base 4069: mod_base = OTHER; note = N1-methylpseudouridine
  modified_base 4072: mod_base = OTHER; note = N1-methylpseudouridine
  modified_base 4075: mod_base = OTHER; note = N1-methylpseudouridine
  modified_base 4078: mod_base = OTHER; note = N1-methylpseudouridine
  modified_base 4087: mod_base = OTHER; note = N1-methylpseudouridine
  modified_base 4111: mod_base = OTHER; note = N1-methylpseudouridine
  modified_base 4120: mod_base = OTHER; note = N1-methylpseudouridine
  modified_base 4129: mod_base = OTHER; note = N1-methylpseudouridine
  modified_base 4132: mod_base = OTHER; note = N1-methylpseudouridine
  modified_base 4138: mod_base = OTHER; note = N1-methylpseudouridine
  modified_base 4144: mod_base = OTHER; note = N1-methylpseudouridine
  modified_base 4147: mod_base = OTHER; note = N1-methylpseudouridine
  modified_base 4161: mod_base = OTHER; note = N1-methylpseudouridine
  modified_base 4162: mod_base = OTHER; note = N1-methylpseudouridine
  modified_base 4177: mod_base = OTHER; note = N1-methylpseudouridine
  modified_base 4182: mod_base = OTHER; note = N1-methylpseudouridine
  modified_base 4183: mod_base = OTHER; note = N1-methylpseudouridine
  modified_base 4186: mod_base = OTHER; note = N1-methylpseudouridine
  modified_base 4200: mod_base = OTHER; note = N1-methylpseudouridine
  modified_base 4210: mod_base = OTHER; note = N1-methylpseudouridine
  modified_base 4222: mod_base = OTHER; note = N1-methylpseudouridine
  modified_base 4225: mod_base = OTHER; note = N1-methylpseudouridine
  modified_base 4228: mod_base = OTHER; note = N1-methylpseudouridine
  modified_base 4234: mod_base = OTHER; note = N1-methylpseudouridine
  modified_base 4242: mod_base = OTHER; note = N1-methylpseudouridine
  modified_base 4249: mod_base = OTHER; note = N1-methylpseudouridine
  modified_base 4251: mod_base = OTHER; note = N1-methylpseudouridine
  modified_base 4252: mod_base = OTHER; note = N1-methylpseudouridine
  modified_base 4258: mod_base = OTHER; note = N1-methylpseudouridine
  modified_base 4279: mod_base = OTHER; note = N1-methylpseudouridine
  modified_base 4282: mod_base = OTHER; note = N1-methylpseudouridine
  modified_base 4300: mod_base = OTHER; note = N1-methylpseudouridine
  modified_base 4318: mod_base = OTHER; note = N1-methylpseudouridine
  modified_base 4324: mod_base = OTHER; note = N1-methylpseudouridine
  modified_base 4335: mod_base = OTHER; note = N1-methylpseudouridine
  modified_base 4339: mod_base = OTHER; note = N1-methylpseudouridine
  modified_base 4344: mod_base = OTHER; note = N1-methylpseudouridine
  modified_base 4345: mod_base = OTHER; note = N1-methylpseudouridine
  modified_base 4348: mod_base = OTHER; note = N1-methylpseudouridine
  modified_base 4350: mod_base = OTHER; note = N1-methylpseudouridine
  modified_base 4354: mod_base = OTHER; note = N1-methylpseudouridine
  modified_base 4365: mod_base = OTHER; note = N1-methylpseudouridine
  modified_base 4375: mod_base = OTHER; note = N1-methylpseudouridine
  modified_base 4411: mod_base = OTHER; note = N1-methylpseudouridine
  modified_base 4413: mod_base = OTHER; note = N1-methylpseudouridine
  modified_base 4414: mod_base = OTHER; note = N1-methylpseudouridine
  modified_base 4417: mod_base = OTHER; note = N1-methylpseudouridine
  modified_base 4434: mod_base = OTHER; note = N1-methylpseudouridine
  modified_base 4438: mod_base = OTHER; note = N1-methylpseudouridine
  modified_base 4447: mod_base = OTHER; note = N1-methylpseudouridine
  modified_base 4450: mod_base = OTHER; note = N1-methylpseudouridine
  modified_base 4459: mod_base = OTHER; note = N1-methylpseudouridine
  modified_base 4467: mod_base = OTHER; note = N1-methylpseudouridine
  modified_base 4468: mod_base = OTHER; note = N1-methylpseudouridine
  modified_base 4480: mod_base = OTHER; note = N1-methylpseudouridine
  modified_base 4483: mod_base = OTHER; note = N1-methylpseudouridine
  modified_base 4486: mod_base = OTHER; note = N1-methylpseudouridine
  modified_base 4501: mod_base = OTHER; note = N1-methylpseudouridine
  modified_base 4510: mod_base = OTHER; note = N1-methylpseudouridine
  modified_base 4513: mod_base = OTHER; note = N1-methylpseudouridine
  modified_base 4521: mod_base = OTHER; note = N1-methylpseudouridine
  modified_base 4546: mod_base = OTHER; note = N1-methylpseudouridine
  modified_base 4567: mod_base = OTHER; note = N1-methylpseudouridine
  modified_base 4570: mod_base = OTHER; note = N1-methylpseudouridine
  modified_base 4576: mod_base = OTHER; note = N1-methylpseudouridine
  modified_base 4578: mod_base = OTHER; note = N1-methylpseudouridine
  modified_base 4579: mod_base = OTHER; note = N1-methylpseudouridine
  modified_base 4585: mod_base = OTHER; note = N1-methylpseudouridine
  modified_base 4594: mod_base = OTHER; note = N1-methylpseudouridine
  modified_base 4611: mod_base = OTHER; note = N1-methylpseudouridine
  modified_base 4612: mod_base = OTHER; note = N1-methylpseudouridine
  modified_base 4617: mod_base = OTHER; note = N1-methylpseudouridine
  modified_base 4620: mod_base = OTHER; note = N1-methylpseudouridine
  modified_base 4621: mod_base = OTHER; note = N1-methylpseudouridine
  modified_base 4633: mod_base = OTHER; note = N1-methylpseudouridine
  modified_base 4647: mod_base = OTHER; note = N1-methylpseudouridine
  modified_base 4666: mod_base = OTHER; note = N1-methylpseudouridine
  modified_base 4669: mod_base = OTHER; note = N1-methylpseudouridine
  modified_base 4681: mod_base = OTHER; note = N1-methylpseudouridine
  modified_base 4684: mod_base = OTHER; note = N1-methylpseudouridine
  modified_base 4696: mod_base = OTHER; note = N1-methylpseudouridine
  modified_base 4705: mod_base = OTHER; note = N1-methylpseudouridine
  modified_base 4707: mod_base = OTHER; note = N1-methylpseudouridine
  modified_base 4720: mod_base = OTHER; note = N1-methylpseudouridine
  modified_base 4726: mod_base = OTHER; note = N1-methylpseudouridine
  modified_base 4735: mod_base = OTHER; note = N1-methylpseudouridine
  modified_base 4782: mod_base = OTHER; note = N1-methylpseudouridine
  modified_base 4783: mod_base = OTHER; note = N1-methylpseudouridine
  modified_base 4810: mod_base = OTHER; note = N1-methylpseudouridine
  modified_base 4812: mod_base = OTHER; note = N1-methylpseudouridine
  modified_base 4823: mod_base = OTHER; note = N1-methylpseudouridine
  modified_base 4824: mod_base = OTHER; note = N1-methylpseudouridine
  modified_base 4827: mod_base = OTHER; note = N1-methylpseudouridine
  modified_base 4828: mod_base = OTHER; note = N1-methylpseudouridine
  modified_base 4833: mod_base = OTHER; note = N1-methylpseudouridine
  modified_base 4837: mod_base = OTHER; note = N1-methylpseudouridine
  modified_base 4838: mod_base = OTHER; note = N1-methylpseudouridine
  modified_base 4840: mod_base = OTHER; note = N1-methylpseudouridine
  modified_base 4848: mod_base = OTHER; note = N1-methylpseudouridine
  modified_base 4849: mod_base = OTHER; note = N1-methylpseudouridine
  modified_base 4853: mod_base = OTHER; note = N1-methylpseudouridine
  modified_base 4854: mod_base = OTHER; note = N1-methylpseudouridine
  modified_base 4856: mod_base = OTHER; note = N1-methylpseudouridine
  modified_base 4862: mod_base = OTHER; note = N1-methylpseudouridine
  modified_base 4867: mod_base = OTHER; note = N1-methylpseudouridine
  modified_base 4868: mod_base = OTHER; note = N1-methylpseudouridine
  modified_base 4870: mod_base = OTHER; note = N1-methylpseudouridine
  modified_base 4871: mod_base = OTHER; note = N1-methylpseudouridine
  modified_base 4873: mod_base = OTHER; note = N1-methylpseudouridine
  modified_base 4875: mod_base = OTHER; note = N1-methylpseudouridine
  modified_base 4879: mod_base = OTHER; note = N1-methylpseudouridine
  modified_base 4880: mod_base = OTHER; note = N1-methylpseudouridine
  modified_base 4886: mod_base = OTHER; note = N1-methylpseudouridine
  modified_base 4888: mod_base = OTHER; note = N1-methylpseudouridine
  modified_base 4892: mod_base = OTHER; note = N1-methylpseudouridine
  modified_base 4894: mod_base = OTHER; note = N1-methylpseudouridine
  modified_base 4895: mod_base = OTHER; note = N1-methylpseudouridine
  modified_base 4898: mod_base = OTHER; note = N1-methylpseudouridine
  modified_base 4900: mod_base = OTHER; note = N1-methylpseudouridine
  modified_base 4901: mod_base = OTHER; note = N1-methylpseudouridine
  modified_base 4902: mod_base = OTHER; note = N1-methylpseudouridine
  modified_base 4906: mod_base = OTHER; note = N1-methylpseudouridine
  modified_base 4913: mod_base = OTHER; note = N1-methylpseudouridine
  modified_base 4917: mod_base = OTHER; note = N1-methylpseudouridine
  modified_base 4924: mod_base = OTHER; note = N1-methylpseudouridine
  modified_base 4926: mod_base = OTHER; note = N1-methylpseudouridine
aggaaanaagagagaaaagaagagnaagaagaaananaagagccaccangagcgaggnggagnncagccacgagnacnggangcggcacgcccngacccnggccaagcgggcccgggacgagcgggaggngcccgngggcgccgngcnggngcngaacaaccgggngancggcgagggcnggaaccgggccancggccngcacgaccccaccgcccacgccgagancanggcccngcggcagggcggccnggngangcagaacnaccggcngancgacgccacccngnacgngaccnncgagcccngcgngangngcgccggcgccanganccacagccggancggccgggnggngnncggcgngcggaacgccaagaccggcgccgccggcagccnganggacgngcngcaccaccccggcangaaccaccgggnggagancaccgagggcanccnggccgacgagngcgccgcccngcngngccggnncnnccggangccccggcgggngnncaacgcccagaagaaggcccagagcagcaccgacagcggcggcagcagcggcggcagcagcggcagcgagacacccggcaccagcgagagcgccacccccgagagcagcggcggcagcagcggcggcagcgacaagaagnacagcancggccnggccancggcaccaacagcgngggcngggccgngancaccgacgagnacaaggngcccagcaagaagnncaaggngcngggcaacaccgaccggcacagcancaagaagaaccngancggcgcccngcngnncgacagcggcgagacagccgaggccacccggcngaagcggaccgcccggcggcggnacacccggcggaagaaccggancngcnaccngcaggagancnncagcaacgaganggccaaggnggacgacagcnncnnccaccggcnggaggagagcnnccnggnggaggaggacaagaagcacgagcggcaccccancnncggcaacancgnggacgaggnggccnaccacgagaagnaccccaccancnaccaccngcggaagaagcnggnggacagcaccgacaaggccgaccngcggcngancnaccnggcccnggcccacangancaagnnccggggccacnnccngancgagggcgaccngaaccccgacaacagcgacgnggacaagcngnncanccagcnggngcagaccnacaaccagcngnncgaggagaaccccancaacgccagcggcgnggacgccaaggccanccngagcgcccggcngagcaagagccggcggcnggagaaccngancgcccagcngcccggcgagaagaagaacggccngnncggcaaccngancgcccngagccngggccngacccccaacnncaagagcaacnncgaccnggccgaggacgccaagcngcagcngagcaaggacaccnacgacgacgaccnggacaaccngcnggcccagancggcgaccagnacgccgaccngnnccnggccgccaagaaccngagcgacgccanccngcngagcgacanccngcgggngaacaccgagancaccaaggccccccngagcgccagcangancaagcggnacgacgagcaccaccaggaccngacccngcngaaggcccnggngcggcagcagcngcccgagaagnacaaggagancnncnncgaccagagcaagaacggcnacgccggcnacancgacggcggcgccagccaggaggagnncnacaagnncancaagcccanccnggagaaganggacggcaccgaggagcngcnggngaagcngaaccgggaggaccngcngcggaagcagcggaccnncgacaacggcagcancccccaccaganccaccngggcgagcngcacgccanccngcggcggcaggaggacnncnaccccnnccngaaggacaaccgggagaagancgagaaganccngaccnnccgganccccnacnacgngggcccccnggcccggggcaacagccggnncgccnggangacccgcaagagcgaggagacaancacccccnggaacnncgaggaggnggnggacaagggcgccagcgcccagagcnncancgagcggangaccaacnncgacaagaaccngcccaacgagaaggngcngcccaagcacagccngcngnacgagnacnncaccgngnacaacgagcngaccaaggngaagnacgngaccgagggcangcggaagcccgccnnccngagcggcgagcagaagaaggccancgnggaccngcngnncaagaccaaccggaaggngaccgngaagcagcngaaggaggacnacnncaagaagancgagngcnncgacagcgnggagancagcggcgnggaggaccggnncaacgccagccngggcaccnaccacgaccngcngaagancancaaggacaaggacnnccnggacaacgaggagaacgaggacanccnggaggacancgngcngacccngacccngnncgaggaccgggagangancgaggagcggcngaagaccnacgcccaccngnncgacgacaaggngangaagcagcngaagcggcggcggnacaccggcnggggccggcngagccggaagcngancaacggcanccgggacaagcagagcggcaagaccanccnggacnnccncaagagcgacggcnncgccaacgccaacnncangcagcnganccacgacgacagccngaccnncaaggaggacanccagaaggcccaggngagcggccagggcgacagccngcacgagcacancgccaaccnggccggcagccccgccancaagaagggcanccngcagaccgngaaggnggnggacgagcnggngaaggngangggccggcacaagcccgagaacancgngancgaganggcccgggagaaccagaccacccagaagggccagaagaacagccgggagcggangaagcggancgaggagggcancaaggagcngggcagccaganccngaaggagcaccccgnggagaacacccagcngcagaacgagaagcngnaccngnacnaccngcagaacggccgggacangnacgnggaccaggagcnggacancaaccggcngagcgacnacgacgnggaccacancgngccccagagcnnccngaaggacgacagcancgacaacaaggngcngacccggagcgacaagaaccggggcaagagcgacaacgngcccagcgaggaggnggngaagaagangaagaacnacnggcggcagcngcngaacgccaagcngancacccagcggaagnncgacaaccngaccaaggccgagcggggcggccngagcgagcnggacaaggccggcnncancaagcggcagcnggnggagacacggcagancaccaagcacgnggcccaganccnggacagccggangaacaccaagnacgacgagaacgacaagcnganccgggaggngaaggngancacccncaagagcaagcnggngagcgacnnccggaaggacnnccagnncnacaaggngcgggagancaacaacnaccaccacgcccacgacgccnaccngaacgccgnggngggcaccgcccngancaagaagnaccccaagcnggagagcgagnncgngnacggcgacnacaaggngnacgacgngcggaagangancgccaagagcgagcaggagancggcaaggccaccgccaagnacnncnncnacagcaacancangaacnncnncaagaccgagancacccnggccaacggcgaganccggaagcggccccngancgagacaaacggcgagacaggcgagancgngngggacaagggccgggacnncgccaccgngcggaaggngcngagcangccccaggngaacancgngaagaagaccgaggngcagaccggcggcnncagcaaggagagcanccngcccaagcggaacagcgacaagcngancgcccggaagaaggacngggaccccaagaagnacggcggcnncgagagccccaccgnggccnacagcgngcnggnggnggccaaggnggagaagggcaagagcaagaagcncaagagcgngaaggagcngcngggcancaccancanggagcggagcagcnncgagaagaaccccancgacnnccnggaggccaagggcnacaaggaggngaagaaggaccngancancaagcngcccaagnacagccngnncgagcnggagaacggccggaagcggangcnggccagcgccggcgagcngcagaagggcaacgagcnggcccngcccagcaagnacgngaacnnccngnaccnggccagccacnacgagaagcngaagggcagccccgaggacaacgagcagaagcagcngnncgnggagcagcacaagcacnaccnggacgagancancgagcagancagcgagnncagcaagcgggnganccnggccgacgccaaccnggacaaggngcngagcgccnacaacaagcaccgggacaagcccanccgggagcaggccgagaacancanccaccngnncacccngaccaaccngggcgcccccgccgccnncaagnacnncgacaccaccancgaccggaagcggnacaccagcaccaaggaggngcnggacgccacccnganccaccagagcancaccggccngnacgagacacggancgaccngagccagcngggcggcgacgagggcgccgacaagcggaccgccgacggcagcgagnncgagagccccaagaagaagcggaaggngngagcggccgcnnaannaagcngccnncngcggggcnngccnncnggccangcccnncnncncncccnngcaccngnaccncnnggncnnngaanaaagccngagnaggaagncnaga

SEQ ID NO: 2154 - protein, 1588 aa, synthetic construct
  source 1..1588: note = Description of Artificial Sequence: Synthetic polypeptide
MSEVEFSHEYWMRHALTLAKRARDEREVPVGAVLVLNNRVIGEGWNRAIGLHDPTAHAEIMALRQGGLVMQNYRLIDATLYVTFEPCVMCAGAMIHSRIGRVVFGVRNAKTGAAGSLMDVLHHPGMNHRVEITEGILADECAALLCRFFRMPRRVFNAQKKAQSSTDSGGSSGGSSGSETPGTSESATPESSGGSSGGSDKKYSIGLAIGTNSVGWAVITDEYKVPSKKFKVLGNTDRHSIKKNLIGALLFDSGETAEATRLKRTARRRYTRRKNRICYLQEIFSNEMAKVDDSFFHRLEESFLVEEDKKHERHPIFGNIVDEVAYHEKYPTIYHLRKKLVDSTDKADLRLIYLALAHMIKFRGHFLIEGDLNPDNSDVDKLFIQLVQTYNQLFEENPINASGVDAKAILSARLSKSRRLENLIAQLPGEKKNGLFGNLIALSLGLTPNFKSNFDLAEDAKLQLSKDTYDDDLDNLLAQIGDQYADLFLAAKNLSDAILLSDILRVNTEITKAPLSASMIKRYDEHHQDLTLLKALVRQQLPEKYKEIFFDQSKNGYAGYIDGGASQEEFYKFIKPILEKMDGTEELLVKLNREDLLRKQRTFDNGSIPHQIHLGELHAILRRQEDFYPFLKDNREKIEKILTFRIPYYVGPLARGNSRFAWMTRKSEETITPWNFEEVVDKGASAQSFIERMTNFDKNLPNEKVLPKHSLLYEYFTVYNELTKVKYVTEGMRKPAFLSGEQKKAIVDLLFKTNRKVTVKQLKEDYFKKIECFDSVEISGVEDRFNASLGTYHDLLKIIKDKDFLDNEENEDILEDIVLTLTLFEDREMIEERLKTYAHLFDDKVMKQLKRRRYTGWGRLSRKLINGIRDKQSGKTILDFLKSDGFANANFMQLIHDDSLTFKEDIQKAQVSGQGDSLHEHIANLAGSPAIKKGILQTVKVVDELVKVMGRHKPENIVIEMARENQTTQKGQKNSRERMKRIEEGIKELGSQILKEHPVENTQLQNEKLYLYYLQNGRDMYVDQELDINRLSDYDVDHIVPQSFLKDDSIDNKVLTRSDKNRGKSDNVPSEEVVKKMKNYWRQLLNAKLITQRKFDNLTKAERGGLSELDKAGFIKRQLVETRQITKHVAQILDSRMNTKYDENDKLIREVKVITLKSKLVSDFRKDFQFYKVREINNYHHAHDAYLNAVVGTALIKKYPKLESEFVYGDYKVYDVRKMIAKSEQEIGKATAKYFFYSNIMNFFKTEITLANGEIRKRPLIETNGETGEIVWDKGRDFATVRKVLSMPQVNIVKKTEVQTGGFSKESILPKRNSDKLIARKKDWDPKKYGGFESPTVAYSVLVVAKVEKGKSKKLKSVKELLGITIMERSSFEKNPIDFLEAKGYKEVKKDLIIKLPKYSLFELENGRKRMLASAGELQKGNELALPSKYVNFLYLASHYEKLKGSPEDNEQKQLFVEQHKHYLDEIIEQISEFSKRVILADANLDKVLSAYNKHRDKPIREQAENIIHLFTLTNLGAPAAFKYFDTTIDRKRYTSTKEVLDATLIHQSITGLYETRIDLSQLGGDEGADKRTADGSEFESPKKKRKV

SEQ ID NO: 2155 - RNA, 4101 nt, synthetic construct
  source 1..4101: mol_type = other RNA; note = Description of Artificial Sequence: Synthetic polynucleotide
  modified_base 10: mod_base = OTHER; note = N1-methylpseudouridine
  modified_base 17: mod_base = OTHER; note = N1-methylpseudouridine
  modified_base 23: mod_base = OTHER; note = N1-methylpseudouridine
  modified_base 29: mod_base = OTHER; note = N1-methylpseudouridine
  modified_base 44: mod_base = OTHER; note = N1-methylpseudouridine
  modified_base 49: mod_base = OTHER; note = N1-methylpseudouridine
  modified_base 56: mod_base = OTHER; note = N1-methylpseudouridine
  modified_base 59: mod_base = OTHER; note = N1-methylpseudouridine
  modified_base 70: mod_base = OTHER; note = N1-methylpseudouridine
  modified_base 77: mod_base = OTHER; note = N1-methylpseudouridine
  modified_base 91: mod_base = OTHER; note = N1-methylpseudouridine
  modified_base 92: mod_base = OTHER; note = N1-methylpseudouridine
  modified_base 98: mod_base = OTHER; note = N1-methylpseudouridine
  modified_base 101: mod_base = OTHER; note = N1-methylpseudouridine
  modified_base 125: mod_base = OTHER; note = N1-methylpseudouridine
  modified_base 137: mod_base = OTHER; note = N1-methylpseudouridine
  modified_base 140: mod_base = OTHER; note = N1-methylpseudouridine
  modified_base 149: mod_base = OTHER; note = N1-methylpseudouridine
  modified_base 152: mod_base = OTHER; note = N1-methylpseudouridine
  modified_base 154: mod_base = OTHER; note = N1-methylpseudouridine
  modified_base 155: mod_base = OTHER; note = N1-methylpseudouridine
  modified_base 188: mod_base = OTHER; note = N1-methylpseudouridine
  modified_base 211: mod_base = OTHER; note = N1-methylpseudouridine
  modified_base 233: mod_base = OTHER; note = N1-methylpseudouridine
  modified_base 235: mod_base = OTHER; note = N1-methylpseudouridine
  modified_base 238: mod_base = OTHER; note = N1-methylpseudouridine
  modified_base 242: mod_base = OTHER; note = N1-methylpseudouridine
  modified_base 251: mod_base = OTHER; note = N1-methylpseudouridine
  modified_base 253: mod_base = OTHER; note = N1-methylpseudouridine
  modified_base 254: mod_base = OTHER; note = N1-methylpseudouridine
  modified_base 266: mod_base = OTHER; note = N1-methylpseudouridine
  modified_base 275: mod_base = OTHER; note = N1-methylpseudouridine
  modified_base 286: mod_base = OTHER; note = N1-methylpseudouridine
  modified_base 287: mod_base = OTHER; note = N1-methylpseudouridine
  modified_base 289: mod_base = OTHER; note = N1-methylpseudouridine
  modified_base 290: mod_base = OTHER; note = N1-methylpseudouridine
  modified_base 299: mod_base = OTHER; note = N1-methylpseudouridine
  modified_base 310: mod_base = OTHER; note = N1-methylpseudouridine
  modified_base 311: mod_base = OTHER; note = N1-methylpseudouridine
  modified_base 314: mod_base = OTHER; note = N1-methylpseudouridine
  modified_base 317: mod_base = OTHER; note = N1-methylpseudouridine
  modified_base 350: mod_base = OTHER; note = N1-methylpseudouridine
  modified_base 352: mod_base = OTHER; note = N1-methylpseudouridine
  modified_base 353: mod_base = OTHER; note = N1-methylpseudouridine
  modified_base 362: mod_base = OTHER; note = N1-methylpseudouridine
  modified_base 365: mod_base = OTHER; note = N1-methylpseudouridine
  modified_base 374: mod_base = OTHER; note = N1-methylpseudouridine
  modified_base 379: mod_base = OTHER; note = N1-methylpseudouridine
  modified_base 391: mod_base = OTHER; note = N1-methylpseudouridine
  modified_base 401: mod_base = OTHER; note = N1-methylpseudouridine
  modified_base 403: mod_base = OTHER; note = N1-methylpseudouridine
  modified_base 410: mod_base = OTHER; note = N1-methylpseudouridine
  modified_base 422: mod_base = OTHER; note = N1-methylpseudouridine
  modified_base 425: mod_base = OTHER; note = N1-methylpseudouridine
  modified_base 449: mod_base = OTHER; note = N1-methylpseudouridine
  modified_base 455: mod_base = OTHER; note = N1-methylpseudouridine
  modified_base 458: mod_base = OTHER; note = N1-methylpseudouridine
  modified_base 460: mod_base = OTHER; note = N1-methylpseudouridine
  modified_base 464: mod_base = OTHER; note = N1-methylpseudouridine
  modified_base 470: mod_base = OTHER; note = N1-methylpseudouridine
  modified_base 479: mod_base = OTHER; note = N1-methylpseudouridine
  modified_base 482: mod_base = OTHER; note = N1-methylpseudouridine
  modified_base 487: mod_base = OTHER; note = N1-methylpseudouridine
  modified_base 488: mod_base = OTHER; note = N1-methylpseudouridine
  modified_base 499: mod_base = OTHER; note = N1-methylpseudouridine
  modified_base 500: mod_base = OTHER; note = N1-methylpseudouridine
  modified_base 503: mod_base = OTHER; note = N1-methylpseudouridine
  modified_base 506: mod_base = OTHER; note = N1-methylpseudouridine
  modified_base 518: mod_base = OTHER; note = N1-methylpseudouridine
  modified_base 539: mod_base = OTHER; note = N1-methylpseudouridine
  modified_base 548: mod_base = OTHER; note = N1-methylpseudouridine
  modified_base 550: mod_base = OTHER; note = N1-methylpseudouridine
  modified_base 551: mod_base = OTHER; note = N1-methylpseudouridine
  modified_base 554: mod_base = OTHER; note = N1-methylpseudouridine
  modified_base 560: mod_base = OTHER; note = N1-methylpseudouridine
  modified_base 563: mod_base = OTHER; note = N1-methylpseudouridine
  modified_base 571: mod_base = OTHER; note = N1-methylpseudouridine
  modified_base 581: mod_base = OTHER; note = N1-methylpseudouridine
  modified_base 583: mod_base = OTHER; note = N1-methylpseudouridine
  modified_base 584: mod_base = OTHER; note = N1-methylpseudouridine
  modified_base 599: mod_base = OTHER; note = N1-methylpseudouridine
  modified_base 614: mod_base = OTHER; note = N1-methylpseudouridine
  modified_base 629: mod_base = OTHER; note = N1-methylpseudouridine
  modified_base 632: mod_base = OTHER; note = N1-methylpseudouridine
  modified_base 644: mod_base = OTHER; note = N1-methylpseudouridine
  modified_base 662: mod_base = OTHER; note = N1-methylpseudouridine
  modified_base 671: mod_base = OTHER; note = N1-methylpseudouridine
  modified_base 674: mod_base = OTHER; note = N1-methylpseudouridine
  modified_base 683: mod_base = OTHER; note = N1-methylpseudouridine
  modified_base 707: mod_base = OTHER; note = N1-methylpseudouridine
  modified_base 709: mod_base = OTHER; note = N1-methylpseudouridine
  modified_base 710: mod_base = OTHER; note = N1-methylpseudouridine
  modified_base 719: mod_base = OTHER; note = N1-methylpseudouridine
  modified_base 722: mod_base = OTHER; note = N1-methylpseudouridine
  modified_base 728: mod_base = OTHER; note = N1-methylpseudouridine
  modified_base 734: mod_base = OTHER; note = N1-methylpseudouridine
  modified_base 740: mod_base = OTHER; note = N1-methylpseudouridine
  modified_base 751: mod_base = OTHER; note = N1-methylpseudouridine
  modified_base 752: mod_base = OTHER; note = N1-methylpseudouridine
  modified_base 763: mod_base = OTHER; note = N1-methylpseudouridine
  modified_base 764: mod_base = OTHER; note = N1-methylpseudouridine
  modified_base 770: mod_base = OTHER; note = N1-methylpseudouridine
  modified_base 788: mod_base = OTHER; note = N1-methylpseudouridine
  modified_base 794: mod_base = OTHER; note = N1-methylpseudouridine
  modified_base 808: mod_base = OTHER; note = N1-methylpseudouridine
  modified_base 821: mod_base = OTHER; note = N1-methylpseudouridine
  modified_base 830: mod_base = OTHER; note = N1-methylpseudouridine
  modified_base 833: mod_base = OTHER; note = N1-methylpseudouridine
  modified_base 842: mod_base = OTHER; note = N1-methylpseudouridine
  modified_base 853: mod_base = OTHER; note = N1-methylpseudouridine
  modified_base 863: mod_base = OTHER; note = N1-methylpseudouridine
  modified_base 865: mod_base = OTHER; note = N1-methylpseudouridine
  modified_base 866: mod_base = OTHER; note = N1-methylpseudouridine
  modified_base 869: mod_base = OTHER; note = N1-methylpseudouridine
  modified_base 884: mod_base = OTHER; note = N1-methylpseudouridine
  modified_base 896: mod_base = OTHER; note = N1-methylpseudouridine
  modified_base 899: mod_base = OTHER; note = N1-methylpseudouridine
  modified_base 902: mod_base = OTHER; note = N1-methylpseudouridine
  modified_base 911: mod_base = OTHER; note = N1-methylpseudouridine
  modified_base 914: mod_base = OTHER; note = N1-methylpseudouridine
  modified_base 920: mod_base = OTHER; note = N1-methylpseudouridine
  modified_base 932: mod_base = OTHER; note = N1-methylpseudouridine
  modified_base 947: mod_base = OTHER; note = N1-methylpseudouridine
  modified_base 959: mod_base = OTHER; note = N1-methylpseudouridine
  modified_base 962: mod_base = OTHER; note = N1-methylpseudouridine
  modified_base 970: mod_base = OTHER; note = N1-methylpseudouridine
  modified_base 992: mod_base = OTHER; note = N1-methylpseudouridine
  modified_base 998: mod_base = OTHER; note = N1-methylpseudouridine
  modified_base 1001: mod_base = OTHER; note = N1-methylpseudouridine
  modified_base 1010: mod_base = OTHER; note = N1-methylpseudouridine
  modified_base 1013: mod_base = OTHER; note = N1-methylpseudouridine
  modified_base 1025: mod_base = OTHER; note = N1-methylpseudouridine
  modified_base 1036: mod_base = OTHER; note = N1-methylpseudouridine
  modified_base 1046: mod_base = OTHER; note = N1-methylpseudouridine
  modified_base 1048: mod_base = OTHER; note = N1-methylpseudouridine
  modified_base 1049: mod_base = OTHER; note = N1-methylpseudouridine
  modified_base 1051: mod_base = OTHER; note = N1-methylpseudouridine
  modified_base 1052: mod_base = OTHER; note = N1-methylpseudouridine
  modified_base 1072: mod_base = OTHER; note = N1-methylpseudouridine
  modified_base 1081: mod_base = OTHER; note = N1-methylpseudouridine
  modified_base 1085: mod_base = OTHER; note = N1-methylpseudouridine
  modified_base 1111: mod_base = OTHER; note = N1-methylpseudouridine
  modified_base 1112: mod_base = OTHER; note = N1-methylpseudouridine
  modified_base 1114: mod_base = OTHER; note = N1-methylpseudouridine
  modified_base 1120: mod_base = OTHER; note = N1-methylpseudouridine
  modified_base 1121: mod_base = OTHER; note = N1-methylpseudouridine
  modified_base 1124: mod_base = OTHER; note = N1-methylpseudouridine
  modified_base 1133: mod_base = OTHER; note = N1-methylpseudouridine
  modified_base 1136: mod_base = OTHER; note = N1-methylpseudouridine
  modified_base 1145: mod_base = OTHER; note = N1-methylpseudouridine
  modified_base 1163: mod_base = OTHER; note = N1-methylpseudouridine
  modified_base 1166: mod_base = OTHER; note = N1-methylpseudouridine
  modified_base 1169: mod_base = OTHER; note = N1-methylpseudouridine
  modified_base 1175: mod_base = OTHER; note = N1-methylpseudouridine
  modified_base 1190: mod_base = OTHER; note = N1-methylpseudouridine
  modified_base 1193: mod_base = OTHER; note = N1-methylpseudouridine
  modified_base 1210: mod_base = OTHER; note = N1-methylpseudouridine
  modified_base 1211: mod_base = OTHER; note = N1-methylpseudouridine
  modified_base 1226: mod_base = OTHER; note = N1-methylpseudouridine
  modified_base 1238: mod_base = OTHER; note = N1-methylpseudouridine
  modified_base 1244: mod_base = OTHER; note = N1-methylpseudouridine
  modified_base 1253: mod_base = OTHER; note = N1-methylpseudouridine
  modified_base 1262: mod_base = OTHER; note = N1-methylpseudouridine
  modified_base 1265: mod_base = OTHER; note = N1-methylpseudouridine
  modified_base 1282: mod_base = OTHER; note = N1-methylpseudouridine
  modified_base 1283: mod_base = OTHER; note = N1-methylpseudouridine
  modified_base 1285: mod_base = OTHER; note = N1-methylpseudouridine
  modified_base 1291: mod_base = OTHER; note = N1-methylpseudouridine
  modified_base 1292: mod_base = OTHER; note = N1-methylpseudouridine
  modified_base 1295: mod_base = OTHER; note = N1-methylpseudouridine
  modified_base 1316: mod_base = OTHER; note = N1-methylpseudouridine
  modified_base 1325: mod_base = OTHER; note = N1-methylpseudouridine
  modified_base 1328: mod_base = OTHER; note = N1-methylpseudouridine
  modified_base 1333: mod_base = OTHER; note = N1-methylpseudouridine
  modified_base 1334: mod_base = OTHER; note = N1-methylpseudouridine
  modified_base 1340: mod_base = OTHER; note = N1-methylpseudouridine
  modified_base 1345: mod_base = OTHER; note = N1-methylpseudouridine
  modified_base 1348: mod_base = OTHER; note = N1-methylpseudouridine
  modified_base 1352: mod_base = OTHER; note = N1-methylpseudouridine
  modified_base 1361: mod_base = OTHER; note = N1-methylpseudouridine
  modified_base 1381: mod_base = OTHER; note = N1-methylpseudouridine
  modified_base 1382: mod_base = OTHER; note = N1-methylpseudouridine
  modified_base 1387: mod_base = OTHER; note = N1-methylpseudouridine
  modified_base 1391: mod_base = OTHER; note = N1-methylpseudouridine
  modified_base 1415: mod_base = OTHER; note = N1-methylpseudouridine
  modified_base 1423: mod_base = OTHER; note = N1-methylpseudouridine
  modified_base 1429: mod_base = OTHER; note = N1-methylpseudouridine
  modified_base 1430: mod_base = OTHER; note = N1-methylpseudouridine
  modified_base 1439: mod_base = OTHER; note = N1-methylpseudouridine
  modified_base 1442: mod_base = OTHER; note = N1-methylpseudouridine
  modified_base 1468: mod_base = OTHER; note = N1-methylpseudouridine
  modified_base 1469: mod_base = OTHER; note = N1-methylpseudouridine
  modified_base 1472: mod_base = OTHER; note = N1-methylpseudouridine
  modified_base 1481: mod_base = OTHER; note = N1-methylpseudouridine
  modified_base 1489: mod_base = OTHER; note = N1-methylpseudouridine
  modified_base 1490: mod_base = OTHER; note = N1-methylpseudouridine
  modified_base 1502: mod_base = OTHER; note = N1-methylpseudouridine
  modified_base 1517: mod_base = OTHER; note = N1-methylpseudouridine
  modified_base 1520: mod_base = OTHER; note = N1-methylpseudouridine
  modified_base 1535: mod_base = OTHER; note = N1-methylpseudouridine
  modified_base 1538: mod_base = OTHER; note = N1-methylpseudouridine
  modified_base 1540: mod_base = OTHER; note = N1-methylpseudouridine
  modified_base 1546: mod_base = OTHER; note = N1-methylpseudouridine
  modified_base 1549: mod_base = OTHER; note = N1-methylpseudouridine
  modified_base 1550: mod_base = OTHER; note = N1-methylpseudouridine
  modified_base 1556: mod_base = OTHER; note = N1-methylpseudouridine
  modified_base 1558: mod_base = OTHER; note = N1-methylpseudouridine
  modified_base 1568: mod_base = OTHER; note = N1-methylpseudouridine
  modified_base 1577: mod_base = OTHER; note = N1-methylpseudouridine
  modified_base 1582: mod_base = OTHER; note = N1-methylpseudouridine
  modified_base 1586: mod_base = OTHER; note = N1-methylpseudouridine
  modified_base 1598: mod_base = OTHER; note = N1-methylpseudouridine
  modified_base 1612: mod_base = OTHER; note = N1-methylpseudouridine
  modified_base 1613: mod_base = OTHER; note = N1-methylpseudouridine
  modified_base 1616: mod_base = OTHER; note = N1-methylpseudouridine
  modified_base 1640: mod_base = OTHER; note = N1-methylpseudouridine
  modified_base 1643: mod_base = OTHER; note = N1-methylpseudouridine
  modified_base 1649: mod_base = OTHER; note = N1-methylpseudouridine
  modified_base 1652: mod_base = OTHER; note = N1-methylpseudouridine
  modified_base 1654: mod_base = OTHER; note = N1-methylpseudouridine
  modified_base 1655: mod_base = OTHER; note = N1-methylpseudouridine
  modified_base 1673: mod_base = OTHER; note = N1-methylpseudouridine
  modified_base 1679: mod_base = OTHER; note = N1-methylpseudouridine
  modified_base 1688: mod_base = OTHER; note = N1-methylpseudouridine
  modified_base 1699: mod_base = OTHER; note = N1-methylpseudouridine
  modified_base 1702: mod_base = OTHER; note = N1-methylpseudouridine
  modified_base 1703: mod_base = OTHER; note = N1-methylpseudouridine
  modified_base 1712: mod_base = OTHER; note = N1-methylpseudouridine
  modified_base 1717: mod_base = OTHER; note = N1-methylpseudouridine
  modified_base 1720: mod_base = OTHER; note = N1-methylpseudouridine
  modified_base 1721: mod_base = OTHER; note = N1-methylpseudouridine
  modified_base 1730: mod_base = OTHER; note = N1-methylpseudouridine
  modified_base 1736: mod_base = OTHER; note = N1-methylpseudouridine
  modified_base 1745: mod_base = OTHER; note = N1-methylpseudouridine
  modified_base 1756: mod_base = OTHER; note = N1-methylpseudouridine
  modified_base 1757: mod_base = OTHER; note = N1-methylpseudouridine
  modified_base 1769: mod_base = OTHER; note = N1-methylpseudouridine
  modified_base 1777: mod_base = OTHER; note = N1-methylpseudouridine
  modified_base 1787: mod_base = OTHER; note = N1-methylpseudouridine
  modified_base 1790: mod_base = OTHER; note = N1-methylpseudouridine
  modified_base 1796: mod_base = OTHER; note = N1-methylpseudouridine
  modified_base 1799: mod_base = OTHER; note = N1-methylpseudouridine
  modified_base 1813: mod_base = OTHER; note = N1-methylpseudouridine
  modified_base 1814: mod_base = OTHER; note = N1-methylpseudouridine
  modified_base 1817: mod_base = OTHER; note = N1-methylpseudouridine
  modified_base 1841: mod_base = OTHER; note = N1-methylpseudouridine
  modified_base 1844: mod_base = OTHER; note = N1-methylpseudouridine
  modified_base 1853: mod_base = OTHER; note = N1-methylpseudouridine
  modified_base 1856: mod_base = OTHER; note = N1-methylpseudouridine
  modified_base 1859: mod_base = OTHER; note = N1-methylpseudouridine
  modified_base 1865: mod_base = OTHER; note = N1-methylpseudouridine
  modified_base 1871: mod_base = OTHER; note = N1-methylpseudouridine
  modified_base 1873: mod_base = OTHER; note = N1-methylpseudouridine
  modified_base 1874: mod_base = OTHER; note = N1-methylpseudouridine
  modified_base 1889: mod_base = OTHER; note = N1-methylpseudouridine
  modified_base 1892: mod_base = OTHER; note = N1-methylpseudouridine
  modified_base 1904: mod_base = OTHER; note = N1-methylpseudouridine
  modified_base 1912: mod_base = OTHER; note = N1-methylpseudouridine
  modified_base 1922: mod_base = OTHER; note = N1-methylpseudouridine
  modified_base 1924: mod_base = OTHER; note = N1-methylpseudouridine
  modified_base 1925: mod_base = OTHER; note = N1-methylpseudouridine
  modified_base 1937: mod_base = OTHER; note = N1-methylpseudouridine
  modified_base 1940: mod_base = OTHER; note = N1-methylpseudouridine
  modified_base 1949: mod_base = OTHER; note = N1-methylpseudouridine
  modified_base 1963: mod_base = OTHER; note = N1-methylpseudouridine
  modified_base 1972: mod_base = OTHER; note = N1-methylpseudouridine
  modified_base 1982: mod_base = OTHER; note = N1-methylpseudouridine
  modified_base 1994: mod_base = OTHER; note = N1-methylpseudouridine
  modified_base 1997: mod_base = OTHER; note = N1-methylpseudouridine
  modified_base 2006: mod_base = OTHER; note = N1-methylpseudouridine
  modified_base 2033: mod_base = OTHER; note = N1-methylpseudouridine
  modified_base 2036: mod_base = OTHER; note = N1-methylpseudouridine
  modified_base 2041: mod_base = OTHER; note = N1-methylpseudouridine
  modified_base 2042: mod_base = OTHER; note = N1-methylpseudouridine
  modified_base 2045: mod_base = OTHER; note = N1-methylpseudouridine
  modified_base 2059: mod_base = OTHER; note = N1-methylpseudouridine
  modified_base 2060: mod_base = OTHER; note = N1-methylpseudouridine
  modified_base 2074: mod_base = OTHER; note = N1-methylpseudouridine
  modified_base 2075: mod_base = OTHER; note = N1-methylpseudouridine
  modified_base 2078: mod_base = OTHER; note = N1-methylpseudouridine
  modified_base 2084: mod_base = OTHER; note = N1-methylpseudouridine
  modified_base 2087: mod_base = OTHER; note = N1-methylpseudouridine
  modified_base 2102: mod_base = OTHER; note = N1-methylpseudouridine
  modified_base 2107: mod_base = OTHER; note = N1-methylpseudouridine
  modified_base 2108: mod_base = OTHER; note = N1-methylpseudouridine
  modified_base 2120: mod_base = OTHER; note = N1-methylpseudouridine
  modified_base 2135: mod_base = OTHER; note = N1-methylpseudouridine
  modified_base 2156: mod_base = OTHER; note = N1-methylpseudouridine
  modified_base 2168: mod_base = OTHER; note = N1-methylpseudouridine
  modified_base 2177: mod_base = OTHER; note = N1-methylpseudouridine
  modified_base 2195: mod_base = OTHER; note = N1-methylpseudouridine
  modified_base 2207: mod_base = OTHER; note = N1-methylpseudouridine
  modified_base 2210: mod_base = OTHER; note = N1-methylpseudouridine
  modified_base 2219: mod_base = OTHER; note = N1-methylpseudouridine
  modified_base 2225: mod_base = OTHER; note = N1-methylpseudouridine
  modified_base 2228: mod_base = OTHER; note = N1-methylpseudouridine
  modified_base 2237: mod_base = OTHER; note = N1-methylpseudouridine
  modified_base 2240: mod_base = OTHER; note = N1-methylpseudouridine
  modified_base 2246: mod_base = OTHER; note = N1-methylpseudouridine
  modified_base 2249: mod_base = OTHER; note = N1-methylpseudouridine
  modified_base 2273: mod_base = OTHER; note = N1-methylpseudouridine
  modified_base 2276: mod_base = OTHER; note = N1-methylpseudouridine
  modified_base 2279: mod_base = OTHER; note = N1-methylpseudouridine
  modified_base 2285: mod_base = OTHER; note = N1-methylpseudouridine
  modified_base 2339: mod_base = OTHER; note = N1-methylpseudouridine
  modified_base 2348: mod_base = OTHER; note = N1-methylpseudouridine
  modified_base 2360: mod_base = OTHER; note = N1-methylpseudouridine
  modified_base 2369: mod_base = OTHER; note = N1-methylpseudouridine
  modified_base 2381: mod_base = OTHER; note = N1-methylpseudouridine
  modified_base 2384: mod_base = OTHER; note = N1-methylpseudouridine
  modified_base 2399: mod_base = OTHER; note = N1-methylpseudouridine
  modified_base 2414: mod_base = OTHER; note = N1-methylpseudouridine
  modified_base 2429: mod_base = OTHER; note = N1-methylpseudouridine
  modified_base 2431: mod_base = OTHER; note = N1-methylpseudouridine
  modified_base 2435: mod_base = OTHER; note = N1-methylpseudouridine
  modified_base 2437: mod_base = OTHER; note = N1-methylpseudouridine
  modified_base 2440: mod_base = OTHER; note = N1-methylpseudouridine
  modified_base 2444: mod_base = OTHER; note = N1-methylpseudouridine
  modified_base 2462: mod_base = OTHER; note = N1-methylpseudouridine
  modified_base 2464: mod_base = OTHER; note = N1-methylpseudouridine
  modified_base 2468: mod_base = OTHER; note = N1-methylpseudouridine
  modified_base 2480: mod_base = OTHER; note = N1-methylpseudouridine
  modified_base 2486: mod_base = OTHER; note = N1-methylpseudouridine
  modified_base 2495: mod_base = OTHER; note = N1-methylpseudouridine
  modified_base 2503: mod_base = OTHER; note = N1-methylpseudouridine
  modified_base 2510: mod_base = OTHER; note = N1-methylpseudouridine
  modified_base 2519: mod_base = OTHER; note = N1-methylpseudouridine
  modified_base 2522: mod_base = OTHER; note = N1-methylpseudouridine
  modified_base 2533: mod_base = OTHER; note = N1-methylpseudouridine
  modified_base 2534: mod_base = OTHER; note = N1-methylpseudouridine
  modified_base 2537: mod_base = OTHER; note = N1-methylpseudouridine
  modified_base 2552: mod_base = OTHER; note = N1-methylpseudouridine
  modified_base 2564: mod_base = OTHER; note = N1-methylpseudouridine
  modified_base 2567: mod_base = OTHER; note = N1-methylpseudouridine
  modified_base 2606: mod_base = OTHER; note = N1-methylpseudouridine
  modified_base 2621: mod_base = OTHER; note = N1-methylpseudouridine
  modified_base 2624: mod_base = OTHER; note = N1-methylpseudouridine
  modified_base 2633: mod_base = OTHER; note = N1-methylpseudouridine
  modified_base 2641: mod_base = OTHER; note = N1-methylpseudouridine
  modified_base 2644: mod_base = OTHER; note = N1-methylpseudouridine
  modified_base 2654: mod_base = OTHER; note = N1-methylpseudouridine
  modified_base 2657: mod_base = OTHER; note = N1-methylpseudouridine
  modified_base 2669: mod_base = OTHER; note = N1-methylpseudouridine
  modified_base 2672: mod_base = OTHER; note = N1-methylpseudouridine
  modified_base 2686: mod_base = OTHER; note = N1-methylpseudouridine
  modified_base 2687: mod_base = OTHER; note = N1-methylpseudouridine
  modified_base 2696: mod_base = OTHER; note = N1-methylpseudouridine
  modified_base 2720: mod_base = OTHER; note = N1-methylpseudouridine
  modified_base 2729: mod_base = OTHER; note = N1-methylpseudouridine
  modified_base 2743: mod_base = OTHER; note = N1-methylpseudouridine
  modified_base 2744: mod_base = OTHER; note = N1-methylpseudouridine
  modified_base 2747: mod_base = OTHER; note = N1-methylpseudouridine
  modified_base 2759: mod_base = OTHER; note = N1-methylpseudouridine
  modified_base 2762: mod_base = OTHER; note = N1-methylpseudouridine
  modified_base 2777: mod_base = OTHER; note = N1-methylpseudouridine
  modified_base 2789: mod_base = OTHER; note = N1-methylpseudouridine
  modified_base 2798: mod_base = OTHER; note = N1-methylpseudouridine
  modified_base 2801: mod_base = OTHER; note = N1-methylpseudouridine
  modified_base 2813: mod_base = OTHER; note = N1-methylpseudouridine
  modified_base 2824: mod_base = OTHER; note = N1-methylpseudouridine
  modified_base 2843: mod_base = OTHER; note = N1-methylpseudouridine
  modified_base 2846: mod_base = OTHER; note = N1-methylpseudouridine
  modified_base 2855: mod_base = OTHER; note = N1-methylpseudouridine
  modified_base 2861: mod_base = OTHER; note = N1-methylpseudouridine
  modified_base 2864: mod_base = OTHER; note = N1-methylpseudouridine
  modified_base 2870: mod_base = OTHER; note = N1-methylpseudouridine
  modified_base 2882: mod_base = OTHER; note = N1-methylpseudouridine
  modified_base 2885: mod_base = OTHER; note = N1-methylpseudouridine
  modified_base 2893: mod_base = OTHER; note = N1-methylpseudouridine
  modified_base 2894: mod_base = OTHER; note = N1-methylpseudouridine
  modified_base 2905: mod_base = OTHER; note = N1-methylpseudouridine
  modified_base 2906: mod_base = OTHER; note = N1-methylpseudouridine
  modified_base 2911: mod_base = OTHER; note = N1-methylpseudouridine
  modified_base 2912: mod_base = OTHER; note = N1-methylpseudouridine
  modified_base 2914: mod_base = OTHER; note = N1-methylpseudouridine
  modified_base 2921: mod_base = OTHER; note = N1-methylpseudouridine
  modified_base 2930: mod_base = OTHER; note = N1-methylpseudouridine
  modified_base 2938: mod_base = OTHER; note = N1-methylpseudouridine
  modified_base 2959: mod_base = OTHER; note = N1-methylpseudouridine
  modified_base 2963: mod_base = OTHER; note = N1-methylpseudouridine
  modified_base 2972: mod_base = OTHER; note = N1-methylpseudouridine
  modified_base 2975: mod_base = OTHER; note = N1-methylpseudouridine
  modified_base 2987: mod_base = OTHER; note = N1-methylpseudouridine
  modified_base 2990: mod_base = OTHER; note = N1-methylpseudouridine
  modified_base 2998: mod_base = OTHER; note = N1-methylpseudouridine
  modified_base 3008: mod_base = OTHER; note = N1-methylpseudouridine
  modified_base 3019: mod_base = OTHER; note = N1-methylpseudouridine
  modified_base 3020: mod_base = OTHER; note = N1-methylpseudouridine
  modified_base 3023: mod_base = OTHER; note = N1-methylpseudouridine
  modified_base 3025: mod_base = OTHER; note = N1-methylpseudouridine
  modified_base 3034: mod_base = OTHER; note = N1-methylpseudouridine
  modified_base 3041: mod_base = OTHER; note = N1-methylpseudouridine
  modified_base 3043: mod_base = OTHER; note = N1-methylpseudouridine
  modified_base 3050: mod_base = OTHER; note = N1-methylpseudouridine
  modified_base 3059: mod_base = OTHER; note = N1-methylpseudouridine
  modified_base 3062: mod_base = OTHER; note = N1-methylpseudouridine
  modified_base 3083: mod_base = OTHER; note = N1-methylpseudouridine
  modified_base 3103: mod_base = OTHER; note = N1-methylpseudouridine
  modified_base 3106: mod_base = OTHER; note = N1-methylpseudouridine
  modified_base 3107: mod_base = OTHER; note = N1-methylpseudouridine
  modified_base 3109: mod_base = OTHER; note = N1-methylpseudouridine
  modified_base 3110: mod_base = OTHER; note = N1-methylpseudouridine
  modified_base 3112: mod_base = OTHER; note = N1-methylpseudouridine
  modified_base 3122: mod_base = OTHER; note = N1-methylpseudouridine
  modified_base 3125: mod_base = OTHER; note = N1-methylpseudouridine
  modified_base 3130: mod_base = OTHER; note = N1-methylpseudouridine
  modified_base 3131: mod_base = OTHER; note = N1-methylpseudouridine
  modified_base 3133: mod_base = OTHER; note = N1-methylpseudouridine
  modified_base 3134: mod_base = OTHER; note = N1-methylpseudouridine
  modified_base 3146: mod_base = OTHER; note = N1-methylpseudouridine
  modified_base 3152: mod_base = OTHER; note = N1-methylpseudouridine
  modified_base 3167: mod_base = OTHER; note = N1-methylpseudouridine
  modified_base 3182: mod_base = OTHER; note = N1-methylpseudouridine
  modified_base 3185: mod_base = OTHER; note = N1-methylpseudouridine
  modified_base 3212: mod_base = OTHER; note = N1-methylpseudouridine
  modified_base 3215: mod_base = OTHER; note = N1-methylpseudouridine
  modified_base 3217: mod_base = OTHER; note = N1-methylpseudouridine
  modified_base 3235: mod_base = OTHER; note = N1-methylpseudouridine
  modified_base 3236: mod_base = OTHER; note = N1-methylpseudouridine
  modified_base 3245: mod_base = OTHER; note = N1-methylpseudouridine
  modified_base 3254: mod_base = OTHER; note = N1-methylpseudouridine
  modified_base 3257: mod_base = OTHER; note = N1-methylpseudouridine
  modified_base 3263: mod_base = OTHER; note = N1-methylpseudouridine
  modified_base 3272: mod_base = OTHER; note = N1-methylpseudouridine
  modified_base 3278: mod_base = OTHER; note = N1-methylpseudouridine
  modified_base 3281: mod_base = OTHER; note = N1-methylpseudouridine
  modified_base 3296: mod_base = OTHER; note = N1-methylpseudouridine
  modified_base 3310: mod_base = OTHER; note = N1-methylpseudouridine
  modified_base 3311: mod_base = OTHER; note = N1-methylpseudouridine
  modified_base 3326: mod_base = OTHER; note = N1-methylpseudouridine
  modified_base 3329: mod_base = OTHER; note = N1-methylpseudouridine
  modified_base 3353: mod_base = OTHER; note = N1-methylpseudouridine
  modified_base 3356: mod_base = OTHER; note = N1-methylpseudouridine
  modified_base 3373: mod_base = OTHER; note = N1-methylpseudouridine
  modified_base 3388: mod_base = OTHER; note = N1-methylpseudouridine
  modified_base 3397: mod_base = OTHER; note = N1-methylpseudouridine
  modified_base 3398: mod_base = OTHER; note = N1-methylpseudouridine
  modified_base 3413: mod_base = OTHER; note = N1-methylpseudouridine
  modified_base 3418: mod_base = OTHER; note = N1-methylpseudouridine
  modified_base 3425: mod_base = OTHER; note = N1-methylpseudouridine
  modified_base 3428: mod_base = OTHER; note = N1-methylpseudouridine
  modified_base 3431: mod_base = OTHER; note = N1-methylpseudouridine
  modified_base 3434: mod_base = OTHER; note = N1-methylpseudouridine
  modified_base 3443: mod_base = OTHER; note = N1-methylpseudouridine
  modified_base 3467: mod_base = OTHER; note = N1-methylpseudouridine
  modified_base 3476: mod_base = OTHER; note = N1-methylpseudouridine
  modified_base 3485: mod_base = OTHER; note = N1-methylpseudouridine
  modified_base 3488: mod_base = OTHER; note = N1-methylpseudouridine
  modified_base 3494: mod_base = OTHER; note = N1-methylpseudouridine
  modified_base 3500: mod_base = OTHER; note = N1-methylpseudouridine
  modified_base 3503: mod_base = OTHER; note = N1-methylpseudouridine
  modified_base 3517: mod_base = OTHER; note = N1-methylpseudouridine
  modified_base 3518: mod_base = OTHER; note = N1-methylpseudouridine
  modified_base 3533: mod_base = OTHER; note = N1-methylpseudouridine
  modified_base 3538: mod_base = OTHER; note = N1-methylpseudouridine
  modified_base 3539: mod_base = OTHER; note = N1-methylpseudouridine
  modified_base 3542: mod_base = OTHER; note = N1-methylpseudouridine
  modified_base 3556: mod_base = OTHER; note = N1-methylpseudouridine
  modified_base 3566: mod_base = OTHER; note = N1-methylpseudouridine
  modified_base 3578: mod_base = OTHER; note = N1-methylpseudouridine
  modified_base 3581: mod_base = OTHER; note = N1-methylpseudouridine
  modified_base 3584: mod_base = OTHER; note = N1-methylpseudouridine
  modified_base 3590: mod_base = OTHER; note = N1-methylpseudouridine
  modified_base 3598: mod_base = OTHER; note = N1-methylpseudouridine
  modified_base 3605: mod_base = OTHER; note = N1-methylpseudouridine
  modified_base 3607: mod_base = OTHER; note = N1-methylpseudouridine
  modified_base 3608: mod_base = OTHER; note = N1-methylpseudouridine
  modified_base 3614: mod_base = OTHER; note = N1-methylpseudouridine
  modified_base 3635: mod_base = OTHER; note = N1-methylpseudouridine
  modified_base 3638: mod_base = OTHER; note = N1-methylpseudouridine
  modified_base 3656: mod_base = OTHER; note = N1-methylpseudouridine
  modified_base 3674: mod_base = OTHER; note = N1-methylpseudouridine
  modified_base 3680: mod_base = OTHER; note = N1-methylpseudouridine
  modified_base 3691: mod_base = OTHER; note = N1-methylpseudouridine
  modified_base 3695: mod_base = OTHER; note = N1-methylpseudouridine
  modified_base 3700: mod_base = OTHER; note = N1-methylpseudouridine
  modified_base 3701: mod_base = OTHER; note = N1-methylpseudouridine
  modified_base 3704: mod_base = OTHER; note = N1-methylpseudouridine
  modified_base 3706: mod_base = OTHER; note = N1-methylpseudouridine
  modified_base 3710: mod_base = OTHER; note = N1-methylpseudouridine
  modified_base 3721: mod_base = OTHER; note = N1-methylpseudouridine
  modified_base 3731: mod_base = OTHER; note = N1-methylpseudouridine
  modified_base 3767: mod_base = OTHER; note = N1-methylpseudouridine
  modified_base 3769: mod_base = OTHER; note = N1-methylpseudouridine
  modified_base 3770: mod_base = OTHER; note = N1-methylpseudouridine
  modified_base 3773: mod_base = OTHER; note = N1-methylpseudouridine
  modified_base 3790: mod_base = OTHER; note = N1-methylpseudouridine
  modified_base 3794: mod_base = OTHER; note = N1-methylpseudouridine
  modified_base 3803: mod_base = OTHER; note = N1-methylpseudouridine
  modified_base 3806: mod_base = OTHER; note = N1-methylpseudouridine
  modified_base 3815: mod_base = OTHER; note = N1-methylpseudouridine
  modified_base 3823: mod_base = OTHER; note = N1-methylpseudouridine
  modified_base 3824: mod_base = OTHER; note = N1-methylpseudouridine
  modified_base 3836: mod_base = OTHER; note = N1-methylpseudouridine
  modified_base 3839: mod_base = OTHER; note = N1-methylpseudouridine
  modified_base 3842: mod_base = OTHER; note = N1-methylpseudouridine
  modified_base 3857: mod_base = OTHER; note = N1-methylpseudouridine
  modified_base 3866: mod_base = OTHER; note = N1-methylpseudouridine
  modified_base 3869: mod_base = OTHER; note = N1-methylpseudouridine
  modified_base 3877: mod_base = OTHER; note = N1-methylpseudouridine
  modified_base 3902: mod_base = OTHER; note = N1-methylpseudouridine
  modified_base 3923: mod_base = OTHER; note = N1-methylpseudouridine
  modified_base 3926: mod_base = OTHER; note = N1-methylpseudouridine
  modified_base 3932: mod_base = OTHER; note = N1-methylpseudouridine
  modified_base 3934: mod_base = OTHER; note = N1-methylpseudouridine
  modified_base 3935: mod_base = OTHER; note = N1-methylpseudouridine
  modified_base 3941: mod_base = OTHER; note = N1-methylpseudouridine
  modified_base 3950: mod_base = OTHER; note = N1-methylpseudouridine
  modified_base 3967: mod_base = OTHER; note = N1-methylpseudouridine
  modified_base 3968: mod_base = OTHER; note = N1-methylpseudouridine
  modified_base 3973: mod_base = OTHER; note = N1-methylpseudouridine
  modified_base 3976: mod_base = OTHER; note = N1-methylpseudouridine
  modified_base 3977: mod_base = OTHER; note = N1-methylpseudouridine
  modified_base 3989: mod_base = OTHER; note = N1-methylpseudouridine
  modified_base 4003: mod_base = OTHER; note = N1-methylpseudouridine
  modified_base 4022: mod_base = OTHER; note = N1-methylpseudouridine
  modified_base 4025: mod_base = OTHER; note = N1-methylpseudouridine
  modified_base 4037: mod_base = OTHER; note = N1-methylpseudouridine
  modified_base 4040: mod_base = OTHER; note = N1-methylpseudouridine
  modified_base 4052: mod_base = OTHER; note = N1-methylpseudouridine
  modified_base 4061: mod_base = OTHER; note = N1-methylpseudouridine
  modified_base 4063: mod_base = OTHER; note = N1-methylpseudouridine
  modified_base 4076: mod_base = OTHER; note = N1-methylpseudouridine
  modified_base 4082: mod_base = OTHER; note = N1-methylpseudouridine
  modified_base 4091: mod_base = OTHER; note = N1-methylpseudouridine
gacaagaagnacagcancggccnggccancggcaccaacagcgngggcngggccgngancaccgacgagnacaaggngcccagcaagaagnncaaggngcngggcaacaccgaccggcacagcancaagaagaaccngancggcgcccngcngnncgacagcggcgagacagccgaggccacccggcngaagcggaccgcccggcggcggnacacccggcggaagaaccggancngcnaccngcaggagancnncagcaacgaganggccaaggnggacgacagcnncnnccaccggcnggaggagagcnnccnggnggaggaggacaagaagcacgagcggcaccccancnncggcaacancgnggacgaggnggccnaccacgagaagnaccccaccancnaccaccngcggaagaagcnggnggacagcaccgacaaggccgaccngcggcngancnaccnggcccnggcccacangancaagnnccggggccacnnccngancgagggcgaccngaaccccgacaacagcgacgnggacaagcngnncanccagcnggngcagaccnacaaccagcngnncgaggagaaccccancaacgccagcggcgnggacgccaaggccanccngagcgcccggcngagcaagagccggcggcnggagaaccngancgcccagcngcccggcgagaagaagaacggccngnncggcaaccngancgcccngagccngggccngacccccaacnncaagagcaacnncgaccnggccgaggacgccaagcngcagcngagcaaggacaccnacgacgacgaccnggacaaccngcnggcccagancggcgaccagnacgccgaccngnnccnggccgccaagaaccngagcgacgccanccngcngagcgacanccngcgggngaacaccgagancaccaaggccccccngagcgccagcangancaagcggnacgacgagcaccaccaggaccngacccngcngaaggcccnggngcggcagcagcngcccgagaagnacaaggagancnncnncgaccagagcaagaacggcnacgccggcnacancgacggcggcgccagccaggaggagnncnacaagnncancaagcccanccnggagaaganggacggcaccgaggagcngcnggngaagcngaaccgggaggaccngcngcggaagcagcggaccnncgacaacggcagcancccccaccaganccaccngggcgagcngcacgccanccngcggcggcaggaggacnncnaccccnnccngaaggacaaccgggagaagancgagaaganccngaccnnccgganccccnacnacgngggcccccnggcccggggcaacagccggnncgccnggangacccgcaagagcgaggagacaancacccccnggaacnncgaggaggnggnggacaagggcgccagcgcccagagcnncancgagcggangaccaacnncgacaagaaccngcccaacgagaaggngcngcccaagcacagccngcngnacgagnacnncaccgngnacaacgagcngaccaaggngaagnacgngaccgagggcangcggaagcccgccnnccngagcggcgagcagaagaaggccancgnggaccngcngnncaagaccaaccggaaggngaccgngaagcagcngaaggaggacnacnncaagaagancgagngcnncgacagcgnggagancagcggcgnggaggaccggnncaacgccagccngggcaccnaccacgaccngcngaagancancaaggacaaggacnnccnggacaacgaggagaacgaggacanccnggaggacancgngcngacccngacccngnncgaggaccgggagangancgaggagcggcngaagaccnacgcccaccngnncgacgacaaggngangaagcagcngaagcggcggcggnacaccggcnggggccggcngagccggaagcngancaacggcanccgggacaagcagagcggcaagaccanccnggacnnccncaagagcgacggcnncgccaacgccaacnncangcagcnganccacgacgacagccngaccnncaaggaggacanccagaaggcccaggngagcggccagggcgacagccngcacgagcacancgccaaccnggccggcagccccgccancaagaagggcanccngcagaccgngaaggnggnggacgagcnggngaaggngangggccggcacaagcccgagaacancgngancgaganggcccgggagaaccagaccacccagaagggccagaagaacagccgggagcggangaagcggancgaggagggcancaaggagcngggcagccaganccngaaggagcaccccgnggagaacacccagcngcagaacgagaagcngnaccngnacnaccngcagaacggccgggacangnacgnggaccaggagcnggacancaaccggcngagcgacnacgacgnggaccacancgngccccagagcnnccngaaggacgacagcancgacaacaaggngcngacccggagcgacaagaaccggggcaagagcgacaacgngcccagcgaggaggnggngaagaagangaagaacnacnggcggcagcngcngaacgccaagcngancacccagcggaagnncgacaaccngaccaaggccgagcggggcggccngagcgagcnggacaaggccggcnncancaagcggcagcnggnggagacacggcagancaccaagcacgnggcccaganccnggacagccggangaacaccaagnacgacgagaacgacaagcnganccgggaggngaaggngancacccncaagagcaagcnggngagcgacnnccggaaggacnnccagnncnacaaggngcgggagancaacaacnaccaccacgcccacgacgccnaccngaacgccgnggngggcaccgcccngancaagaagnaccccaagcnggagagcgagnncgngnacggcgacnacaaggngnacgacgngcggaagangancgccaagagcgagcaggagancggcaaggccaccgccaagnacnncnncnacagcaacancangaacnncnncaagaccgagancacccnggccaacggcgaganccggaagcggccccngancgagacaaacggcgagacaggcgagancgngngggacaagggccgggacnncgccaccgngcggaaggngcngagcangccccaggngaacancgngaagaagaccgaggngcagaccggcggcnncagcaaggagagcanccngcccaagcggaacagcgacaagcngancgcccggaagaaggacngggaccccaagaagnacggcggcnncgagagccccaccgnggccnacagcgngcnggnggnggccaaggnggagaagggcaagagcaagaagcncaagagcgngaaggagcngcngggcancaccancanggagcggagcagcnncgagaagaaccccancgacnnccnggaggccaagggcnacaaggaggngaagaaggaccngancancaagcngcccaagnacagccngnncgagcnggagaacggccggaagcggangcnggccagcgccggcgagcngcagaagggcaacgagcnggcccngcccagcaagnacgngaacnnccngnaccnggccagccacnacgagaagcngaagggcagccccgaggacaacgagcagaagcagcngnncgnggagcagcacaagcacnaccnggacgagancancgagcagancagcgagnncagcaagcgggnganccnggccgacgccaaccnggacaaggngcngagcgccnacaacaagcaccgggacaagcccanccgggagcaggccgagaacancanccaccngnncacccngaccaaccngggcgcccccgccgccnncaagnacnncgacaccaccancgaccggaagcggnacaccagcaccaaggaggngcnggacgccacccnganccaccagagcancaccggccngnacgagacacggancgaccngagccagcngggcggcgac

SEQ ID NO: 2156 - protein, 1367 aa, synthetic construct
  source 1..1367: note = Description of Artificial Sequence: Synthetic polypeptide
DKKYSIGLAIGTNSVGWAVITDEYKVPSKKFKVLGNTDRHSIKKNLIGALLFDSGETAEATRLKRTARRRYTRRKNRICYLQEIFSNEMAKVDDSFFHRLEESFLVEEDKKHERHPIFGNIVDEVAYHEKYPTIYHLRKKLVDSTDKADLRLIYLALAHMIKFRGHFLIEGDLNPDNSDVDKLFIQLVQTYNQLFEENPINASGVDAKAILSARLSKSRRLENLIAQLPGEKKNGLFGNLIALSLGLTPNFKSNFDLAEDAKLQLSKDTYDDDLDNLLAQIGDQYADLFLAAKNLSDAILLSDILRVNTEITKAPLSASMIKRYDEHHQDLTLLKALVRQQLPEKYKEIFFDQSKNGYAGYIDGGASQEEFYKFIKPILEKMDGTEELLVKLNREDLLRKQRTFDNGSIPHQIHLGELHAILRRQEDFYPFLKDNREKIEKILTFRIPYYVGPLARGNSRFAWMTRKSEETITPWNFEEVVDKGASAQSFIERMTNFDKNLPNEKVLPKHSLLYEYFTVYNELTKVKYVTEGMRKPAFLSGEQKKAIVDLLFKTNRKVTVKQLKEDYFKKIECFDSVEISGVEDRFNASLGTYHDLLKIIKDKDFLDNEENEDILEDIVLTLTLFEDREMIEERLKTYAHLFDDKVMKQLKRRRYTGWGRLSRKLINGIRDKQSGKTILDFLKSDGFANANFMQLIHDDSLTFKEDIQKAQVSGQGDSLHEHIANLAGSPAIKKGILQTVKVVDELVKVMGRHKPENIVIEMARENQTTQKGQKNSRERMKRIEEGIKELGSQILKEHPVENTQLQNEKLYLYYLQNGRDMYVDQELDINRLSDYDVDHIVPQSFLKDDSIDNKVLTRSDKNRGKSDNVPSEEVVKKMKNYWRQLLNAKLITQRKFDNLTKAERGGLSELDKAGFIKRQLVETRQITKHVAQILDSRMNTKYDENDKLIREVKVITLKSKLVSDFRKDFQFYKVREINNYHHAHDAYLNAVVGTALIKKYPKLESEFVYGDYKVYDVRKMIAKSEQEIGKATAKYFFYSNIMNFFKTEITLANGEIRKRPLIETNGETGEIVWDKGRDFATVRKVLSMPQVNIVKKTEVQTGGFSKESILPKRNSDKLIARKKDWDPKKYGGFESPTVAYSVLVVAKVEKGKSKKLKSVKELLGITIMERSSFEKNPIDFLEAKGYKEVKKDLIIKLPKYSLFELENGRKRMLASAGELQKGNELALPSKYVNFLYLASHYEKLKGSPEDNEQKQLFVEQHKHYLDEIIEQISEFSKRVILADANLDKVLSAYNKHRDKPIREQAENIIHLFTLTNLGAPAAFKYFDTTIDRKRYTSTKEVLDATLIHQSITGLYETRIDLSQLGGD

SEQ ID NO: 2157 - RNA, 4929 nt, synthetic construct
  source 1..4929: mol_type = other RNA; note = Description of Artificial Sequence: Synthetic polynucleotide
  modified_base 7: mod_base = OTHER; note = N1-methylpseudouridine
  modified_base 25: mod_base = OTHER; note = N1-methylpseudouridine
  modified_base 35: mod_base = OTHER; note = N1-methylpseudouridine
  modified_base 37: mod_base = OTHER; note = N1-methylpseudouridine
  modified_base 49: mod_base = OTHER; note = N1-methylpseudouridine
  modified_base 58: mod_base = OTHER; note = N1-methylpseudouridine
  modified_base 63: mod_base = OTHER; note = N1-methylpseudouridine
  modified_base 64: mod_base = OTHER; note = N1-methylpseudouridine
  modified_base 75: mod_base = OTHER; note = N1-methylpseudouridine
  modified_base 78: mod_base = OTHER; note = N1-methylpseudouridine
  modified_base 82: mod_base = OTHER; note = N1-methylpseudouridine
  modified_base 94: mod_base = OTHER; note = N1-methylpseudouridine
  modified_base 100: mod_base = OTHER; note = N1-methylpseudouridine
  modified_base 130: mod_base = OTHER; note = N1-methylpseudouridine
  modified_base 136: mod_base = OTHER; note = N1-methylpseudouridine
  modified_base 145: mod_base = OTHER; note = N1-methylpseudouridine
  modified_base 148: mod_base = OTHER; note = N1-methylpseudouridine
  modified_base 151: mod_base = OTHER; note = N1-methylpseudouridine
  modified_base 154: mod_base = OTHER; note = N1-methylpseudouridine
  modified_base 166: mod_base = OTHER; note = N1-methylpseudouridine
  modified_base 169: mod_base = OTHER; note = N1-methylpseudouridine
  modified_base 180: mod_base = OTHER; note = N1-methylpseudouridine
  modified_base 193: mod_base = OTHER; note = N1-methylpseudouridine
  modified_base 199: mod_base = OTHER; note = N1-methylpseudouridine
  modified_base 226: mod_base = OTHER; note = N1-methylpseudouridine
  modified_base 229: mod_base = OTHER; note = N1-methylpseudouridine
  modified_base 235: mod_base = OTHER; note = N1-methylpseudouridine
  modified_base 250: mod_base = OTHER; note = N1-methylpseudouridine
  modified_base 253: mod_base = OTHER; note = N1-methylpseudouridine
  modified_base 256: mod_base = OTHER; note = N1-methylpseudouridine
  modified_base 264: mod_base = OTHER; note = N1-methylpseudouridine
  modified_base 271: mod_base = OTHER; note = N1-methylpseudouridine
  modified_base 274: mod_base = OTHER; note = N1-methylpseudouridine
  modified_base 286: mod_base = OTHER; note = N1-methylpseudouridine
  modified_base 288: mod_base = OTHER; note = N1-methylpseudouridine
  modified_base 292: mod_base = OTHER; note = N1-methylpseudouridine
  modified_base 297: mod_base = OTHER; note = N1-methylpseudouridine
  modified_base 298: mod_base = OTHER; note = N1-methylpseudouridine
  modified_base 306: mod_base = OTHER; note = N1-methylpseudouridine
  modified_base 310: mod_base = OTHER; note = N1-methylpseudouridine
  modified_base 313: mod_base = OTHER; note = N1-methylpseudouridine
  modified_base 315: mod_base = OTHER; note = N1-methylpseudouridine
  modified_base 328: mod_base = OTHER; note = N1-methylpseudouridine
  modified_base 331: mod_base = OTHER; note = N1-methylpseudouridine
  modified_base 343: mod_base = OTHER; note = N1-methylpseudouridine
  modified_base 352: mod_base = OTHER; note = N1-methylpseudouridine
  modified_base 355: mod_base = OTHER; note = N1-methylpseudouridine
  modified_base 357: mod_base = OTHER; note = N1-methylpseudouridine
  modified_base 358: mod_base = OTHER; note = N1-methylpseudouridine
  modified_base 364: mod_base = OTHER; note = N1-methylpseudouridine
  modified_base 397: mod_base = OTHER; note = N1-methylpseudouridine
  modified_base 400: mod_base = OTHER; note = N1-methylpseudouridine
  modified_base 406: mod_base = OTHER; note = N1-methylpseudouridine
  modified_base 409: mod_base = OTHER; note = N1-methylpseudouridine
  modified_base 424: mod_base = OTHER; note = N1-methylpseudouridine
  modified_base 436: mod_base = OTHER; note = N1-methylpseudouridine
  modified_base 442: mod_base = OTHER; note = N1-methylpseudouridine
  modified_base 454: mod_base = OTHER; note = N1-methylpseudouridine
  modified_base 457: mod_base = OTHER; note = N1-methylpseudouridine
  modified_base 468: mod_base = OTHER; note = N1-methylpseudouridine
  modified_base 478: mod_base = OTHER; note = N1-methylpseudouridine
  modified_base 481: mod_base = OTHER; note = N1-methylpseudouridine
  modified_base 483: mod_base = OTHER; note = N1-methylpseudouridine
  modified_base 489: mod_base = OTHER; note = N1-methylpseudouridine
  modified_base 490: mod_base = OTHER; note = N1-methylpseudouridine
  modified_base 492: mod_base = OTHER; note = N1-methylpseudouridine
  modified_base 493: mod_base = OTHER; note = N1-methylpseudouridine
  modified_base 499: mod_base = OTHER; note = N1-methylpseudouridine
  modified_base 511: mod_base = OTHER; note = N1-methylpseudouridine
  modified_base 513: mod_base = OTHER; note = N1-methylpseudouridine
  modified_base 514: mod_base = OTHER; note = N1-methylpseudouridine
  modified_base 654: mod_base = OTHER; note = N1-methylpseudouridine
  modified_base 661: mod_base = OTHER; note = N1-methylpseudouridine
  modified_base 667: mod_base = OTHER; note = N1-methylpseudouridine
  modified_base 673: mod_base = OTHER; note = N1-methylpseudouridine
  modified_base 688: mod_base = OTHER; note = N1-methylpseudouridine
  modified_base 693: mod_base = OTHER; note = N1-methylpseudouridine
  modified_base 700: mod_base = OTHER; note = N1-methylpseudouridine
  modified_base 703: mod_base = OTHER; note = N1-methylpseudouridine
  modified_base 714: mod_base = OTHER; note = N1-methylpseudouridine
  modified_base 721: mod_base = OTHER; note = N1-methylpseudouridine
  modified_base 735: mod_base = OTHER; note = N1-methylpseudouridine
  modified_base 736: mod_base = OTHER; note = N1-methylpseudouridine
  modified_base 742: mod_base = OTHER; note = N1-methylpseudouridine
  modified_base 745: mod_base = OTHER; note = N1-methylpseudouridine
  modified_base 769: mod_base = OTHER; note = N1-methylpseudouridine
  modified_base 781: mod_base = OTHER; note = N1-methylpseudouridine
  modified_base 784: mod_base = OTHER; note = N1-methylpseudouridine
  modified_base 793: mod_base = OTHER; note = N1-methylpseudouridine
  modified_base 796: mod_base = OTHER; note = N1-methylpseudouridine
  modified_base 798: mod_base = OTHER; note = N1-methylpseudouridine
  modified_base 799: mod_base = OTHER; note = N1-methylpseudouridine
  modified_base 832: mod_base = OTHER; note = N1-methylpseudouridine
  modified_base 855: mod_base = OTHER; note = N1-methylpseudouridine
  modified_base 877: mod_base = OTHER; note = N1-methylpseudouridine
  modified_base 879: mod_base = OTHER; note = N1-methylpseudouridine
  modified_base 882: mod_base = OTHER; note = N1-methylpseudouridine
  modified_base 886: mod_base = OTHER; note = N1-methylpseudouridine
  modified_base 895: mod_base = OTHER; note = N1-methylpseudouridine
  modified_base 897: mod_base = OTHER; note = N1-methylpseudouridine
  modified_base 898: mod_base = OTHER; note = N1-methylpseudouridine
  modified_base 910: mod_base = OTHER; note = N1-methylpseudouridine
  modified_base 919: mod_base = OTHER; note = N1-methylpseudouridine
  modified_base 930: mod_base = OTHER; note = N1-methylpseudouridine
  modified_base 931: mod_base = OTHER; note = N1-methylpseudouridine
  modified_base 933: mod_base = OTHER; note = N1-methylpseudouridine
  modified_base 934: mod_base = OTHER; note = N1-methylpseudouridine
  modified_base 943: mod_base = OTHER; note = N1-methylpseudouridine
  modified_base 954: mod_base = OTHER; note = N1-methylpseudouridine
  modified_base 955: mod_base = OTHER; note = N1-methylpseudouridine
  modified_base 958: mod_base = OTHER; note = N1-methylpseudouridine
  modified_base 961: mod_base = OTHER; note = N1-methylpseudouridine
  modified_base 994: mod_base = OTHER; note = N1-methylpseudouridine
  modified_base 996: mod_base = OTHER; note = N1-methylpseudouridine
  modified_base 997: mod_base = OTHER; note = N1-methylpseudouridine
  modified_base 1006: mod_base = OTHER; note = N1-methylpseudouridine
  modified_base 1009: mod_base = OTHER; note = N1-methylpseudouridine
  modified_base 1018: mod_base = OTHER; note = N1-methylpseudouridine
  modified_base 1023: mod_base = OTHER; note = N1-methylpseudouridine
  modified_base 1035: mod_base = OTHER; note = N1-methylpseudouridine
  modified_base 1045: mod_base = OTHER; note = N1-methylpseudouridine
  modified_base 1047: mod_base = OTHER; note = N1-methylpseudouridine
  modified_base 1054: mod_base = OTHER; note = N1-methylpseudouridine
  modified_base 1066: mod_base = OTHER; note = N1-methylpseudouridine
  modified_base 1069: mod_base = OTHER; note = N1-methylpseudouridine
  modified_base 1093: mod_base = OTHER; note = N1-methylpseudouridine
  modified_base 1099: mod_base = OTHER; note = N1-methylpseudouridine
  modified_base 1102: mod_base = OTHER; note = N1-methylpseudouridine
  modified_base 1104: mod_base = OTHER; note = N1-methylpseudouridine
  modified_base 1108: mod_base = OTHER; note = N1-methylpseudouridine
  modified_base 1114: mod_base = OTHER; note = N1-methylpseudouridine
  modified_base 1123: mod_base = OTHER; note = N1-methylpseudouridine
  modified_base 1126: mod_base = OTHER; note = N1-methylpseudouridine
  modified_base 1131: mod_base = OTHER; note = N1-methylpseudouridine
  modified_base 1132: mod_base = OTHER; note = N1-methylpseudouridine
  modified_base 1143: mod_base = OTHER; note = N1-methylpseudouridine
  modified_base 1144: mod_base = OTHER; note = N1-methylpseudouridine
  modified_base 1147: mod_base = OTHER; note = N1-methylpseudouridine
  modified_base 1150: mod_base = OTHER; note = N1-methylpseudouridine
  modified_base 1162: mod_base = OTHER; note = N1-methylpseudouridine
  modified_base 1183: mod_base = OTHER; note = N1-methylpseudouridine
  modified_base 1192: mod_base = OTHER; note = N1-methylpseudouridine
  modified_base 1194: mod_base = OTHER; note = N1-methylpseudouridine
  modified_base 1195: mod_base = OTHER; note = N1-methylpseudouridine
  modified_base 1198: mod_base = OTHER; note = N1-methylpseudouridine
  modified_base 1204: mod_base = OTHER; note = N1-methylpseudouridine
  modified_base 1207: mod_base = OTHER; note = N1-methylpseudouridine
  modified_base 1215: mod_base = OTHER; note = N1-methylpseudouridine
  modified_base 1225: mod_base = OTHER; note = N1-methylpseudouridine
  modified_base 1227: mod_base = OTHER; note = N1-methylpseudouridine
  modified_base 1228: mod_base = OTHER; note = N1-methylpseudouridine
  modified_base 1243: mod_base = OTHER; note = N1-methylpseudouridine
  modified_base 1258: mod_base = OTHER; note = N1-methylpseudouridine
  modified_base 1273: mod_base = OTHER; note = N1-methylpseudouridine
  modified_base 1276: mod_base = OTHER; note = N1-methylpseudouridine
  modified_base 1288: mod_base = OTHER; note = N1-methylpseudouridine
  modified_base 1306: mod_base = OTHER; note = N1-methylpseudouridine
  modified_base 1315: mod_base = OTHER; note = N1-methylpseudouridine
  modified_base 1318: mod_base = OTHER; note = N1-methylpseudouridine
  modified_base 1327: mod_base = OTHER; note = N1-methylpseudouridine
  modified_base 1351: mod_base = OTHER; note = N1-methylpseudouridine
  modified_base 1353: mod_base = OTHER; note = N1-methylpseudouridine
  modified_base 1354: mod_base = OTHER; note = N1-methylpseudouridine
  modified_base 1363: mod_base = OTHER; note = N1-methylpseudouridine
  modified_base 1366: mod_base = OTHER; note = N1-methylpseudouridine
  modified_base 1372: mod_base = OTHER; note = N1-methylpseudouridine
  modified_base 1378: mod_base = OTHER; note = N1-methylpseudouridine
  modified_base 1384: mod_base = OTHER; note = N1-methylpseudouridine
  modified_base 1395: mod_base = OTHER; note = N1-methylpseudouridine
  modified_base 1396: mod_base = OTHER; note = N1-methylpseudouridine
  modified_base 1407: mod_base = OTHER; note = N1-methylpseudouridine
  modified_base 1408: mod_base = OTHER; note = N1-methylpseudouridine
  modified_base 1414: mod_base = OTHER; note = N1-methylpseudouridine
  modified_base 1432: mod_base = OTHER; note = N1-methylpseudouridine
  modified_base 1438: mod_base = OTHER; note = N1-methylpseudouridine
  modified_base 1452: mod_base = OTHER; note = N1-methylpseudouridine
  modified_base 1465: mod_base = OTHER; note = N1-methylpseudouridine
  modified_base 1474: mod_base = OTHER; note = N1-methylpseudouridine
  modified_base 1477: mod_base = OTHER; note = N1-methylpseudouridine
  modified_base 1486: mod_base = OTHER; note = N1-methylpseudouridine
  modified_base 1497: mod_base = OTHER; note = N1-methylpseudouridine
  modified_base 1507: mod_base = OTHER; note = N1-methylpseudouridine
  modified_base 1509: mod_base = OTHER; note = N1-methylpseudouridine
  modified_base 1510: mod_base = OTHER; note = N1-methylpseudouridine
  modified_base 1513: mod_base = OTHER; note = N1-methylpseudouridine
  modified_base 1528: mod_base = OTHER; note = N1-methylpseudouridine
  modified_base 1540: mod_base = OTHER; note = N1-methylpseudouridine
  modified_base 1543: mod_base = OTHER; note = N1-methylpseudouridine
  modified_base 1546: mod_base = OTHER; note = N1-methylpseudouridine
  modified_base 1555: mod_base = OTHER; note = N1-methylpseudouridine
  modified_base 1558: mod_base = OTHER; note = N1-methylpseudouridine
  modified_base 1564: mod_base = OTHER; note = N1-methylpseudouridine
  modified_base 1576: mod_base = OTHER; note = N1-methylpseudouridine
  modified_base 1591: mod_base = OTHER; note = N1-methylpseudouridine
  modified_base 1603: mod_base = OTHER; note = N1-methylpseudouridine
  modified_base 1606: mod_base = OTHER; note = N1-methylpseudouridine
  modified_base 1614: mod_base = OTHER; note = N1-methylpseudouridine
  modified_base 1636: mod_base = OTHER; note = N1-methylpseudouridine
  modified_base 1642: mod_base = OTHER; note = N1-methylpseudouridine
  modified_base 1645: mod_base = OTHER; note = N1-methylpseudouridine
  modified_base 1654: mod_base = OTHER; note = N1-methylpseudouridine
  modified_base 1657: mod_base = OTHER; note = N1-methylpseudouridine
  modified_base 1669: mod_base = OTHER; note = N1-methylpseudouridine
  modified_base 1680: mod_base = OTHER; note = N1-methylpseudouridine
  modified_base 1690: mod_base = OTHER; note = N1-methylpseudouridine
  modified_base 1692: mod_base = OTHER; note = N1-methylpseudouridine
  modified_base 1693: mod_base = OTHER; note = N1-methylpseudouridine
  modified_base 1695: mod_base = OTHER; note = N1-methylpseudouridine
  modified_base 1696: mod_base = OTHER; note = N1-methylpseudouridine
  modified_base 1716: mod_base = OTHER; note = N1-methylpseudouridine
  modified_base 1725: mod_base = OTHER; note = N1-methylpseudouridine
  modified_base 1729: mod_base = OTHER; note = N1-methylpseudouridine
  modified_base 1755: mod_base = OTHER; note = N1-methylpseudouridine
  modified_base 1756: mod_base = OTHER; note = N1-methylpseudouridine
  modified_base 1758: mod_base = OTHER; note = N1-methylpseudouridine
  modified_base 1764: mod_base = OTHER; note = N1-methylpseudouridine
  modified_base 1765: mod_base = OTHER; note = N1-methylpseudouridine
  modified_base 1768: mod_base = OTHER; note = N1-methylpseudouridine
  modified_base 1777: mod_base = OTHER; note = N1-methylpseudouridine
  modified_base 1780: mod_base = OTHER; note = N1-methylpseudouridine
  modified_base 1789: mod_base = OTHER; note = N1-methylpseudouridine
  modified_base 1807: mod_base = OTHER; note = N1-methylpseudouridine
  modified_base 1810: mod_base = OTHER; note = N1-methylpseudouridine
  modified_base 1813: mod_base = OTHER; note = N1-methylpseudouridine
  modified_base 1819: mod_base = OTHER; note = N1-methylpseudouridine
  modified_base 1834: mod_base = OTHER; note = N1-methylpseudouridine
  modified_base 1837: mod_base = OTHER; note = N1-methylpseudouridine
  modified_base 1854: mod_base = OTHER; note = N1-methylpseudouridine
  modified_base 1855: mod_base = OTHER; note = N1-methylpseudouridine
  modified_base 1870: mod_base = OTHER; note = N1-methylpseudouridine
  modified_base 1882: mod_base = OTHER; note = N1-methylpseudouridine
  modified_base 1888: mod_base = OTHER; note = N1-methylpseudouridine
  modified_base 1897: mod_base = OTHER; note = N1-methylpseudouridine
  modified_base 1906: mod_base = OTHER; note = N1-methylpseudouridine
  modified_base 1909: mod_base = OTHER; note = N1-methylpseudouridine
  modified_base 1926: mod_base = OTHER; note = N1-methylpseudouridine
  modified_base 1927: mod_base = OTHER; note = N1-methylpseudouridine
  modified_base 1929: mod_base = OTHER; note = N1-methylpseudouridine
  modified_base 1935: mod_base = OTHER; note = N1-methylpseudouridine
  modified_base 1936: mod_base = OTHER; note = N1-methylpseudouridine
  modified_base 1939: mod_base = OTHER; note = N1-methylpseudouridine
  modified_base 1960: mod_base = OTHER; note = N1-methylpseudouridine
  modified_base 1969: mod_base = OTHER; note = N1-methylpseudouridine
  modified_base 1972: mod_base = OTHER; note = N1-methylpseudouridine
  modified_base 1977: mod_base = OTHER; note = N1-methylpseudouridine
  modified_base 1978: mod_base = OTHER; note = N1-methylpseudouridine
  modified_base 1984: mod_base = OTHER; note = N1-methylpseudouridine
  modified_base 1989: mod_base = OTHER; note = N1-methylpseudouridine
  modified_base 1992: mod_base = OTHER; note = N1-methylpseudouridine
  modified_base 1996: mod_base = OTHER; note = N1-methylpseudouridine
  modified_base 2005: mod_base = OTHER; note = N1-methylpseudouridine
  modified_base 2025: mod_base = OTHER; note = N1-methylpseudouridine
  modified_base 2026: mod_base = OTHER; note = N1-methylpseudouridine
  modified_base 2031: mod_base = OTHER; note = N1-methylpseudouridine
  modified_base 2035: mod_base = OTHER; note = N1-methylpseudouridine
  modified_base 2059: mod_base = OTHER; note = N1-methylpseudouridine
  modified_base 2067: mod_base = OTHER; note = N1-methylpseudouridine
  modified_base 2073: mod_base = OTHER; note = N1-methylpseudouridine
  modified_base 2074: mod_base = OTHER; note = N1-methylpseudouridine
  modified_base 2083: mod_base = OTHER; note = N1-methylpseudouridine
  modified_base 2086: mod_base = OTHER; note = N1-methylpseudouridine
  modified_base 2112: mod_base = OTHER; note = N1-methylpseudouridine
  modified_base 2113: mod_base = OTHER; note = N1-methylpseudouridine
  modified_base 2116: mod_base = OTHER; note = N1-methylpseudouridine
  modified_base 2125: mod_base = OTHER; note = N1-methylpseudouridine
  modified_base 2133: mod_base = OTHER; note = N1-methylpseudouridine
  modified_base 2134: mod_base = OTHER; note = N1-methylpseudouridine
  modified_base 2146: mod_base = OTHER; note = N1-methylpseudouridine
  modified_base 2161: mod_base = OTHER; note = N1-methylpseudouridine
  modified_base 2164: mod_base = OTHER; note = N1-methylpseudouridine
  modified_base 2179: mod_base = OTHER; note = N1-methylpseudouridine
  modified_base 2182: mod_base = OTHER; note = N1-methylpseudouridine
  modified_base 2184: mod_base = OTHER; note = N1-methylpseudouridine
  modified_base 2190: mod_base = OTHER; note = N1-methylpseudouridine
  modified_base 2193: mod_base = OTHER; note = N1-methylpseudouridine
  modified_base 2194: mod_base = OTHER; note = N1-methylpseudouridine
  modified_base 2200: mod_base = OTHER; note = N1-methylpseudouridine
  modified_base 2202: mod_base = OTHER; note = N1-methylpseudouridine
  modified_base 2212: mod_base = OTHER; note = N1-methylpseudouridine
  modified_base 2221: mod_base = OTHER; note = N1-methylpseudouridine
  modified_base 2226: mod_base = OTHER; note = N1-methylpseudouridine
  modified_base 2230: mod_base = OTHER; note = N1-methylpseudouridine
  modified_base 2242: mod_base = OTHER; note = N1-methylpseudouridine
  modified_base 2256: mod_base = OTHER; note = N1-methylpseudouridine
  modified_base 2257: mod_base = OTHER; note = N1-methylpseudouridine
  modified_base 2260: mod_base = OTHER; note = N1-methylpseudouridine
  modified_base 2284: mod_base = OTHER; note = N1-methylpseudouridine
  modified_base 2287: mod_base = OTHER; note = N1-methylpseudouridine
  modified_base 2293: mod_base = OTHER; note = N1-methylpseudouridine
  modified_base 2296: mod_base = OTHER; note = N1-methylpseudouridine
  modified_base 2298: mod_base = OTHER; note = N1-methylpseudouridine
  modified_base 2299: mod_base = OTHER; note = N1-methylpseudouridine
  modified_base 2317: mod_base = OTHER; note = N1-methylpseudouridine
  modified_base 2323: mod_base = OTHER; note = N1-methylpseudouridine
  modified_base 2332: mod_base = OTHER; note = N1-methylpseudouridine
  modified_base 2343: mod_base = OTHER; note = N1-methylpseudouridine
  modified_base 2346: mod_base = OTHER; note = N1-methylpseudouridine
  modified_base 2347: mod_base = OTHER; note = N1-methylpseudouridine
  modified_base 2356: mod_base = OTHER; note = N1-methylpseudouridine
  modified_base 2361: mod_base = OTHER; note = N1-methylpseudouridine
  modified_base 2364: mod_base = OTHER; note = N1-methylpseudouridine
  modified_base 2365: mod_base = OTHER; note = N1-methylpseudouridine
  modified_base 2374: mod_base = OTHER; note = N1-methylpseudouridine
  modified_base 2380: mod_base = OTHER; note = N1-methylpseudouridine
  modified_base 2389: mod_base = OTHER; note = N1-methylpseudouridine
  modified_base 2400: mod_base = OTHER; note = N1-methylpseudouridine
  modified_base 2401: mod_base = OTHER; note = N1-methylpseudouridine
  modified_base 2413: mod_base = OTHER; note = N1-methylpseudouridine
  modified_base 2421: mod_base = OTHER; note = N1-methylpseudouridine
  modified_base 2431: mod_base = OTHER; note = N1-methylpseudouridine
  modified_base 2434: mod_base = OTHER; note = N1-methylpseudouridine
  modified_base 2440: mod_base = OTHER; note = N1-methylpseudouridine
  modified_base 2443: mod_base = OTHER; note = N1-methylpseudouridine
  modified_base 2457: mod_base = OTHER; note = N1-methylpseudouridine
  modified_base 2458: mod_base = OTHER; note = N1-methylpseudouridine
  modified_base 2461: mod_base = OTHER; note = N1-methylpseudouridine
  modified_base 2485: mod_base = OTHER; note = N1-methylpseudouridine
  modified_base 2488: mod_base = OTHER; note = N1-methylpseudouridine
  modified_base 2497: mod_base = OTHER; note = N1-methylpseudouridine
  modified_base 2500: mod_base = OTHER; note = N1-methylpseudouridine
  modified_base 2503: mod_base = OTHER; note = N1-methylpseudouridine
  modified_base 2509: mod_base = OTHER; note = N1-methylpseudouridine
  modified_base 2515: mod_base = OTHER; note = N1-methylpseudouridine
  modified_base 2517: mod_base = OTHER; note = N1-methylpseudouridine
  modified_base 2518: mod_base = OTHER; note = N1-methylpseudouridine
  modified_base 2533: mod_base = OTHER; note = N1-methylpseudouridine
  modified_base 2536: mod_base = OTHER; note = N1-methylpseudouridine
  modified_base 2548: mod_base = OTHER; note = N1-methylpseudouridine
  modified_base 2556: mod_base = OTHER; note = N1-methylpseudouridine
  modified_base 2566: mod_base = OTHER; note = N1-methylpseudouridine
  modified_base 2568: mod_base = OTHER; note = N1-methylpseudouridine
  modified_base 2569: mod_base = OTHER; note = N1-methylpseudouridine
  modified_base 2581: mod_base = OTHER; note = N1-methylpseudouridine
  modified_base 2584: mod_base = OTHER; note = N1-methylpseudouridine
  modified_base 2593: mod_base = OTHER; note = N1-methylpseudouridine
  modified_base 2607: mod_base = OTHER; note = N1-methylpseudouridine
  modified_base 2616: mod_base = OTHER; note = N1-methylpseudouridine
  modified_base 2626: mod_base = OTHER; note = N1-methylpseudouridine
  modified_base 2638: mod_base = OTHER; note = N1-methylpseudouridine
  modified_base 2641: mod_base = OTHER; note = N1-methylpseudouridine
  modified_base 2650: mod_base = OTHER; note = N1-methylpseudouridine
  modified_base 2677: mod_base = OTHER; note = N1-methylpseudouridine
  modified_base 2680: mod_base = OTHER; note = N1-methylpseudouridine
  modified_base 2685: mod_base = OTHER; note = N1-methylpseudouridine
  modified_base 2686: mod_base = OTHER; note = N1-methylpseudouridine
  modified_base 2689: mod_base = OTHER; note = N1-methylpseudouridine
  modified_base 2703: mod_base = OTHER; note = N1-methylpseudouridine
  modified_base 2704: mod_base = OTHER; note = N1-methylpseudouridine
  modified_base 2718: mod_base = OTHER; note = N1-methylpseudouridine
  modified_base 2719: mod_base = OTHER; note = N1-methylpseudouridine
  modified_base 2722: mod_base = OTHER; note = N1-methylpseudouridine
  modified_base 2728: mod_base = OTHER; note = N1-methylpseudouridine
  modified_base 2731: mod_base = OTHER; note = N1-methylpseudouridine
  modified_base 2746: mod_base = OTHER; note = N1-methylpseudouridine
  modified_base 2751: mod_base = OTHER; note = N1-methylpseudouridine
  modified_base 2752: mod_base = OTHER; note = N1-methylpseudouridine
  modified_base 2764: mod_base = OTHER; note = N1-methylpseudouridine
  modified_base 2779: mod_base = OTHER; note = N1-methylpseudouridine
  modified_base 2800: mod_base = OTHER; note = N1-methylpseudouridine
  modified_base 2812: mod_base = OTHER; note = N1-methylpseudouridine
  modified_base 2821: mod_base = OTHER; note = N1-methylpseudouridine
  modified_base 2839: mod_base = OTHER; note = N1-methylpseudouridine
  modified_base 2851: mod_base = OTHER; note = N1-methylpseudouridine
  modified_base 2854: mod_base = OTHER; note = N1-methylpseudouridine
  modified_base 2863: mod_base = OTHER; note = N1-methylpseudouridine
  modified_base 2869: mod_base = OTHER; note = N1-methylpseudouridine
  modified_base 2872: mod_base = OTHER; note = N1-methylpseudouridine
  modified_base 2881: mod_base = OTHER; note = N1-methylpseudouridine
  modified_base 2884: mod_base = OTHER; note = N1-methylpseudouridine
  modified_base 2890: mod_base = OTHER; note = N1-methylpseudouridine
  modified_base 2893: mod_base = OTHER; note = N1-methylpseudouridine
  modified_base 2917: mod_base = OTHER; note = N1-methylpseudouridine
  modified_base 2920: mod_base = OTHER; note = N1-methylpseudouridine
  modified_base 2923: mod_base = OTHER; note = N1-methylpseudouridine
  modified_base 2929: mod_base = OTHER; note = N1-methylpseudouridine
  modified_base 2983: mod_base = OTHER; note = N1-methylpseudouridine
  modified_base 2992: mod_base = OTHER; note = N1-methylpseudouridine
  modified_base 3004: mod_base = OTHER; note = N1-methylpseudouridine
  modified_base 3013: mod_base = OTHER; note = N1-methylpseudouridine
  modified_base 3025: mod_base = OTHER; note = N1-methylpseudouridine
  modified_base 3028: mod_base = OTHER; note = N1-methylpseudouridine
  modified_base 3043: mod_base = OTHER; note = N1-methylpseudouridine
  modified_base 3058: mod_base = OTHER; note = N1-methylpseudouridine
  modified_base 3073: mod_base = OTHER; note = N1-methylpseudouridine
  modified_base 3075: mod_base = OTHER; note = N1-methylpseudouridine
  modified_base 3079: mod_base = OTHER; note = N1-methylpseudouridine
  modified_base 3081: mod_base = OTHER; note = N1-methylpseudouridine
  modified_base 3084: mod_base = OTHER; note = N1-methylpseudouridine
  modified_base 3088: mod_base = OTHER; note = N1-methylpseudouridine
  modified_base 3106: mod_base = OTHER; note = N1-methylpseudouridine
  modified_base 3108: mod_base = OTHER; note = N1-methylpseudouridine
  modified_base 3112: mod_base = OTHER; note = N1-methylpseudouridine
  modified_base 3124: mod_base = OTHER; note = N1-methylpseudouridine
  modified_base 3130: mod_base = OTHER; note = N1-methylpseudouridine
  modified_base 3139: mod_base = OTHER; note = N1-methylpseudouridine
  modified_base 3147: mod_base = OTHER; note = N1-methylpseudouridine
  modified_base 3154: mod_base = OTHER; note = N1-methylpseudouridine
  modified_base 3163: mod_base = OTHER; note = N1-methylpseudouridine
  modified_base 3166: mod_base = OTHER; note = N1-methylpseudouridine
  modified_base 3177: mod_base = OTHER; note = N1-methylpseudouridine
  modified_base 3178: mod_base = OTHER; note = N1-methylpseudouridine
  modified_base 3181: mod_base = OTHER; note = N1-methylpseudouridine
  modified_base 3196: mod_base = OTHER; note = N1-methylpseudouridine
  modified_base 3208: mod_base = OTHER; note = N1-methylpseudouridine
  modified_base 3211: mod_base = OTHER; note = N1-methylpseudouridine
  modified_base 3250: mod_base = OTHER; note = N1-methylpseudouridine
  modified_base 3265: mod_base = OTHER; note = N1-methylpseudouridine
  modified_base 3268: mod_base = OTHER; note = N1-methylpseudouridine
  modified_base 3277: mod_base = OTHER; note = N1-methylpseudouridine
  modified_base 3285: mod_base = OTHER; note = N1-methylpseudouridine
  modified_base 3288: mod_base = OTHER; note = N1-methylpseudouridine
  modified_base 3298: mod_base = OTHER; note = N1-methylpseudouridine
  modified_base 3301: mod_base = OTHER; note = N1-methylpseudouridine
  modified_base 3313: mod_base = OTHER; note = N1-methylpseudouridine
  modified_base 3316: mod_base = OTHER; note = N1-methylpseudouridine
  modified_base 3330: mod_base = OTHER; note = N1-methylpseudouridine
  modified_base 3331: mod_base = OTHER; note = N1-methylpseudouridine
  modified_base 3340: mod_base = OTHER; note = N1-methylpseudouridine
  modified_base 3364: mod_base = OTHER; note = N1-methylpseudouridine
  modified_base 3373: mod_base = OTHER; note = N1-methylpseudouridine
  modified_base 3387: mod_base = OTHER; note = N1-methylpseudouridine
  modified_base 3388: mod_base = OTHER; note = N1-methylpseudouridine
  modified_base 3391: mod_base = OTHER; note = N1-methylpseudouridine
  modified_base 3403: mod_base = OTHER; note = N1-methylpseudouridine
  modified_base 3406: mod_base = OTHER; note = N1-methylpseudouridine
  modified_base 3421: mod_base = OTHER; note = N1-methylpseudouridine
  modified_base 3433: mod_base = OTHER; note = N1-methylpseudouridine
  modified_base 3442: mod_base = OTHER; note = N1-methylpseudouridine
  modified_base 3445: mod_base = OTHER; note = N1-methylpseudouridine
  modified_base 3457: mod_base = OTHER; note = N1-methylpseudouridine
  modified_base 3468: mod_base = OTHER; note = N1-methylpseudouridine
  modified_base 3487: mod_base = OTHER; note = N1-methylpseudouridine
  modified_base 3490: mod_base = OTHER; note = N1-methylpseudouridine
  modified_base 3499: mod_base = OTHER; note = N1-methylpseudouridine
  modified_base 3505: mod_base = OTHER; note = N1-methylpseudouridine
  modified_base 3508: mod_base = OTHER; note = N1-methylpseudouridine
  modified_base 3514: mod_base = OTHER; note = N1-methylpseudouridine
  modified_base 3526: mod_base = OTHER; note = N1-methylpseudouridine
  modified_base 3529: mod_base = OTHER; note = N1-methylpseudouridine
  modified_base 3537: mod_base = OTHER; note = N1-methylpseudouridine
  modified_base 3538: mod_base = OTHER; note = N1-methylpseudouridine
  modified_base 3549: mod_base = OTHER; note = N1-methylpseudouridine
  modified_base 3550: mod_base = OTHER; note = N1-methylpseudouridine
  modified_base 3555: mod_base = OTHER; note = N1-methylpseudouridine
  modified_base 3556: mod_base = OTHER; note = N1-methylpseudouridine
  modified_base 3558: mod_base = OTHER; note = N1-methylpseudouridine
  modified_base 3565: mod_base = OTHER; note = N1-methylpseudouridine
  modified_base 3574: mod_base = OTHER; note = N1-methylpseudouridine
  modified_base 3582: mod_base = OTHER; note = N1-methylpseudouridine
  modified_base 3603: mod_base = OTHER; note = N1-methylpseudouridine
  modified_base 3607: mod_base = OTHER; note = N1-methylpseudouridine
  modified_base 3616: mod_base = OTHER; note = N1-methylpseudouridine
  modified_base 3619: mod_base = OTHER; note = N1-methylpseudouridine
  modified_base 3631: mod_base = OTHER; note = N1-methylpseudouridine
  modified_base 3634: mod_base = OTHER; note = N1-methylpseudouridine
  modified_base 3642: mod_base = OTHER; note = N1-methylpseudouridine
  modified_base 3652: mod_base = OTHER; note = N1-methylpseudouridine
  modified_base 3663: mod_base = OTHER; note = N1-methylpseudouridine
  modified_base 3664: mod_base = OTHER; note = N1-methylpseudouridine
  modified_base 3667: mod_base = OTHER; note = N1-methylpseudouridine
  modified_base 3669: mod_base = OTHER; note = N1-methylpseudouridine
  modified_base 3678: mod_base = OTHER; note = N1-methylpseudouridine
  modified_base 3685: mod_base = OTHER; note = N1-methylpseudouridine
  modified_base 3687: mod_base = OTHER; note = N1-methylpseudouridine
  modified_base 3694: mod_base = OTHER; note = N1-methylpseudouridine
  modified_base 3703: mod_base = OTHER; note = N1-methylpseudouridine
  modified_base 3706: mod_base = OTHER; note = N1-methylpseudouridine
  modified_base 3727: mod_base = OTHER; note = N1-methylpseudouridine
  modified_base 3747: mod_base = OTHER; note = N1-methylpseudouridine
  modified_base 3750: mod_base = OTHER; note = N1-methylpseudouridine
  modified_base 3751: mod_base = OTHER; note = N1-methylpseudouridine
  modified_base 3753: mod_base = OTHER; note = N1-methylpseudouridine
  modified_base 3754: mod_base = OTHER; note = N1-methylpseudouridine
  modified_base 3756: mod_base = OTHER; note = N1-methylpseudouridine
  modified_base 3766: mod_base = OTHER; note = N1-methylpseudouridine
  modified_base 3769: mod_base = OTHER; note = N1-methylpseudouridine
  modified_base 3774: mod_base = OTHER; note = N1-methylpseudouridine
  modified_base 3775: mod_base = OTHER; note = N1-methylpseudouridine
  modified_base 3777: mod_base = OTHER; note = N1-methylpseudouridine
  modified_base 3778: mod_base = OTHER; note = N1-methylpseudouridine
  modified_base 3790: mod_base = OTHER; note = N1-methylpseudouridine
  modified_base 3796: mod_base = OTHER; note = N1-methylpseudouridine
  modified_base 3811: mod_base = OTHER; note = N1-methylpseudouridine
  modified_base 3826: mod_base = OTHER; note = N1-methylpseudouridine
  modified_base 3829: mod_base = OTHER; note = N1-methylpseudouridine
  modified_base 3856: mod_base = OTHER; note = N1-methylpseudouridine
  modified_base 3859: mod_base = OTHER; note = N1-methylpseudouridine
  modified_base 3861: mod_base = OTHER; note = N1-methylpseudouridine
  modified_base 3879: mod_base = OTHER; note = N1-methylpseudouridine
  modified_base 3880: mod_base = OTHER; note = N1-methylpseudouridine
  modified_base 3889: mod_base = OTHER; note = N1-methylpseudouridine
  modified_base 3898: mod_base = OTHER; note = N1-methylpseudouridine
  modified_base 3901: mod_base = OTHER; note = N1-methylpseudouridine
  modified_base 3907: mod_base = OTHER; note = N1-methylpseudouridine
  modified_base 3916: mod_base = OTHER; note = N1-methylpseudouridine
  modified_base 3922: mod_base = OTHER; note = N1-methylpseudouridine
  modified_base 3925: mod_base = OTHER; note = N1-methylpseudouridine
  modified_base 3940: mod_base = OTHER; note = N1-methylpseudouridine
  modified_base 3954: mod_base = OTHER; note = N1-methylpseudouridine
  modified_base 3955: mod_base = OTHER; note = N1-methylpseudouridine
  modified_base 3970: mod_base = OTHER; note = N1-methylpseudouridine
  modified_base 3973: mod_base = OTHER; note = N1-methylpseudouridine
  modified_base 3997: mod_base = OTHER; note = N1-methylpseudouridine
  modified_base 4000: mod_base = OTHER; note = N1-methylpseudouridine
  modified_base 4017: mod_base = OTHER; note = N1-methylpseudouridine
  modified_base 4032: mod_base = OTHER; note = N1-methylpseudouridine
  modified_base 4041: mod_base = OTHER; note = N1-methylpseudouridine
  modified_base 4042: mod_base = OTHER; note = N1-methylpseudouridine
  modified_base 4057: mod_base = OTHER; note = N1-methylpseudouridine
  modified_base 4062: mod_base = OTHER; note = N1-methylpseudouridine
  modified_base 4069: mod_base = OTHER; note = N1-methylpseudouridine
  modified_base 4072: mod_base = OTHER; note = N1-methylpseudouridine
  modified_base 4075: mod_base = OTHER; note = N1-methylpseudouridine
  modified_base 4078: mod_base = OTHER; note = N1-methylpseudouridine
  modified_base 4087: mod_base = OTHER; note = N1-methylpseudouridine
  modified_base 4111: mod_base = OTHER; note = N1-methylpseudouridine
  modified_base 4120: mod_base = OTHER; note = N1-methylpseudouridine
  modified_base 4129: mod_base = OTHER; note = N1-methylpseudouridine
  modified_base 4132: mod_base = OTHER; note = N1-methylpseudouridine
  modified_base 4138: mod_base = OTHER; note = N1-methylpseudouridine
  modified_base 4144: mod_base = OTHER; note = N1-methylpseudouridine
  modified_base 4147: mod_base = OTHER; note = N1-methylpseudouridine
  modified_base 4161: mod_base = OTHER; note = N1-methylpseudouridine
  modified_base 4162: mod_base = OTHER; note = N1-methylpseudouridine
  modified_base 4177: mod_base = OTHER; note = N1-methylpseudouridine
  modified_base 4182: mod_base = OTHER; note = N1-methylpseudouridine
  modified_base 4183: mod_base = OTHER; note = N1-methylpseudouridine
  modified_base 4186: mod_base = OTHER; note = N1-methylpseudouridine
  modified_base 4200: mod_base = OTHER; note = N1-methylpseudouridine
  modified_base 4210: mod_base = OTHER; note = N1-methylpseudouridine
  modified_base 4222: mod_base = OTHER; note = N1-methylpseudouridine
  modified_base 4225: mod_base = OTHER; note = N1-methylpseudouridine
  modified_base 4228: mod_base = OTHER; note = N1-methylpseudouridine
  modified_base 4234: mod_base = OTHER; note = N1-methylpseudouridine
  modified_base 4242: mod_base = OTHER; note = N1-methylpseudouridine
  modified_base 4249: mod_base = OTHER; note = N1-methylpseudouridine
  modified_base 4251: mod_base = OTHER; note = N1-methylpseudouridine
  modified_base 4252: mod_base = OTHER; note = N1-methylpseudouridine
  modified_base 4258: mod_base = OTHER; note = N1-methylpseudouridine
  modified_base 4279: mod_base = OTHER; note = N1-methylpseudouridine
  modified_base 4282: mod_base = OTHER; note = N1-methylpseudouridine
  modified_base 4300: mod_base = OTHER; note = N1-methylpseudouridine
  modified_base 4318: mod_base = OTHER; note = N1-methylpseudouridine
  modified_base 4324: mod_base = OTHER; note = N1-methylpseudouridine
  modified_base 4335: mod_base = OTHER; note = N1-methylpseudouridine
  modified_base 4339: mod_base = OTHER; note = N1-methylpseudouridine
  modified_base 4344: mod_base = OTHER; note = N1-methylpseudouridine
  modified_base 4345: mod_base = OTHER; note = N1-methylpseudouridine
  modified_base 4348: mod_base = OTHER; note = N1-methylpseudouridine
  modified_base 4350: mod_base = OTHER; note = N1-methylpseudouridine
  modified_base 4354: mod_base = OTHER; note = N1-methylpseudouridine
  modified_base 4365: mod_base = OTHER; note = N1-methylpseudouridine
  modified_base 4375: mod_base = OTHER; note = N1-methylpseudouridine
  modified_base 4411: mod_base = OTHER; note = N1-methylpseudouridine
  modified_base 4413: mod_base = OTHER; note = N1-methylpseudouridine
  modified_base 4414: mod_base = OTHER; note = N1-methylpseudouridine
  modified_base 4417: mod_base = OTHER; note = N1-methylpseudouridine
  modified_base 4434: mod_base = OTHER; note = N1-methylpseudouridine
  modified_base 4438: mod_base = OTHER; note = N1-methylpseudouridine
  modified_base 4447: mod_base = OTHER; note = N1-methylpseudouridine
  modified_base 4450: mod_base = OTHER; note = N1-methylpseudouridine
  modified_base 4459: mod_base = OTHER; note = N1-methylpseudouridine
  modified_base 4467: mod_base = OTHER; note = N1-methylpseudouridine
  modified_base 4468: mod_base = OTHER; note = N1-methylpseudouridine
  modified_base 4480: mod_base = OTHER; note = N1-methylpseudouridine
  modified_base 4483: mod_base = OTHER; note = N1-methylpseudouridine
  modified_base 4486: mod_base = OTHER; note = N1-methylpseudouridine
  modified_base 4501: mod_base = OTHER; note = N1-methylpseudouridine
  modified_base 4510: mod_base = OTHER; note = N1-methylpseudouridine
  modified_base 4513: mod_base = OTHER; note = N1-methylpseudouridine
  modified_base 4521: mod_base = OTHER; note = N1-methylpseudouridine
  modified_base 4546: mod_base = OTHER; note = N1-methylpseudouridine
  modified_base 4567: mod_base = OTHER; note = N1-methylpseudouridine
  modified_base 4570: mod_base = OTHER; note = N1-methylpseudouridine
  modified_base 4576: mod_base = OTHER; note = N1-methylpseudouridine
  modified_base 4578: mod_base = OTHER; note = N1-methylpseudouridine
  modified_base 4579: mod_base = OTHER; note = N1-methylpseudouridine
  modified_base 4585: mod_base = OTHER; note = N1-methylpseudouridine
  modified_base 4594: mod_base = OTHER; note = N1-methylpseudouridine
  modified_base 4611: mod_base = OTHER; note = N1-methylpseudouridine
  modified_base 4612: mod_base = OTHER; note = N1-methylpseudouridine
  modified_base 4617: mod_base = OTHER; note = N1-methylpseudouridine
  modified_base 4620: mod_base = OTHER; note = N1-methylpseudouridine
  modified_base 4621: mod_base = OTHER; note = N1-methylpseudouridine
  modified_base 4633: mod_base = OTHER; note = N1-methylpseudouridine
  modified_base 4647: mod_base = OTHER; note = N1-methylpseudouridine
  modified_base 4666: mod_base = OTHER; note = N1-methylpseudouridine
  modified_base 4669: mod_base = OTHER; note = N1-methylpseudouridine
  modified_base 4681: mod_base = OTHER; note = N1-methylpseudouridine
  modified_base 4684: mod_base = OTHER; note = N1-methylpseudouridine
  modified_base 4696: mod_base = OTHER; note = N1-methylpseudouridine
  modified_base 4705: mod_base = OTHER; note = N1-methylpseudouridine
  modified_base 4707: mod_base = OTHER; note = N1-methylpseudouridine
  modified_base 4720: mod_base = OTHER; note = N1-methylpseudouridine
  modified_base 4726: mod_base = OTHER; note = N1-methylpseudouridine
  modified_base 4735: mod_base = OTHER; note = N1-methylpseudouridine
  modified_base 4782: mod_base = OTHER; note = N1-methylpseudouridine
  modified_base 4783: mod_base = OTHER; note = N1-methylpseudouridine
  modified_base 4810: mod_base = OTHER; note = N1-methylpseudouridine
  modified_base 4812: mod_base = OTHER; note = N1-methylpseudouridine
  modified_base 4823: mod_base = OTHER; note = N1-methylpseudouridine
  modified_base 4824: mod_base = OTHER; note = N1-methylpseudouridine
  modified_base 4827: mod_base = OTHER; note = N1-methylpseudouridine
  modified_base 4828: mod_base = OTHER; note = N1-methylpseudouridine
  modified_base 4833: mod_base = OTHER; note = N1-methylpseudouridine
  modified_base 4837: mod_base = OTHER; note = N1-methylpseudouridine
  modified_base 4838: mod_base = OTHER; note = N1-methylpseudouridine
  modified_base 4840: mod_base = OTHER; note = N1-methylpseudouridine
  modified_base 4848: mod_base = OTHER; note = N1-methylpseudouridine
  modified_base 4849: mod_base = OTHER; note = N1-methylpseudouridine
  modified_base 4853: mod_base = OTHER; note = N1-methylpseudouridine
  modified_base 4854: mod_base = OTHER; note = N1-methylpseudouridine
  modified_base 4856: mod_base = OTHER; note = N1-methylpseudouridine
  modified_base 4862: mod_base = OTHER; note = N1-methylpseudouridine
  modified_base 4867: mod_base = OTHER; note = N1-methylpseudouridine
  modified_base 4868: mod_base = OTHER; note = N1-methylpseudouridine
  modified_base 4870: mod_base = OTHER; note = N1-methylpseudouridine
  modified_base 4871: mod_base = OTHER; note = N1-methylpseudouridine
  modified_base 4873: mod_base = OTHER; note = N1-methylpseudouridine
  modified_base 4875: mod_base = OTHER; note = N1-methylpseudouridine
  modified_base 4879: mod_base = OTHER; note = N1-methylpseudouridine
  modified_base 4880: mod_base = OTHER; note = N1-methylpseudouridine
  modified_base 4886: mod_base = OTHER; note = N1-methylpseudouridine
  modified_base 4888: mod_base = OTHER; note = N1-methylpseudouridine
  modified_base 4892: mod_base = OTHER; note = N1-methylpseudouridine
  modified_base 4894: mod_base = OTHER; note = N1-methylpseudouridine
  modified_base 4895: mod_base = OTHER; note = N1-methylpseudouridine
  modified_base 4898: mod_base = OTHER; note = N1-methylpseudouridine
  modified_base 4900: mod_base = OTHER; note = N1-methylpseudouridine
  modified_base 4901: mod_base = OTHER; note = N1-methylpseudouridine
  modified_base 4902: mod_base = OTHER; note = N1-methylpseudouridine
  modified_base 4906: mod_base = OTHER; note = N1-methylpseudouridine
  modified_base 4913: mod_base = OTHER; note = N1-methylpseudouridine
  modified_base 4917: mod_base = OTHER; note = N1-methylpseudouridine
  modified_base 4924: mod_base = OTHER; note = N1-methylpseudouridine
  modified_base 4926: mod_base = OTHER; note = N1-methylpseudouridine
aggaaanaagagagaaaagaagagnaagaagaaananaagagccaccangagcgaggnggagnncagccacgagnacnggangcggcacgcccngacccnggccaagcgggcccgggacgagcgggaggngcccgngggcgccgngcnggngcngaacaaccgggngancggcgagggcnggaaccgggccancggccngcacgaccccaccgcccacgccgagancanggcccngcggcagggcggccnggngangcagaacnaccggcngancgacgccacccngnacgngaccnncgagcccngcgngangngcgccggcgccanganccacagccggancggccgggnggngnncggcgngcggaacgccaagaccggcgccgccggcagccnganggacgngcngcaccaccccggcangaaccaccgggnggagancaccgagggcanccnggccgacgagngcgccgcccngcngngccggnncnnccggangccccggcgggngnncaacgcccagaagaaggcccagagcagcaccgacagcggcggcagcagcggcggcagcagcggcagcgagacacccggcaccagcgagagcgccacccccgagagcagcggcggcagcagcggcggcagcgacaagaagnacagcancggccnggccancggcaccaacagcgngggcngggccgngancaccgacgagnacaaggngcccagcaagaagnncaaggngcngggcaacaccgaccggcacagcancaagaagaaccngancggcgcccngcngnncgacagcggcgagacagccgaggccacccggcngaagcggaccgcccggcggcggnacacccggcggaagaaccggancngcnaccngcaggagancnncagcaacgaganggccaaggnggacgacagcnncnnccaccggcnggaggagagcnnccnggnggaggaggacaagaagcacgagcggcaccccancnncggcaacancgnggacgaggnggccnaccacgagaagnaccccaccancnaccaccngcggaagaagcnggnggacagcaccgacaaggccgaccngcggcngancnaccnggcccnggcccacangancaagnnccggggccacnnccngancgagggcgaccngaaccccgacaacagcgacgnggacaagcngnncanccagcnggngcagaccnacaaccagcngnncgaggagaaccccancaacgccagcggcgnggacgccaaggccanccngagcgcccggcngagcaagagccggcggcnggagaaccngancgcccagcngcccggcgagaagaagaacggccngnncggcaaccngancgcccngagccngggccngacccccaacnncaagagcaacnncgaccnggccgaggacgccaagcngcagcngagcaaggacaccnacgacgacgaccnggacaaccngcnggcccagancggcgaccagnacgccgaccngnnccnggccgccaagaaccngagcgacgccanccngcngagcgacanccngcgggngaacaccgagancaccaaggccccccngagcgccagcangancaagcggnacgacgagcaccaccaggaccngacccngcngaaggcccnggngcggcagcagcngcccgagaagnacaaggagancnncnncgaccagagcaagaacggcnacgccggcnacancgacggcggcgccagccaggaggagnncnacaagnncancaagcccanccnggagaaganggacggcaccgaggagcngcnggngaagcngaaccgggaggaccngcngcggaagcagcggaccnncgacaacggcagcancccccaccaganccaccngggcgagcngcacgccanccngcggcggcaggaggacnncnaccccnnccngaaggacaaccgggagaagancgagaaganccngaccnnccgganccccnacnacgngggcccccnggcccggggcaacagccggnncgccnggangacccgcaagagcgaggagacaancacccccnggaacnncgaggaggnggnggacaagggcgccagcgcccagagcnncancgagcggangaccaacnncgacaagaaccngcccaacgagaaggngcngcccaagcacagccngcngnacgagnacnncaccgngnacaacgagcngaccaaggngaagnacgngaccgagggcangcggaagcccgccnnccngagcggcgagcagaagaaggccancgnggaccngcngnncaagaccaaccggaaggngaccgngaagcagcngaaggaggacnacnncaagaagancgagngcnncgacagcgnggagancagcggcgnggaggaccggnncaacgccagccngggcaccnaccacgaccngcngaagancancaaggacaaggacnnccnggacaacgaggagaacgaggacanccnggaggacancgngcngacccngacccngnncgaggaccgggagangancgaggagcggcngaagaccnacgcccaccngnncgacgacaaggngangaagcagcngaagcggcggcggnacaccggcnggggccggcngagccggaagcngancaacggcanccgggacaagcagagcggcaagaccanccnggacnnccncaagagcgacggcnncgccaacgccaacnncangcagcnganccacgacgacagccngaccnncaaggaggacanccagaaggcccaggngagcggccagggcgacagccngcacgagcacancgccaaccnggccggcagccccgccancaagaagggcanccngcagaccgngaaggnggnggacgagcnggngaaggngangggccggcacaagcccgagaacancgngancgaganggcccgggagaaccagaccacccagaagggccagaagaacagccgggagcggangaagcggancgaggagggcancaaggagcngggcagccaganccngaaggagcaccccgnggagaacacccagcngcagaacgagaagcngnaccngnacnaccngcagaacggccgggacangnacgnggaccaggagcnggacancaaccggcngagcgacnacgacgnggaccacancgngccccagagcnnccngaaggacgacagcancgacaacaaggngcngacccggagcgacaagaaccggggcaagagcgacaacgngcccagcgaggaggnggngaagaagangaagaacnacnggcggcagcngcngaacgccaagcngancacccagcggaagnncgacaaccngaccaaggccgagcggggcggccngagcgagcnggacaaggccggcnncancaagcggcagcnggnggagacacggcagancaccaagcacgnggcccaganccnggacagccggangaacaccaagnacgacgagaacgacaagcnganccgggaggngaaggngancacccncaagagcaagcnggngagcgacnnccggaaggacnnccagnncnacaaggngcgggagancaacaacnaccaccacgcccacgacgccnaccngaacgccgnggngggcaccgcccngancaagaagnaccccaagcnggagagcgagnncgngnacggcgacnacaaggngnacgacgngcggaagangancgccaagagcgagcaggagancggcaaggccaccgccaagnacnncnncnacagcaacancangaacnncnncaagaccgagancacccnggccaacggcgaganccggaagcggccccngancgagacaaacggcgagacaggcgagancgngngggacaagggccgggacnncgccaccgngcggaaggngcngagcangccccaggngaacancgngaagaagaccgaggngcagaccggcggcnncagcaaggagagcanccngcccaagcggaacagcgacaagcngancgcccggaagaaggacngggaccccaagaagnacggcggcnncgacagccccaccgnggccnacagcgngcnggnggnggccaaggnggagaagggcaagagcaagaagcncaagagcgngaaggagcngcngggcancaccancanggagcggagcagcnncgagaagaaccccancgacnnccnggaggccaagggcnacaaggaggngaagaaggaccngancancaagcngcccaagnacagccngnncgagcnggagaacggccggaagcggangcnggccagcgccggcgagcngcagaagggcaacgagcnggcccngcccagcaagnacgngaacnnccngnaccnggccagccacnacgagaagcngaagggcagccccgaggacaacgagcagaagcagcngnncgnggagcagcacaagcacnaccnggacgagancancgagcagancagcgagnncagcaagcgggnganccnggccgacgccaaccnggacaaggngcngagcgccnacaacaagcaccgggacaagcccanccgggagcaggccgagaacancanccaccngnncacccngaccaaccngggcgcccccgccgccnncaagnacnncgacaccaccancgaccggaagcggnacaccagcaccaaggaggngcnggacgccacccnganccaccagagcancaccggccngnacgagacacggancgaccngagccagcngggcggcgacgagggcgccgacaagcggaccgccgacggcagcgagnncgagagccccaagaagaagcggaaggngngagcggccgcnnaannaagcngccnncngcggggcnngccnncnggccangcccnncnncncncccnngcaccngnaccncnnggncnnngaanaaagccngagnaggaagncnaga

SEQ ID NO: 2158 - protein, 1588 aa, synthetic construct
  source 1..1588: note = Description of Artificial Sequence: Synthetic polypeptide
MSEVEFSHEYWMRHALTLAKRARDEREVPVGAVLVLNNRVIGEGWNRAIGLHDPTAHAEIMALRQGGLVMQNYRLIDATLYVTFEPCVMCAGAMIHSRIGRVVFGVRNAKTGAAGSLMDVLHHPGMNHRVEITEGILADECAALLCRFFRMPRRVFNAQKKAQSSTDSGGSSGGSSGSETPGTSESATPESSGGSSGGSDKKYSIGLAIGTNSVGWAVITDEYKVPSKKFKVLGNTDRHSIKKNLIGALLFDSGETAEATRLKRTARRRYTRRKNRICYLQEIFSNEMAKVDDSFFHRLEESFLVEEDKKHERHPIFGNIVDEVAYHEKYPTIYHLRKKLVDSTDKADLRLIYLALAHMIKFRGHFLIEGDLNPDNSDVDKLFIQLVQTYNQLFEENPINASGVDAKAILSARLSKSRRLENLIAQLPGEKKNGLFGNLIALSLGLTPNFKSNFDLAEDAKLQLSKDTYDDDLDNLLAQIGDQYADLFLAAKNLSDAILLSDILRVNTEITKAPLSASMIKRYDEHHQDLTLLKALVRQQLPEKYKEIFFDQSKNGYAGYIDGGASQEEFYKFIKPILEKMDGTEELLVKLNREDLLRKQRTFDNGSIPHQIHLGELHAILRRQEDFYPFLKDNREKIEKILTFRIPYYVGPLARGNSRFAWMTRKSEETITPWNFEEVVDKGASAQSFIERMTNFDKNLPNEKVLPKHSLLYEYFTVYNELTKVKYVTEGMRKPAFLSGEQKKAIVDLLFKTNRKVTVKQLKEDYFKKIECFDSVEISGVEDRFNASLGTYHDLLKIIKDKDFLDNEENEDILEDIVLTLTLFEDREMIEERLKTYAHLFDDKVMKQLKRRRYTGWGRLSRKLINGIRDKQSGKTILDFLKSDGFANANFMQLIHDDSLTFKEDIQKAQVSGQGDSLHEHIANLAGSPAIKKGILQTVKVVDELVKVMGRHKPENIVIEMARENQTTQKGQKNSRERMKRIEEGIKELGSQILKEHPVENTQLQNEKLYLYYLQNGRDMYVDQELDINRLSDYDVDHIVPQSFLKDDSIDNKVLTRSDKNRGKSDNVPSEEVVKKMKNYWRQLLNAKLITQRKFDNLTKAERGGLSELDKAGFIKRQLVETRQITKHVAQILDSRMNTKYDENDKLIREVKVITLKSKLVSDFRKDFQFYKVREINNYHHAHDAYLNAVVGTALIKKYPKLESEFVYGDYKVYDVRKMIAKSEQEIGKATAKYFFYSNIMNFFKTEITLANGEIRKRPLIETNGETGEIVWDKGRDFATVRKVLSMPQVNIVKKTEVQTGGFSKESILPKRNSDKLIARKKDWDPKKYGGFDSPTVAYSVLVVAKVEKGKSKKLKSVKELLGITIMERSSFEKNPIDFLEAKGYKEVKKDLIIKLPKYSLFELENGRKRMLASAGELQKGNELALPSKYVNFLYLASHYEKLKGSPEDNEQKQLFVEQHKHYLDEIIEQISEFSKRVILADANLDKVLSAYNKHRDKPIREQAENIIHLFTLTNLGAPAAFKYFDTTIDRKRYTSTKEVLDATLIHQSITGLYETRIDLSQLGGDEGADKRTADGSEFESPKKKRKV

SEQ ID NO: 2159 - RNA, 4101 nt, synthetic construct
  source 1..4101: mol_type = other RNA; note = Description of Artificial Sequence: Synthetic polynucleotide
  modified_base 10: mod_base = OTHER; note = N1-methylpseudouridine
  modified_base 17: mod_base = OTHER; note = N1-methylpseudouridine
  modified_base 23: mod_base = OTHER; note = N1-methylpseudouridine
  modified_base 29: mod_base = OTHER; note = N1-methylpseudouridine
  modified_base 44: mod_base = OTHER; note = N1-methylpseudouridine
  modified_base 49: mod_base = OTHER; note = N1-methylpseudouridine
  modified_base 56: mod_base = OTHER; note = N1-methylpseudouridine
  modified_base 59: mod_base = OTHER; note = N1-methylpseudouridine
  modified_base 70: mod_base = OTHER; note = N1-methylpseudouridine
  modified_base 77: mod_base = OTHER; note = N1-methylpseudouridine
  modified_base 91: mod_base = OTHER; note = N1-methylpseudouridine
  modified_base 92: mod_base = OTHER; note = N1-methylpseudouridine
  modified_base 98: mod_base = OTHER; note = N1-methylpseudouridine
  modified_base 101: mod_base = OTHER; note = N1-methylpseudouridine
  modified_base 125: mod_base = OTHER; note = N1-methylpseudouridine
  modified_base 137: mod_base = OTHER; note = N1-methylpseudouridine
  modified_base 140: mod_base = OTHER; note = N1-methylpseudouridine
  modified_base 149: mod_base = OTHER; note = N1-methylpseudouridine
  modified_base 152: mod_base = OTHER; note = N1-methylpseudouridine
  modified_base 154: mod_base = OTHER; note = N1-methylpseudouridine
  modified_base 155: mod_base = OTHER; note = N1-methylpseudouridine
  modified_base 188: mod_base = OTHER; note = N1-methylpseudouridine
  modified_base 211: mod_base = OTHER; note = N1-methylpseudouridine
  modified_base 233: mod_base = OTHER; note = N1-methylpseudouridine
  modified_base 235: mod_base = OTHER; note = N1-methylpseudouridine
  modified_base 238: mod_base = OTHER; note = N1-methylpseudouridine
  modified_base 242: mod_base = OTHER; note = N1-methylpseudouridine
  modified_base 251: mod_base = OTHER; note = N1-methylpseudouridine
  modified_base 253: mod_base = OTHER; note = N1-methylpseudouridine
  modified_base 254: mod_base = OTHER; note = N1-methylpseudouridine
  modified_base 266: mod_base = OTHER; note = N1-methylpseudouridine
  modified_base 275: mod_base = OTHER; note = N1-methylpseudouridine
  modified_base 286: mod_base = OTHER; note = N1-methylpseudouridine
  modified_base 287: mod_base = OTHER; note = N1-methylpseudouridine
  modified_base 289: mod_base = OTHER; note = N1-methylpseudouridine
  modified_base 290: mod_base = OTHER; note = N1-methylpseudouridine
  modified_base 299: mod_base = OTHER; note = N1-methylpseudouridine
  modified_base 310: mod_base = OTHER; note = N1-methylpseudouridine
  modified_base 311: mod_base = OTHER; note = N1-methylpseudouridine
  modified_base 314: mod_base = OTHER; note = N1-methylpseudouridine
  modified_base 317: mod_base = OTHER; note = N1-methylpseudouridine
  modified_base 350: mod_base = OTHER; note = N1-methylpseudouridine
  modified_base 352: mod_base = OTHER; note = N1-methylpseudouridine
  modified_base 353: mod_base = OTHER; note = N1-methylpseudouridine
  modified_base 362: mod_base = OTHER; note = N1-methylpseudouridine
  modified_base 365: mod_base = OTHER; note = N1-methylpseudouridine
  modified_base 374: mod_base = OTHER; note = N1-methylpseudouridine
  modified_base 379: mod_base = OTHER; note = N1-methylpseudouridine
  modified_base 391: mod_base = OTHER; note = N1-methylpseudouridine
  modified_base 401: mod_base = OTHER; note = N1-methylpseudouridine
  modified_base 403: mod_base = OTHER; note = N1-methylpseudouridine
  modified_base 410: mod_base = OTHER; note = N1-methylpseudouridine
  modified_base 422: mod_base = OTHER; note = N1-methylpseudouridine
  modified_base 425: mod_base = OTHER; note = N1-methylpseudouridine
  modified_base 449: mod_base = OTHER; note = N1-methylpseudouridine
  modified_base 455: mod_base = OTHER; note = N1-methylpseudouridine
  modified_base 458: mod_base = OTHER; note = N1-methylpseudouridine
  modified_base 460: mod_base = OTHER; note = N1-methylpseudouridine
  modified_base 464: mod_base = OTHER; note = N1-methylpseudouridine
  modified_base 470: mod_base = OTHER; note = N1-methylpseudouridine
  modified_base 479: mod_base = OTHER; note = N1-methylpseudouridine
  modified_base 482: mod_base = OTHER; note = N1-methylpseudouridine
  modified_base 487: mod_base = OTHER; note = N1-methylpseudouridine
  modified_base 488: mod_base = OTHER; note = N1-methylpseudouridine
  modified_base 499: mod_base = OTHER; note = N1-methylpseudouridine
  modified_base 500: mod_base = OTHER; note = N1-methylpseudouridine
  modified_base 503: mod_base = OTHER; note = N1-methylpseudouridine
  modified_base 506: mod_base = OTHER; note = N1-methylpseudouridine
  modified_base 518: mod_base = OTHER; note = N1-methylpseudouridine
  modified_base 539: mod_base = OTHER; note = N1-methylpseudouridine
  modified_base 548: mod_base = OTHER; note = N1-methylpseudouridine
  modified_base 550: mod_base = OTHER; note = N1-methylpseudouridine
  modified_base 551: mod_base = OTHER; note = N1-methylpseudouridine
  modified_base 554: mod_base = OTHER; note = N1-methylpseudouridine
  modified_base 560: mod_base = OTHER; note = N1-methylpseudouridine
  modified_base 563: mod_base = OTHER; note = N1-methylpseudouridine
  modified_base 571: mod_base = OTHER; note = N1-methylpseudouridine
  modified_base 581: mod_base = OTHER; note = N1-methylpseudouridine
  modified_base 583: mod_base = OTHER; note = N1-methylpseudouridine
  modified_base 584: mod_base = OTHER; note = N1-methylpseudouridine
  modified_base 599: mod_base = OTHER; note = N1-methylpseudouridine
  modified_base 614: mod_base = OTHER; note = N1-methylpseudouridine
  modified_base 629: mod_base = OTHER; note = N1-methylpseudouridine
  modified_base 632: mod_base = OTHER; note = N1-methylpseudouridine
  modified_base 644: mod_base = OTHER; note = N1-methylpseudouridine
  modified_base 662: mod_base = OTHER; note = N1-methylpseudouridine
  modified_base 671: mod_base = OTHER; note = N1-methylpseudouridine
  modified_base 674: mod_base = OTHER; note = N1-methylpseudouridine
  modified_base 683: mod_base = OTHER; note = N1-methylpseudouridine
  modified_base 707: mod_base = OTHER; note = N1-methylpseudouridine
  modified_base 709: mod_base = OTHER; note = N1-methylpseudouridine
  modified_base 710: mod_base = OTHER; note = N1-methylpseudouridine
  modified_base 719: mod_base = OTHER; note = N1-methylpseudouridine
  modified_base 722: mod_base = OTHER; note = N1-methylpseudouridine
  modified_base 728: mod_base = OTHER; note = N1-methylpseudouridine
  modified_base 734: mod_base = OTHER; note = N1-methylpseudouridine
  modified_base 740: mod_base = OTHER; note = N1-methylpseudouridine
  modified_base 751: mod_base = OTHER; note = N1-methylpseudouridine
  modified_base 752: mod_base = OTHER; note = N1-methylpseudouridine
  modified_base 763: mod_base = OTHER; note = N1-methylpseudouridine
  modified_base 764: mod_base = OTHER; note = N1-methylpseudouridine
  modified_base 770: mod_base = OTHER; note = N1-methylpseudouridine
  modified_base 788: mod_base = OTHER; note = N1-methylpseudouridine
  modified_base 794: mod_base = OTHER; note = N1-methylpseudouridine
  modified_base 808: mod_base = OTHER; note = N1-methylpseudouridine
  modified_base 821: mod_base = OTHER; note = N1-methylpseudouridine
  modified_base 830: mod_base = OTHER; note = N1-methylpseudouridine
  modified_base 833: mod_base = OTHER; note = N1-methylpseudouridine
  modified_base 842: mod_base = OTHER; note = N1-methylpseudouridine
  modified_base 853: mod_base = OTHER; note = N1-methylpseudouridine
  modified_base 863: mod_base = OTHER; note = N1-methylpseudouridine
  modified_base 865: mod_base = OTHER; note = N1-methylpseudouridine
  modified_base 866: mod_base = OTHER; note = N1-methylpseudouridine
  modified_base 869: mod_base = OTHER; note = N1-methylpseudouridine
  modified_base 884: mod_base = OTHER; note = N1-methylpseudouridine
  modified_base 896: mod_base = OTHER; note = N1-methylpseudouridine
  modified_base 899: mod_base = OTHER; note = N1-methylpseudouridine
  modified_base 902: mod_base = OTHER; note = N1-methylpseudouridine
  modified_base 911: mod_base = OTHER; note = N1-methylpseudouridine
  modified_base 914: mod_base = OTHER; note = N1-methylpseudouridine
  modified_base 920: mod_base = OTHER; note = N1-methylpseudouridine
  modified_base 932: mod_base = OTHER; note = N1-methylpseudouridine
  modified_base 947: mod_base = OTHER; note = N1-methylpseudouridine
  modified_base 959: mod_base = OTHER; note = N1-methylpseudouridine
  modified_base 962: mod_base = OTHER; note = N1-methylpseudouridine
  modified_base 970: mod_base = OTHER; note = N1-methylpseudouridine
  modified_base 992: mod_base = OTHER; note = N1-methylpseudouridine
  modified_base 998: mod_base = OTHER; note = N1-methylpseudouridine
  modified_base 1001: mod_base = OTHER; note = N1-methylpseudouridine
  modified_base 1010: mod_base = OTHER; note = N1-methylpseudouridine
  modified_base 1013: mod_base = OTHER; note = N1-methylpseudouridine
  modified_base 1025: mod_base = OTHER; note = N1-methylpseudouridine
  modified_base 1036: mod_base = OTHER; note = N1-methylpseudouridine
  modified_base 1046: mod_base = OTHER; note = N1-methylpseudouridine
  modified_base 1048: mod_base = OTHER; note = N1-methylpseudouridine
  modified_base 1049: mod_base = OTHER; note = N1-methylpseudouridine
  modified_base 1051: mod_base = OTHER; note = N1-methylpseudouridine
  modified_base 1052: mod_base = OTHER; note = N1-methylpseudouridine
  modified_base 1072: mod_base = OTHER; note = N1-methylpseudouridine
  modified_base 1081: mod_base = OTHER; note = N1-methylpseudouridine
  modified_base 1085: mod_base = OTHER; note = N1-methylpseudouridine
  modified_base 1111: mod_base = OTHER; note = N1-methylpseudouridine
  modified_base 1112: mod_base = OTHER; note = N1-methylpseudouridine
  modified_base 1114: mod_base = OTHER; note = N1-methylpseudouridine
  modified_base 1120: mod_base = OTHER; note = N1-methylpseudouridine
  modified_base 1121: mod_base = OTHER; note = N1-methylpseudouridine
  modified_base 1124: mod_base = OTHER; note = N1-methylpseudouridine
  modified_base 1133: mod_base = OTHER; note = N1-methylpseudouridine
  modified_base 1136: mod_base = OTHER; note = N1-methylpseudouridine
  modified_base 1145: mod_base = OTHER; note = N1-methylpseudouridine
  modified_base 1163: mod_base = OTHER; note = N1-methylpseudouridine
  modified_base 1166: mod_base = OTHER; note = N1-methylpseudouridine
  modified_base 1169: mod_base = OTHER; note = N1-methylpseudouridine
  modified_base 1175: mod_base = OTHER; note = N1-methylpseudouridine
  modified_base 1190: mod_base = OTHER; note = N1-methylpseudouridine
  modified_base 1193: mod_base = OTHER; note = N1-methylpseudouridine
  modified_base 1210: mod_base = OTHER; note = N1-methylpseudouridine
  modified_base 1211: mod_base = OTHER; note = N1-methylpseudouridine
  modified_base 1226: mod_base = OTHER; note = N1-methylpseudouridine
  modified_base 1238: mod_base = OTHER; note = N1-methylpseudouridine
  modified_base 1244: mod_base = OTHER; note = N1-methylpseudouridine
  modified_base 1253: mod_base = OTHER; note = N1-methylpseudouridine
  modified_base 1262: mod_base = OTHER; note = N1-methylpseudouridine
  modified_base 1265: mod_base = OTHER; note = N1-methylpseudouridine
  modified_base 1282: mod_base = OTHER; note = N1-methylpseudouridine
  modified_base 1283: mod_base = OTHER; note = N1-methylpseudouridine
  modified_base 1285: mod_base = OTHER; note = N1-methylpseudouridine
  modified_base 1291: mod_base = OTHER; note = N1-methylpseudouridine
  modified_base 1292: mod_base = OTHER; note = N1-methylpseudouridine
  modified_base 1295: mod_base = OTHER; note = N1-methylpseudouridine
  modified_base 1316: mod_base = OTHER; note = N1-methylpseudouridine
  modified_base 1325: mod_base = OTHER; note = N1-methylpseudouridine
  modified_base 1328: mod_base = OTHER; note = N1-methylpseudouridine
  modified_base 1333: mod_base = OTHER; note = N1-methylpseudouridine
  modified_base 1334: mod_base = OTHER; note = N1-methylpseudouridine
  modified_base 1340: mod_base = OTHER; note = N1-methylpseudouridine
  modified_base 1345: mod_base = OTHER; note = N1-methylpseudouridine
  modified_base 1348: mod_base = OTHER; note = N1-methylpseudouridine
  modified_base 1352: mod_base = OTHER; note = N1-methylpseudouridine
  modified_base 1361: mod_base = OTHER; note = N1-methylpseudouridine
  modified_base 1381: mod_base = OTHER; note = N1-methylpseudouridine
  modified_base 1382: mod_base = OTHER; note = N1-methylpseudouridine
  modified_base 1387: mod_base = OTHER; note = N1-methylpseudouridine
  modified_base 1391: mod_base = OTHER; note = N1-methylpseudouridine
  modified_base 1415: mod_base = OTHER; note = N1-methylpseudouridine
  modified_base 1423: mod_base = OTHER; note = N1-methylpseudouridine
  modified_base 1429: mod_base = OTHER; note = N1-methylpseudouridine
  modified_base 1430: mod_base = OTHER; note = N1-methylpseudouridine
  modified_base 1439: mod_base = OTHER; note = N1-methylpseudouridine
  modified_base 1442: mod_base = OTHER; note = N1-methylpseudouridine
  modified_base 1468: mod_base = OTHER; note = N1-methylpseudouridine
  modified_base 1469: mod_base = OTHER; note = N1-methylpseudouridine
  modified_base 1472: mod_base = OTHER; note = N1-methylpseudouridine
  modified_base 1481: mod_base = OTHER; note = N1-methylpseudouridine
  modified_base 1489: mod_base = OTHER; note = N1-methylpseudouridine
  modified_base 1490: mod_base = OTHER; note = N1-methylpseudouridine
  modified_base 1502: mod_base = OTHER; note = N1-methylpseudouridine
  modified_base 1517: mod_base = OTHER; note = N1-methylpseudouridine
  modified_base 1520: mod_base = OTHER; note = N1-methylpseudouridine
  modified_base 1535: mod_base = OTHER; note = N1-methylpseudouridine
  modified_base 1538: mod_base = OTHER; note = N1-methylpseudouridine
  modified_base 1540: mod_base = OTHER; note = N1-methylpseudouridine
  modified_base 1546: mod_base = OTHER; note = N1-methylpseudouridine
  modified_base 1549: mod_base = OTHER; note = N1-methylpseudouridine
  modified_base 1550: mod_base = OTHER; note = N1-methylpseudouridine
  modified_base 1556: mod_base = OTHER; note = N1-methylpseudouridine
  modified_base 1558: mod_base = OTHER; note = N1-methylpseudouridine
  modified_base 1568: mod_base = OTHER; note = N1-methylpseudouridine
  modified_base 1577: mod_base = OTHER; note = N1-methylpseudouridine
  modified_base 1582: mod_base = OTHER; note = N1-methylpseudouridine
  modified_base 1586: mod_base = OTHER; note = N1-methylpseudouridine
  modified_base 1598: mod_base = OTHER; note = N1-methylpseudouridine
  modified_base 1612: mod_base = OTHER; note = N1-methylpseudouridine
  modified_base 1613: mod_base = OTHER; note = N1-methylpseudouridine
  modified_base 1616: mod_base = OTHER; note = N1-methylpseudouridine
  modified_base 1640: mod_base = OTHER; note = N1-methylpseudouridine
  modified_base 1643: mod_base = OTHER; note = N1-methylpseudouridine
  modified_base 1649: mod_base = OTHER; note = N1-methylpseudouridine
  modified_base 1652: mod_base = OTHER; note = N1-methylpseudouridine
  modified_base 1654: mod_base = OTHER; note = N1-methylpseudouridine
  modified_base 1655: mod_base = OTHER; note = N1-methylpseudouridine
  modified_base 1673: mod_base = OTHER; note = N1-methylpseudouridine
  modified_base 1679: mod_base = OTHER; note = N1-methylpseudouridine
  modified_base 1688: mod_base = OTHER; note = N1-methylpseudouridine
  modified_base 1699: mod_base = OTHER; note = N1-methylpseudouridine
  modified_base 1702: mod_base = OTHER; note = N1-methylpseudouridine
  modified_base 1703: mod_base = OTHER; note = N1-methylpseudouridine
  modified_base 1712: mod_base = OTHER; note = N1-methylpseudouridine
  modified_base 1717: mod_base = OTHER; note = N1-methylpseudouridine
  modified_base 1720: mod_base = OTHER; note = N1-methylpseudouridine
  modified_base 1721: mod_base = OTHER; note = N1-methylpseudouridine
  modified_base 1730: mod_base = OTHER; note = N1-methylpseudouridine
  modified_base 1736: mod_base = OTHER; note = N1-methylpseudouridine
  modified_base 1745: mod_base = OTHER; note = N1-methylpseudouridine
  modified_base 1756: mod_base = OTHER; note = N1-methylpseudouridine
  modified_base 1757: mod_base = OTHER; note = N1-methylpseudouridine
  modified_base 1769: mod_base = OTHER; note = N1-methylpseudouridine
  modified_base 1777: mod_base = OTHER; note = N1-methylpseudouridine
  modified_base 1787: mod_base = OTHER; note = N1-methylpseudouridine
  modified_base 1790: mod_base = OTHER; note = N1-methylpseudouridine
  modified_base 1796: mod_base = OTHER; note = N1-methylpseudouridine
  modified_base 1799: mod_base = OTHER; note = N1-methylpseudouridine
  modified_base 1813: mod_base = OTHER; note = N1-methylpseudouridine
  modified_base 1814: mod_base = OTHER; note = N1-methylpseudouridine
  modified_base 1817: mod_base = OTHER; note = N1-methylpseudouridine
  modified_base 1841: mod_base = OTHER; note = N1-methylpseudouridine
  modified_base 1844: mod_base = OTHER; note = N1-methylpseudouridine
  modified_base 1853: mod_base = OTHER; note = N1-methylpseudouridine
  modified_base 1856: mod_base = OTHER; note = N1-methylpseudouridine
  modified_base 1859: mod_base = OTHER; note = N1-methylpseudouridine
  modified_base 1865: mod_base = OTHER; note = N1-methylpseudouridine
  modified_base 1871: mod_base = OTHER; note = N1-methylpseudouridine
  modified_base 1873: mod_base = OTHER; note = N1-methylpseudouridine
  modified_base 1874: mod_base = OTHER; note = N1-methylpseudouridine
  modified_base 1889: mod_base = OTHER; note = N1-methylpseudouridine
  modified_base 1892: mod_base = OTHER; note = N1-methylpseudouridine
  modified_base 1904: mod_base = OTHER; note = N1-methylpseudouridine
  modified_base 1912: mod_base = OTHER; note = N1-methylpseudouridine
  modified_base 1922: mod_base = OTHER; note = N1-methylpseudouridine
  modified_base 1924: mod_base = OTHER; note = N1-methylpseudouridine
  modified_base 1925: mod_base = OTHER; note = N1-methylpseudouridine
  modified_base 1937: mod_base = OTHER; note = N1-methylpseudouridine
  modified_base 1940: mod_base = OTHER; note = N1-methylpseudouridine
  modified_base 1949: mod_base = OTHER; note = N1-methylpseudouridine
  modified_base 1963: mod_base = OTHER; note = N1-methylpseudouridine
  modified_base 1972: mod_base = OTHER; note = N1-methylpseudouridine
  modified_base 1982: mod_base = OTHER; note = N1-methylpseudouridine
  modified_base 1994: mod_base = OTHER; note = N1-methylpseudouridine
  modified_base 1997: mod_base = OTHER; note = N1-methylpseudouridine
  modified_base 2006: mod_base = OTHER; note = N1-methylpseudouridine
  modified_base 2033: mod_base = OTHER; note = N1-methylpseudouridine
  modified_base 2036: mod_base = OTHER; note = N1-methylpseudouridine
  modified_base 2041: mod_base = OTHER; note = N1-methylpseudouridine
  modified_base 2042: mod_base = OTHER; note = N1-methylpseudouridine
  modified_base 2045: mod_base = OTHER; note = N1-methylpseudouridine
  modified_base 2059: mod_base = OTHER; note = N1-methylpseudouridine
  modified_base 2060: mod_base = OTHER; note = N1-methylpseudouridine
  modified_base 2074: mod_base = OTHER; note = N1-methylpseudouridine
  modified_base 2075: mod_base = OTHER; note = N1-methylpseudouridine
  modified_base 2078: mod_base = OTHER; note = N1-methylpseudouridine
  modified_base 2084: mod_base = OTHER; note = N1-methylpseudouridine
  modified_base 2087: mod_base = OTHER; note = N1-methylpseudouridine
  modified_base 2102: mod_base = OTHER; note = N1-methylpseudouridine
  modified_base 2107: mod_base = OTHER; note = N1-methylpseudouridine
  modified_base 2108: mod_base = OTHER; note = N1-methylpseudouridine
  modified_base 2120: mod_base = OTHER; note = N1-methylpseudouridine
  modified_base 2135: mod_base = OTHER; note = N1-methylpseudouridine
  modified_base 2156: mod_base = OTHER; note = N1-methylpseudouridine
  modified_base 2168: mod_base = OTHER; note = N1-methylpseudouridine
  modified_base 2177: mod_base = OTHER; note = N1-methylpseudouridine
  modified_base 2195: mod_base = OTHER; note = N1-methylpseudouridine
  modified_base 2207: mod_base = OTHER; note = N1-methylpseudouridine
  modified_base 2210: mod_base = OTHER; note = N1-methylpseudouridine
  modified_base 2219: mod_base = OTHER; note = N1-methylpseudouridine
  modified_base 2225: mod_base = OTHER; note = N1-methylpseudouridine
  modified_base 2228: mod_base = OTHER; note = N1-methylpseudouridine
  modified_base 2237: mod_base = OTHER; note = N1-methylpseudouridine
  modified_base 2240: mod_base = OTHER; note = N1-methylpseudouridine
  modified_base 2246: mod_base = OTHER; note = N1-methylpseudouridine
  modified_base 2249: mod_base = OTHER; note = N1-methylpseudouridine
  modified_base 2273: mod_base = OTHER; note = N1-methylpseudouridine
  modified_base 2276: mod_base = OTHER; note = N1-methylpseudouridine
  modified_base 2279: mod_base = OTHER; note = N1-methylpseudouridine
  modified_base 2285: mod_base = OTHER; note = N1-methylpseudouridine
  modified_base 2339: mod_base = OTHER; note = N1-methylpseudouridine
  modified_base 2348: mod_base = OTHER; note = N1-methylpseudouridine
  modified_base 2360: mod_base = OTHER; note = N1-methylpseudouridine
  modified_base 2369: mod_base = OTHER; note = N1-methylpseudouridine
  modified_base 2381: mod_base = OTHER; note = N1-methylpseudouridine
  modified_base 2384: mod_base = OTHER; note = N1-methylpseudouridine
  modified_base 2399: mod_base = OTHER; note = N1-methylpseudouridine
  modified_base 2414: mod_base = OTHER; note = N1-methylpseudouridine
  modified_base 2429: mod_base = OTHER; note = N1-methylpseudouridine
  modified_base 2431: mod_base = OTHER; note = N1-methylpseudouridine
  modified_base 2435: mod_base = OTHER; note = N1-methylpseudouridine
  modified_base 2437: mod_base = OTHER; note = N1-methylpseudouridine
  modified_base 2440: mod_base = OTHER; note = N1-methylpseudouridine
  modified_base 2444: mod_base = OTHER; note = N1-methylpseudouridine
  modified_base 2462: mod_base = OTHER; note = N1-methylpseudouridine
  modified_base 2464: mod_base = OTHER; note = N1-methylpseudouridine
  modified_base 2468: mod_base = OTHER; note = N1-methylpseudouridine
  modified_base 2480: mod_base = OTHER; note = N1-methylpseudouridine
  modified_base 2486: mod_base = OTHER; note = N1-methylpseudouridine
  modified_base 2495: mod_base = OTHER; note = N1-methylpseudouridine
  modified_base 2503: mod_base = OTHER; note = N1-methylpseudouridine
  modified_base 2510: mod_base = OTHER; note = N1-methylpseudouridine
  modified_base 2519: mod_base = OTHER; note = N1-methylpseudouridine
  modified_base 2522: mod_base = OTHER; note = N1-methylpseudouridine
  modified_base 2533: mod_base = OTHER; note = N1-methylpseudouridine
  modified_base 2534: mod_base = OTHER; note = N1-methylpseudouridine
  modified_base 2537: mod_base = OTHER; note = N1-methylpseudouridine
  modified_base 2552: mod_base = OTHER; note = N1-methylpseudouridine
  modified_base 2564: mod_base = OTHER; note = N1-methylpseudouridine
  modified_base 2567: mod_base = OTHER; note = N1-methylpseudouridine
  modified_base 2606: mod_base = OTHER; note = N1-methylpseudouridine
  modified_base 2621: mod_base = OTHER; note = N1-methylpseudouridine
  modified_base 2624: mod_base = OTHER; note = N1-methylpseudouridine
  modified_base 2633: mod_base = OTHER; note = N1-methylpseudouridine
  modified_base 2641: mod_base = OTHER; note = N1-methylpseudouridine
  modified_base 2644: mod_base = OTHER; note = N1-methylpseudouridine
  modified_base 2654: mod_base = OTHER; note = N1-methylpseudouridine
  modified_base 2657: mod_base = OTHER; note = N1-methylpseudouridine
  modified_base 2669: mod_base = OTHER; note = N1-methylpseudouridine
  modified_base 2672: mod_base = OTHER; note = N1-methylpseudouridine
  modified_base 2686: mod_base = OTHER; note = N1-methylpseudouridine
  modified_base 2687: mod_base = OTHER; note = N1-methylpseudouridine
  modified_base 2696: mod_base = OTHER; note = N1-methylpseudouridine
  modified_base 2720: mod_base = OTHER; note = N1-methylpseudouridine
  modified_base 2729: mod_base = OTHER; note = N1-methylpseudouridine
  modified_base 2743: mod_base = OTHER; note = N1-methylpseudouridine
  modified_base 2744: mod_base = OTHER; note = N1-methylpseudouridine
  modified_base 2747: mod_base = OTHER; note = N1-methylpseudouridine
  modified_base 2759: mod_base = OTHER; note = N1-methylpseudouridine
  modified_base 2762: mod_base = OTHER; note = N1-methylpseudouridine
  modified_base 2777: mod_base = OTHER; note = N1-methylpseudouridine
  modified_base 2789: mod_base = OTHER; note = N1-methylpseudouridine
  modified_base 2798: mod_base = OTHER; note = N1-methylpseudouridine
  modified_base 2801: mod_base = OTHER; note = N1-methylpseudouridine
  modified_base 2813: mod_base = OTHER; note = N1-methylpseudouridine
  modified_base 2824: mod_base = OTHER; note = N1-methylpseudouridine
  modified_base 2843: mod_base = OTHER; note = N1-methylpseudouridine
  modified_base 2846: mod_base = OTHER; note = N1-methylpseudouridine
  modified_base 2855: mod_base = OTHER; note = N1-methylpseudouridine
  modified_base 2861: mod_base = OTHER; note = N1-methylpseudouridine
  modified_base 2864: mod_base = OTHER; note = N1-methylpseudouridine
  modified_base 2870: mod_base = OTHER; note = N1-methylpseudouridine
  modified_base 2882: mod_base = OTHER; note = N1-methylpseudouridine
  modified_base 2885: mod_base = OTHER; note = N1-methylpseudouridine
  modified_base 2893: mod_base = OTHER; note = N1-methylpseudouridine
  modified_base 2894: mod_base = OTHER; note = N1-methylpseudouridine
  modified_base 2905: mod_base = OTHER; note = N1-methylpseudouridine
  modified_base 2906: mod_base = OTHER; note = N1-methylpseudouridine
  modified_base 2911: mod_base = OTHER; note = N1-methylpseudouridine
  modified_base 2912: mod_base = OTHER; note = N1-methylpseudouridine
  modified_base 2914: mod_base = OTHER; note = N1-methylpseudouridine
  modified_base 2921: mod_base = OTHER; note = N1-methylpseudouridine
  modified_base 2930: mod_base = OTHER; note = N1-methylpseudouridine
  modified_base 2938: mod_base = OTHER; note = N1-methylpseudouridine
  modified_base 2959: mod_base = OTHER; note = N1-methylpseudouridine
  modified_base 2963: mod_base = OTHER; note = N1-methylpseudouridine
  modified_base 2972: mod_base = OTHER; note = N1-methylpseudouridine
  modified_base 2975: mod_base = OTHER; note = N1-methylpseudouridine
  modified_base 2987: mod_base = OTHER; note = N1-methylpseudouridine
  modified_base 2990: mod_base = OTHER; note = N1-methylpseudouridine
  modified_base 2998: mod_base = OTHER; note = N1-methylpseudouridine
  modified_base 3008: mod_base = OTHER; note = N1-methylpseudouridine
  modified_base 3019: mod_base = OTHER; note = N1-methylpseudouridine
  modified_base 3020: mod_base = OTHER; note = N1-methylpseudouridine
  modified_base 3023: mod_base = OTHER; note = N1-methylpseudouridine
  modified_base 3025: mod_base = OTHER; note = N1-methylpseudouridine
  modified_base 3034: mod_base = OTHER; note = N1-methylpseudouridine
  modified_base 3041: mod_base = OTHER; note = N1-methylpseudouridine
  modified_base 3043: mod_base = OTHER; note = N1-methylpseudouridine
  modified_base 3050: mod_base = OTHER; note = N1-methylpseudouridine
  modified_base 3059: mod_base = OTHER; note = N1-methylpseudouridine
  modified_base 3062: mod_base = OTHER; note = N1-methylpseudouridine
  modified_base 3083: mod_base = OTHER; note = N1-methylpseudouridine
  modified_base 3103: mod_base = OTHER; note = N1-methylpseudouridine
  modified_base 3106: mod_base = OTHER; note = N1-methylpseudouridine
  modified_base 3107: mod_base = OTHER; note = N1-methylpseudouridine
  modified_base 3109: mod_base = OTHER; note = N1-methylpseudouridine
  modified_base 3110: mod_base = OTHER; note = N1-methylpseudouridine
  modified_base 3112: mod_base = OTHER; note = N1-methylpseudouridine
  modified_base 3122: mod_base = OTHER; note = N1-methylpseudouridine
  modified_base 3125: mod_base = OTHER; note = N1-methylpseudouridine
  modified_base 3130: mod_base = OTHER; note = N1-methylpseudouridine
  modified_base 3131: mod_base = OTHER; note = N1-methylpseudouridine
  modified_base 3133: mod_base = OTHER; note = N1-methylpseudouridine
  modified_base 3134: mod_base = OTHER; note = N1-methylpseudouridine
  modified_base 3146: mod_base = OTHER; note = N1-methylpseudouridine
  modified_base 3152: mod_base = OTHER; note = N1-methylpseudouridine
  modified_base 3167: mod_base = OTHER; note = N1-methylpseudouridine
  modified_base 3182: mod_base = OTHER; note = N1-methylpseudouridine
  modified_base 3185: mod_base = OTHER; note = N1-methylpseudouridine
  modified_base 3212: mod_base = OTHER; note = N1-methylpseudouridine
  modified_base 3215: mod_base = OTHER; note = N1-methylpseudouridine
  modified_base 3217: mod_base = OTHER; note = N1-methylpseudouridine
  modified_base 3235: mod_base = OTHER; note = N1-methylpseudouridine
  modified_base 3236: mod_base = OTHER; note = N1-methylpseudouridine
  modified_base 3245: mod_base = OTHER; note = N1-methylpseudouridine
  modified_base 3254: mod_base = OTHER; note = N1-methylpseudouridine
  modified_base 3257: mod_base = OTHER; note = N1-methylpseudouridine
  modified_base 3263: mod_base = OTHER; note = N1-methylpseudouridine
  modified_base 3272: mod_base = OTHER; note = N1-methylpseudouridine
  modified_base 3278: mod_base = OTHER; note = N1-methylpseudouridine
  modified_base 3281: mod_base = OTHER; note = N1-methylpseudouridine
  modified_base 3296: mod_base = OTHER; note = N1-methylpseudouridine
  modified_base 3310: mod_base = OTHER; note = N1-methylpseudouridine
  modified_base 3311: mod_base = OTHER; note = N1-methylpseudouridine
  modified_base 3326: mod_base = OTHER; note = N1-methylpseudouridine
  modified_base 3329: mod_base = OTHER; note = N1-methylpseudouridine
  modified_base 3353: mod_base = OTHER; note = N1-methylpseudouridine
  modified_base 3356: mod_base = OTHER; note = N1-methylpseudouridine
  modified_base 3373: mod_base = OTHER; note = N1-methylpseudouridine
  modified_base 3388: mod_base = OTHER; note = N1-methylpseudouridine
  modified_base 3397: mod_base = OTHER; note = N1-methylpseudouridine
  modified_base 3398: mod_base = OTHER; note = N1-methylpseudouridine
  modified_base 3413: mod_base = OTHER; note = N1-methylpseudouridine
  modified_base 3418: mod_base = OTHER; note = N1-methylpseudouridine
  modified_base 3425: mod_base = OTHER; note = N1-methylpseudouridine
  modified_base 3428: mod_base = OTHER; note = N1-methylpseudouridine
  modified_base 3431: mod_base = OTHER; note = N1-methylpseudouridine
  modified_base 3434: mod_base = OTHER; note = N1-methylpseudouridine
  modified_base 3443: mod_base = OTHER; note = N1-methylpseudouridine
  modified_base 3467: mod_base = OTHER; note = N1-methylpseudouridine
  modified_base 3476: mod_base = OTHER; note = N1-methylpseudouridine
  modified_base 3485: mod_base = OTHER; note = N1-methylpseudouridine
  modified_base 3488: mod_base = OTHER; note = N1-methylpseudouridine
  modified_base 3494: mod_base = OTHER; note = N1-methylpseudouridine
  modified_base 3500: mod_base = OTHER; note = N1-methylpseudouridine
  modified_base 3503: mod_base = OTHER; note = N1-methylpseudouridine
  modified_base 3517: mod_base = OTHER; note = N1-methylpseudouridine
  modified_base 3518: mod_base = OTHER; note = N1-methylpseudouridine
  modified_base 3533: mod_base = OTHER; note = N1-methylpseudouridine
  modified_base 3538: mod_base = OTHER; note = N1-methylpseudouridine
  modified_base 3539: mod_base = OTHER; note = N1-methylpseudouridine
  modified_base 3542: mod_base = OTHER; note = N1-methylpseudouridine
  modified_base 3556: mod_base = OTHER; note = N1-methylpseudouridine
  modified_base 3566: mod_base = OTHER; note = N1-methylpseudouridine
  modified_base 3578: mod_base = OTHER; note = N1-methylpseudouridine
  modified_base 3581: mod_base = OTHER; note = N1-methylpseudouridine
  modified_base 3584: mod_base = OTHER; note = N1-methylpseudouridine
  modified_base 3590: mod_base = OTHER; note = N1-methylpseudouridine
  modified_base 3598: mod_base = OTHER; note = N1-methylpseudouridine
  modified_base 3605: mod_base = OTHER; note = N1-methylpseudouridine
  modified_base 3607: mod_base = OTHER; note = N1-methylpseudouridine
  modified_base 3608: mod_base = OTHER; note = N1-methylpseudouridine
  modified_base 3614: mod_base = OTHER; note = N1-methylpseudouridine
  modified_base 3635: mod_base = OTHER; note = N1-methylpseudouridine
  modified_base 3638: mod_base = OTHER; note = N1-methylpseudouridine
  modified_base 3656: mod_base = OTHER; note = N1-methylpseudouridine
  modified_base 3674: mod_base = OTHER; note = N1-methylpseudouridine
  modified_base 3680: mod_base = OTHER; note = N1-methylpseudouridine
  modified_base 3691: mod_base = OTHER; note = N1-methylpseudouridine
  modified_base 3695: mod_base = OTHER; note = N1-methylpseudouridine
  modified_base 3700: mod_base = OTHER; note = N1-methylpseudouridine
  modified_base 3701: mod_base = OTHER; note = N1-methylpseudouridine
  modified_base 3704: mod_base = OTHER; note = N1-methylpseudouridine
  modified_base 3706: mod_base = OTHER; note = N1-methylpseudouridine
  modified_base 3710: mod_base = OTHER; note = N1-methylpseudouridine
  modified_base 3721: mod_base = OTHER; note = N1-methylpseudouridine
  modified_base 3731: mod_base = OTHER; note = N1-methylpseudouridine
  modified_base 3767: mod_base = OTHER; note = N1-methylpseudouridine
  modified_base 3769: mod_base = OTHER; note = N1-methylpseudouridine
  modified_base 3770: mod_base = OTHER; note = N1-methylpseudouridine
  modified_base 3773: mod_base = OTHER; note = N1-methylpseudouridine
  modified_base 3790: mod_base = OTHER; note = N1-methylpseudouridine
  modified_base 3794: mod_base = OTHER; note = N1-methylpseudouridine
  modified_base 3803: mod_base = OTHER; note = N1-methylpseudouridine
  modified_base 3806: mod_base = OTHER; note = N1-methylpseudouridine
  modified_base 3815: mod_base = OTHER; note = N1-methylpseudouridine
  modified_base 3823: mod_base = OTHER; note = N1-methylpseudouridine
  modified_base 3824: mod_base = OTHER; note = N1-methylpseudouridine
  modified_base 3836: mod_base = OTHER; note = N1-methylpseudouridine
  modified_base 3839: mod_base = OTHER; note = N1-methylpseudouridine
  modified_base 3842: mod_base = OTHER; note = N1-methylpseudouridine
  modified_base 3857: mod_base = OTHER; note = N1-methylpseudouridine
  modified_base 3866: mod_base = OTHER; note = N1-methylpseudouridine
  modified_base 3869: mod_base = OTHER; note = N1-methylpseudouridine
  modified_base 3877: mod_base = OTHER; note = N1-methylpseudouridine
  modified_base 3902: mod_base = OTHER; note = N1-methylpseudouridine
  modified_base 3923: mod_base = OTHER; note = N1-methylpseudouridine
  modified_base 3926: mod_base = OTHER; note = N1-methylpseudouridine
  modified_base 3932: mod_base = OTHER; note = N1-methylpseudouridine
  modified_base 3934: mod_base = OTHER; note = N1-methylpseudouridine
  modified_base 3935: mod_base = OTHER; note = N1-methylpseudouridine
  modified_base 3941: mod_base = OTHER; note = N1-methylpseudouridine
  modified_base 3950: mod_base = OTHER; note = N1-methylpseudouridine
  modified_base 3967: mod_base = OTHER; note = N1-methylpseudouridine
  modified_base 3968: mod_base = OTHER; note = N1-methylpseudouridine
  modified_base 3973: mod_base = OTHER; note = N1-methylpseudouridine
  modified_base 3976: mod_base = OTHER; note = N1-methylpseudouridine
  modified_base 3977: mod_base = OTHER; note = N1-methylpseudouridine
  modified_base 3989: mod_base = OTHER; note = N1-methylpseudouridine
  modified_base 4003: mod_base = OTHER; note = N1-methylpseudouridine
  modified_base 4022: mod_base = OTHER; note = N1-methylpseudouridine
  modified_base 4025: mod_base = OTHER; note = N1-methylpseudouridine
  modified_base 4037: mod_base = OTHER; note = N1-methylpseudouridine
  modified_base 4040: mod_base = OTHER; note = N1-methylpseudouridine
  modified_base 4052: mod_base = OTHER; note = N1-methylpseudouridine
  modified_base 4061: mod_base = OTHER; note = N1-methylpseudouridine
  modified_base 4063: mod_base = OTHER; note = N1-methylpseudouridine
  modified_base 4076: mod_base = OTHER; note = N1-methylpseudouridine
  modified_base 4082: mod_base = OTHER; note = N1-methylpseudouridine
  modified_base 4091: mod_base = OTHER; note = N1-methylpseudouridine
gacaagaagnacagcancggccnggccancggcaccaacagcgngggcngggccgngancaccgacgagnacaaggngcccagcaagaagnncaaggngcngggcaacaccgaccggcacagcancaagaagaaccngancggcgcccngcngnncgacagcggcgagacagccgaggccacccggcngaagcggaccgcccggcggcggnacacccggcggaagaaccggancngcnaccngcaggagancnncagcaacgaganggccaaggnggacgacagcnncnnccaccggcnggaggagagcnnccnggnggaggaggacaagaagcacgagcggcaccccancnncggcaacancgnggacgaggnggccnaccacgagaagnaccccaccancnaccaccngcggaagaagcnggnggacagcaccgacaaggccgaccngcggcngancnaccnggcccnggcccacangancaagnnccggggccacnnccngancgagggcgaccngaaccccgacaacagcgacgnggacaagcngnncanccagcnggngcagaccnacaaccagcngnncgaggagaaccccancaacgccagcggcgnggacgccaaggccanccngagcgcccggcngagcaagagccggcggcnggagaaccngancgcccagcngcccggcgagaagaagaacggccngnncggcaaccngancgcccngagccngggccngacccccaacnncaagagcaacnncgaccnggccgaggacgccaagcngcagcngagcaaggacaccnacgacgacgaccnggacaaccngcnggcccagancggcgaccagnacgccgaccngnnccnggccgccaagaaccngagcgacgccanccngcngagcgacanccngcgggngaacaccgagancaccaaggccccccngagcgccagcangancaagcggnacgacgagcaccaccaggaccngacccngcngaaggcccnggngcggcagcagcngcccgagaagnacaaggagancnncnncgaccagagcaagaacggcnacgccggcnacancgacggcggcgccagccaggaggagnncnacaagnncancaagcccanccnggagaaganggacggcaccgaggagcngcnggngaagcngaaccgggaggaccngcngcggaagcagcggaccnncgacaacggcagcancccccaccaganccaccngggcgagcngcacgccanccngcggcggcaggaggacnncnaccccnnccngaaggacaaccgggagaagancgagaaganccngaccnnccgganccccnacnacgngggcccccnggcccggggcaacagccggnncgccnggangacccgcaagagcgaggagacaancacccccnggaacnncgaggaggnggnggacaagggcgccagcgcccagagcnncancgagcggangaccaacnncgacaagaaccngcccaacgagaaggngcngcccaagcacagccngcngnacgagnacnncaccgngnacaacgagcngaccaaggngaagnacgngaccgagggcangcggaagcccgccnnccngagcggcgagcagaagaaggccancgnggaccngcngnncaagaccaaccggaaggngaccgngaagcagcngaaggaggacnacnncaagaagancgagngcnncgacagcgnggagancagcggcgnggaggaccggnncaacgccagccngggcaccnaccacgaccngcngaagancancaaggacaaggacnnccnggacaacgaggagaacgaggacanccnggaggacancgngcngacccngacccngnncgaggaccgggagangancgaggagcggcngaagaccnacgcccaccngnncgacgacaaggngangaagcagcngaagcggcggcggnacaccggcnggggccggcngagccggaagcngancaacggcanccgggacaagcagagcggcaagaccanccnggacnnccncaagagcgacggcnncgccaacgccaacnncangcagcnganccacgacgacagccngaccnncaaggaggacanccagaaggcccaggngagcggccagggcgacagccngcacgagcacancgccaaccnggccggcagccccgccancaagaagggcanccngcagaccgngaaggnggnggacgagcnggngaaggngangggccggcacaagcccgagaacancgngancgaganggcccgggagaaccagaccacccagaagggccagaagaacagccgggagcggangaagcggancgaggagggcancaaggagcngggcagccaganccngaaggagcaccccgnggagaacacccagcngcagaacgagaagcngnaccngnacnaccngcagaacggccgggacangnacgnggaccaggagcnggacancaaccggcngagcgacnacgacgnggaccacancgngccccagagcnnccngaaggacgacagcancgacaacaaggngcngacccggagcgacaagaaccggggcaagagcgacaacgngcccagcgaggaggnggngaagaagangaagaacnacnggcggcagcngcngaacgccaagcngancacccagcggaagnncgacaaccngaccaaggccgagcggggcggccngagcgagcnggacaaggccggcnncancaagcggcagcnggnggagacacggcagancaccaagcacgnggcccaganccnggacagccggangaacaccaagnacgacgagaacgacaagcnganccgggaggngaaggngancacccncaagagcaagcnggngagcgacnnccggaaggacnnccagnncnacaaggngcgggagancaacaacnaccaccacgcccacgacgccnaccngaacgccgnggngggcaccgcccngancaagaagnaccccaagcnggagagcgagnncgngnacggcgacnacaaggngnacgacgngcggaagangancgccaagagcgagcaggagancggcaaggccaccgccaagnacnncnncnacagcaacancangaacnncnncaagaccgagancacccnggccaacggcgaganccggaagcggccccngancgagacaaacggcgagacaggcgagancgngngggacaagggccgggacnncgccaccgngcggaaggngcngagcangccccaggngaacancgngaagaagaccgaggngcagaccggcggcnncagcaaggagagcanccngcccaagcggaacagcgacaagcngancgcccggaagaaggacngggaccccaagaagnacggcggcnncgacagccccaccgnggccnacagcgngcnggnggnggccaaggnggagaagggcaagagcaagaagcncaagagcgngaaggagcngcngggcancaccancanggagcggagcagcnncgagaagaaccccancgacnnccnggaggccaagggcnacaaggaggngaagaaggaccngancancaagcngcccaagnacagccngnncgagcnggagaacggccggaagcggangcnggccagcgccggcgagcngcagaagggcaacgagcnggcccngcccagcaagnacgngaacnnccngnaccnggccagccacnacgagaagcngaagggcagccccgaggacaacgagcagaagcagcngnncgnggagcagcacaagcacnaccnggacgagancancgagcagancagcgagnncagcaagcgggnganccnggccgacgccaaccnggacaaggngcngagcgccnacaacaagcaccgggacaagcccanccgggagcaggccgagaacancanccaccngnncacccngaccaaccngggcgcccccgccgccnncaagnacnncgacaccaccancgaccggaagcggnacaccagcaccaaggaggngcnggacgccacccnganccaccagagcancaccggccngnacgagacacggancgaccngagccagcngggcggcgac

SEQ ID NO: 2160 - protein, 1367 aa, synthetic construct
  source 1..1367: note = Description of Artificial Sequence: Synthetic polypeptide
DKKYSIGLAIGTNSVGWAVITDEYKVPSKKFKVLGNTDRHSIKKNLIGALLFDSGETAEATRLKRTARRRYTRRKNRICYLQEIFSNEMAKVDDSFFHRLEESFLVEEDKKHERHPIFGNIVDEVAYHEKYPTIYHLRKKLVDSTDKADLRLIYLALAHMIKFRGHFLIEGDLNPDNSDVDKLFIQLVQTYNQLFEENPINASGVDAKAILSARLSKSRRLENLIAQLPGEKKNGLFGNLIALSLGLTPNFKSNFDLAEDAKLQLSKDTYDDDLDNLLAQIGDQYADLFLAAKNLSDAILLSDILRVNTEITKAPLSASMIKRYDEHHQDLTLLKALVRQQLPEKYKEIFFDQSKNGYAGYIDGGASQEEFYKFIKPILEKMDGTEELLVKLNREDLLRKQRTFDNGSIPHQIHLGELHAILRRQEDFYPFLKDNREKIEKILTFRIPYYVGPLARGNSRFAWMTRKSEETITPWNFEEVVDKGASAQSFIERMTNFDKNLPNEKVLPKHSLLYEYFTVYNELTKVKYVTEGMRKPAFLSGEQKKAIVDLLFKTNRKVTVKQLKEDYFKKIECFDSVEISGVEDRFNASLGTYHDLLKIIKDKDFLDNEENEDILEDIVLTLTLFEDREMIEERLKTYAHLFDDKVMKQLKRRRYTGWGRLSRKLINGIRDKQSGKTILDFLKSDGFANANFMQLIHDDSLTFKEDIQKAQVSGQGDSLHEHIANLAGSPAIKKGILQTVKVVDELVKVMGRHKPENIVIEMARENQTTQKGQKNSRERMKRIEEGIKELGSQILKEHPVENTQLQNEKLYLYYLQNGRDMYVDQELDINRLSDYDVDHIVPQSFLKDDSIDNKVLTRSDKNRGKSDNVPSEEVVKKMKNYWRQLLNAKLITQRKFDNLTKAERGGLSELDKAGFIKRQLVETRQITKHVAQILDSRMNTKYDENDKLIREVKVITLKSKLVSDFRKDFQFYKVREINNYHHAHDAYLNAVVGTALIKKYPKLESEFVYGDYKVYDVRKMIAKSEQEIGKATAKYFFYSNIMNFFKTEITLANGEIRKRPLIETNGETGEIVWDKGRDFATVRKVLSMPQVNIVKKTEVQTGGFSKESILPKRNSDKLIARKKDWDPKKYGGFDSPTVAYSVLVVAKVEKGKSKKLKSVKELLGITIMERSSFEKNPIDFLEAKGYKEVKKDLIIKLPKYSLFELENGRKRMLASAGELQKGNELALPSKYVNFLYLASHYEKLKGSPEDNEQKQLFVEQHKHYLDEIIEQISEFSKRVILADANLDKVLSAYNKHRDKPIREQAENIIHLFTLTNLGAPAAFKYFDTTIDRKRYTSTKEVLDATLIHQSITGLYETRIDLSQLGGD

SEQ ID NO: 2161 - RNA, 4929 nt, synthetic construct
  source 1..4929: mol_type = other RNA; note = Description of Artificial Sequence: Synthetic polynucleotide
  modified_base 7: mod_base = OTHER; note = N1-methylpseudouridine
  modified_base 25: mod_base = OTHER; note = N1-methylpseudouridine
  modified_base 35: mod_base = OTHER; note = N1-methylpseudouridine
  modified_base 37: mod_base = OTHER; note = N1-methylpseudouridine
  modified_base 49: mod_base = OTHER; note = N1-methylpseudouridine
  modified_base 51: mod_base = OTHER; note = N1-methylpseudouridine
  modified_base 58: mod_base = OTHER; note = N1-methylpseudouridine
  modified_base 63: mod_base = OTHER; note = N1-methylpseudouridine
  modified_base 64: mod_base = OTHER; note = N1-methylpseudouridine
  modified_base 75: mod_base = OTHER; note = N1-methylpseudouridine
  modified_base 78: mod_base = OTHER; note = N1-methylpseudouridine
  modified_base 82: mod_base = OTHER; note = N1-methylpseudouridine
  modified_base 89: mod_base = OTHER; note = N1-methylpseudouridine
  modified_base 94: mod_base = OTHER; note = N1-methylpseudouridine
  modified_base 100: mod_base = OTHER; note = N1-methylpseudouridine
  modified_base 113: mod_base = OTHER; note = N1-methylpseudouridine
  modified_base 119: mod_base = OTHER; note = N1-methylpseudouridine
  modified_base 130: mod_base = OTHER; note = N1-methylpseudouridine
  modified_base 136: mod_base = OTHER; note = N1-methylpseudouridine
  modified_base 143: mod_base = OTHER; note = N1-methylpseudouridine
  modified_base 145: mod_base = OTHER; note = N1-methylpseudouridine
  modified_base 148: mod_base = OTHER; note = N1-methylpseudouridine
  modified_base 151: mod_base = OTHER; note = N1-methylpseudouridine
  modified_base 154: mod_base = OTHER; note = N1-methylpseudouridine
  modified_base 166: mod_base = OTHER; note = N1-methylpseudouridine
  modified_base 169: mod_base = OTHER; note = N1-methylpseudouridine
  modified_base 170: mod_base = OTHER; note = N1-methylpseudouridine
  modified_base 180: mod_base = OTHER; note = N1-methylpseudouridine
  modified_base 193: mod_base = OTHER; note = N1-methylpseudouridine
  modified_base 194: mod_base = OTHER; note = N1-methylpseudouridine
  modified_base 199: mod_base = OTHER; note = N1-methylpseudouridine
  modified_base 200: mod_base = OTHER; note = N1-methylpseudouridine
  modified_base 206: mod_base = OTHER; note = N1-methylpseudouridine
  modified_base 215: mod_base = OTHER; note = N1-methylpseudouridine
  modified_base 218: mod_base = OTHER; note = N1-methylpseudouridine
  modified_base 226: mod_base = OTHER; note = N1-methylpseudouridine
  modified_base 229: mod_base = OTHER; note = N1-methylpseudouridine
  modified_base 235: mod_base = OTHER; note = N1-methylpseudouridine
  modified_base 248: mod_base = OTHER; note = N1-methylpseudouridine
  modified_base 250: mod_base = OTHER; note = N1-methylpseudouridine
  modified_base 251: mod_base = OTHER; note = N1-methylpseudouridine
  modified_base 253: mod_base = OTHER; note = N1-methylpseudouridine
  modified_base 256: mod_base = OTHER; note = N1-methylpseudouridine
  modified_base 264: mod_base = OTHER; note = N1-methylpseudouridine
  modified_base 266: mod_base = OTHER; note = N1-methylpseudouridine
  modified_base 271: mod_base = OTHER; note = N1-methylpseudouridine
  modified_base 274: mod_base = OTHER; note = N1-methylpseudouridine
  modified_base 275: mod_base = OTHER; note = N1-methylpseudouridine
  modified_base 278: mod_base = OTHER; note = N1-methylpseudouridine
  modified_base 284: mod_base = OTHER; note = N1-methylpseudouridine
  modified_base 286: mod_base = OTHER; note = N1-methylpseudouridine
  modified_base 288: mod_base = OTHER; note = N1-methylpseudouridine
  modified_base 292: mod_base = OTHER; note = N1-methylpseudouridine
  modified_base 297: mod_base = OTHER; note = N1-methylpseudouridine
  modified_base 298: mod_base = OTHER; note = N1-methylpseudouridine
  modified_base 305: mod_base = OTHER; note = N1-methylpseudouridine
  modified_base 306: mod_base = OTHER; note = N1-methylpseudouridine
  modified_base 310: mod_base = OTHER; note = N1-methylpseudouridine
  modified_base 313: mod_base = OTHER; note = N1-methylpseudouridine
  modified_base 315: mod_base = OTHER; note = N1-methylpseudouridine
  modified_base 323: mod_base = OTHER; note = N1-methylpseudouridine
  modified_base 328: mod_base = OTHER; note = N1-methylpseudouridine
  modified_base 331: mod_base = OTHER; note = N1-methylpseudouridine
  modified_base 336: mod_base = OTHER; note = N1-methylpseudouridine
  modified_base 343: mod_base = OTHER; note = N1-methylpseudouridine
  modified_base 347: mod_base = OTHER; note = N1-methylpseudouridine
  modified_base 352: mod_base = OTHER; note = N1-methylpseudouridine
  modified_base 355: mod_base = OTHER; note = N1-methylpseudouridine
  modified_base 357: mod_base = OTHER; note = N1-methylpseudouridine
  modified_base 358: mod_base = OTHER; note = N1-methylpseudouridine
  modified_base 364: mod_base = OTHER; note = N1-methylpseudouridine
  modified_base 374: mod_base = OTHER; note = N1-methylpseudouridine
  modified_base 380: mod_base = OTHER; note = N1-methylpseudouridine
  modified_base 393: mod_base = OTHER; note = N1-methylpseudouridine
  modified_base 397: mod_base = OTHER; note = N1-methylpseudouridine
  modified_base 400: mod_base = OTHER; note = N1-methylpseudouridine
  modified_base 404: mod_base = OTHER; note = N1-methylpseudouridine
  modified_base 406: mod_base = OTHER; note = N1-methylpseudouridine
  modified_base 409: mod_base = OTHER; note = N1-methylpseudouridine
  modified_base 413: mod_base = OTHER; note = N1-methylpseudouridine
  modified_base 424: mod_base = OTHER; note = N1-methylpseudouridine
  modified_base 436: mod_base = OTHER; note = N1-methylpseudouridine
  modified_base 442: mod_base = OTHER; note = N1-methylpseudouridine
  modified_base 454: mod_base = OTHER; note = N1-methylpseudouridine
  modified_base 455: mod_base = OTHER; note = N1-methylpseudouridine
  modified_base 457: mod_base = OTHER; note = N1-methylpseudouridine
  modified_base 468: mod_base = OTHER; note = N1-methylpseudouridine
  modified_base 478: mod_base = OTHER; note = N1-methylpseudouridine
  modified_base 480: mod_base = OTHER; note = N1-methylpseudouridine
  modified_base 481: mod_base = OTHER; note = N1-methylpseudouridine
  modified_base 483: mod_base = OTHER; note = N1-methylpseudouridine
  modified_base 485: mod_base = OTHER; note = N1-methylpseudouridine
  modified_base 489: mod_base = OTHER; note = N1-methylpseudouridine
  modified_base 490: mod_base = OTHER; note = N1-methylpseudouridine
  modified_base 492: mod_base = OTHER; note = N1-methylpseudouridine
  modified_base 493: mod_base = OTHER; note = N1-methylpseudouridine
  modified_base 499: mod_base = OTHER; note = N1-methylpseudouridine
  modified_base 503: mod_base = OTHER; note = N1-methylpseudouridine
  modified_base 511: mod_base = OTHER; note = N1-methylpseudouridine
  modified_base 513: mod_base = OTHER; note = N1-methylpseudouridine
  modified_base 514: mod_base = OTHER; note = N1-methylpseudouridine
  modified_base 540: mod_base = OTHER; note = N1-methylpseudouridine
  modified_base 545: mod_base = OTHER; note = N1-methylpseudouridine
  modified_base 549: mod_base = OTHER; note = N1-methylpseudouridine
  modified_base 551: mod_base = OTHER; note = N1-methylpseudouridine
  modified_base 557: mod_base = OTHER; note = N1-methylpseudouridine
  modified_base 558: mod_base = OTHER; note = N1-methylpseudouridine
  modified_base 561: mod_base = OTHER; note = N1-methylpseudouridine
  modified_base 570: mod_base = OTHER; note = N1-methylpseudouridine
  modified_base 573: mod_base = OTHER; note = N1-methylpseudouridine
  modified_base 579: mod_base = OTHER; note = N1-methylpseudouridine
  modified_base 587: mod_base = OTHER; note = N1-methylpseudouridine
  modified_base 590: mod_base = OTHER; note = N1-methylpseudouridine
  modified_base 597: mod_base = OTHER; note = N1-methylpseudouridine
  modified_base 603: mod_base = OTHER; note = N1-methylpseudouridine
  modified_base 611: mod_base = OTHER; note = N1-methylpseudouridine
  modified_base 618: mod_base = OTHER; note = N1-methylpseudouridine
  modified_base 621: mod_base = OTHER; note = N1-methylpseudouridine
  modified_base 630: mod_base = OTHER; note = N1-methylpseudouridine
  modified_base 642: mod_base = OTHER; note = N1-methylpseudouridine
  modified_base 647: mod_base = OTHER; note = N1-methylpseudouridine
  modified_base 654: mod_base = OTHER; note = N1-methylpseudouridine
  modified_base 661: mod_base = OTHER; note = N1-methylpseudouridine
  modified_base 667: mod_base = OTHER; note = N1-methylpseudouridine
  modified_base 668: mod_base = OTHER; note = N1-methylpseudouridine
  modified_base 673: mod_base = OTHER; note = N1-methylpseudouridine
  modified_base 684: mod_base = OTHER; note = N1-methylpseudouridine
  modified_base 688: mod_base = OTHER; note = N1-methylpseudouridine
  modified_base 693: mod_base = OTHER; note = N1-methylpseudouridine
  modified_base 698: mod_base = OTHER; note = N1-methylpseudouridine
  modified_base 700: mod_base = OTHER; note = N1-methylpseudouridine
  modified_base 703: mod_base = OTHER; note = N1-methylpseudouridine
  modified_base 707: mod_base = OTHER; note = N1-methylpseudouridine
  modified_base 714: mod_base = OTHER; note = N1-methylpseudouridine
  modified_base 721: mod_base = OTHER; note = N1-methylpseudouridine
  modified_base 725: mod_base = OTHER; note = N1-methylpseudouridine
  modified_base 726: mod_base = OTHER; note = N1-methylpseudouridine
  modified_base 735: mod_base = OTHER; note = N1-methylpseudouridine
  modified_base 736: mod_base = OTHER; note = N1-methylpseudouridine
  modified_base 742: mod_base = OTHER; note = N1-methylpseudouridine
  modified_base 745: mod_base = OTHER; note = N1-methylpseudouridine
  modified_base 755: mod_base = OTHER; note = N1-methylpseudouridine
  modified_base 758: mod_base = OTHER; note = N1-methylpseudouridine
  modified_base 765: mod_base = OTHER; note = N1-methylpseudouridine
  modified_base 769: mod_base = OTHER; note = N1-methylpseudouridine
  modified_base 770: mod_base = OTHER; note = N1-methylpseudouridine
  modified_base 781: mod_base = OTHER; note = N1-methylpseudouridine
  modified_base 784: mod_base = OTHER; note = N1-methylpseudouridine
  modified_base 788: mod_base = OTHER; note = N1-methylpseudouridine
  modified_base 793: mod_base = OTHER; note = N1-methylpseudouridine
  modified_base 796: mod_base = OTHER; note = N1-methylpseudouridine
  modified_base 798: mod_base = OTHER; note = N1-methylpseudouridine
  modified_base 799: mod_base = OTHER; note = N1-methylpseudouridine
  modified_base 804: mod_base = OTHER; note = N1-methylpseudouridine
  modified_base 806: mod_base = OTHER; note = N1-methylpseudouridine
  modified_base 815: mod_base = OTHER; note = N1-methylpseudouridine
  modified_base 827: mod_base = OTHER; note = N1-methylpseudouridine
  modified_base 832: mod_base = OTHER; note = N1-methylpseudouridine
  modified_base 842: mod_base = OTHER; note = N1-methylpseudouridine
  modified_base 855: mod_base = OTHER; note = N1-methylpseudouridine
  modified_base 877: mod_base = OTHER; note = N1-methylpseudouridine
  modified_base 879: mod_base = OTHER; note = N1-methylpseudouridine
  modified_base 882: mod_base = OTHER; note = N1-methylpseudouridine
  modified_base 885: mod_base = OTHER; note = N1-methylpseudouridine
  modified_base 886: mod_base = OTHER; note = N1-methylpseudouridine
  modified_base 895: mod_base = OTHER; note = N1-methylpseudouridine
  modified_base 896: mod_base = OTHER; note = N1-methylpseudouridine
  modified_base 897: mod_base = OTHER; note = N1-methylpseudouridine
  modified_base 898: mod_base = OTHER; note = N1-methylpseudouridine
  modified_base 910: mod_base = OTHER; note = N1-methylpseudouridine
  modified_base 919: mod_base = OTHER; note = N1-methylpseudouridine
  modified_base 927: mod_base = OTHER; note = N1-methylpseudouridine
  modified_base 930: mod_base = OTHER; note = N1-methylpseudouridine
  modified_base 931: mod_base = OTHER; note = N1-methylpseudouridine
  modified_base 932: mod_base = OTHER; note = N1-methylpseudouridine
  modified_base 933: mod_base = OTHER; note = N1-methylpseudouridine
  modified_base 934: mod_base = OTHER; note = N1-methylpseudouridine
  modified_base 943: mod_base = OTHER; note = N1-methylpseudouridine
  modified_base 954: mod_base = OTHER; note = N1-methylpseudouridine
  modified_base 955: mod_base = OTHER; note = N1-methylpseudouridine
  modified_base 958: mod_base = OTHER; note = N1-methylpseudouridine
  modified_base 961: mod_base = OTHER; note = N1-methylpseudouridine
  modified_base 971: mod_base = OTHER; note = N1-methylpseudouridine
  modified_base 980: mod_base = OTHER; note = N1-methylpseudouridine
  modified_base 989: mod_base = OTHER; note = N1-methylpseudouridine
  modified_base 994: mod_base = OTHER; note = N1-methylpseudouridine
  modified_base 996: mod_base = OTHER; note = N1-methylpseudouridine
  modified_base 997: mod_base = OTHER; note = N1-methylpseudouridine
  modified_base 1006: mod_base = OTHER; note = N1-methylpseudouridine
  modified_base 1009: mod_base = OTHER; note = N1-methylpseudouridine
  modified_base 1018: mod_base = OTHER; note = N1-methylpseudouridine
  modified_base 1023: mod_base = OTHER; note = N1-methylpseudouridine
  modified_base 1028: mod_base = OTHER; note = N1-methylpseudouridine
  modified_base 1035: mod_base = OTHER; note = N1-methylpseudouridine
  modified_base 1045: mod_base = OTHER; note = N1-methylpseudouridine
  modified_base 1047: mod_base = OTHER; note = N1-methylpseudouridine
  modified_base 1052: mod_base = OTHER; note = N1-methylpseudouridine
  modified_base 1054: mod_base = OTHER; note = N1-methylpseudouridine
  modified_base 1066: mod_base = OTHER; note = N1-methylpseudouridine
  modified_base 1069: mod_base = OTHER; note = N1-methylpseudouridine
  modified_base 1079: mod_base = OTHER; note = N1-methylpseudouridine
  modified_base 1092: mod_base = OTHER; note = N1-methylpseudouridine
  modified_base 1093: mod_base = OTHER; note = N1-methylpseudouridine
  modified_base 1099: mod_base = OTHER; note = N1-methylpseudouridine
  modified_base 1102: mod_base = OTHER; note = N1-methylpseudouridine
  modified_base 1104: mod_base = OTHER; note = N1-methylpseudouridine
  modified_base 1108: mod_base = OTHER; note = N1-methylpseudouridine
  modified_base 1109: mod_base = OTHER; note = N1-methylpseudouridine
  modified_base 1114: mod_base = OTHER; note = N1-methylpseudouridine
  modified_base 1123: mod_base = OTHER; note = N1-methylpseudouridine
  modified_base 1126: mod_base = OTHER; note = N1-methylpseudouridine
  modified_base 1131: mod_base = OTHER; note = N1-methylpseudouridine
  modified_base 1132: mod_base = OTHER; note = N1-methylpseudouridine
  modified_base 1143: mod_base = OTHER; note = N1-methylpseudouridine
  modified_base 1144: mod_base = OTHER; note = N1-methylpseudouridine
  modified_base 1147: mod_base = OTHER; note = N1-methylpseudouridine
  modified_base 1150: mod_base = OTHER; note = N1-methylpseudouridine
  modified_base 1162: mod_base = OTHER; note = N1-methylpseudouridine
  modified_base 1175: mod_base = OTHER; note = N1-methylpseudouridine
  modified_base 1176: mod_base = OTHER; note = N1-methylpseudouridine
  modified_base 1183: mod_base = OTHER; note = N1-methylpseudouridine
  modified_base 1187: mod_base = OTHER; note = N1-methylpseudouridine
  modified_base 1192: mod_base = OTHER; note = N1-methylpseudouridine
  modified_base 1194: mod_base = OTHER; note = N1-methylpseudouridine
  modified_base 1195: mod_base = OTHER; note = N1-methylpseudouridine
  modified_base 1198: mod_base = OTHER; note = N1-methylpseudouridine
  modified_base 1204: mod_base = OTHER; note = N1-methylpseudouridine
  modified_base 1207: mod_base = OTHER; note = N1-methylpseudouridine
  modified_base 1214: mod_base = OTHER; note = N1-methylpseudouridine
  modified_base 1215: mod_base = OTHER; note = N1-methylpseudouridine
  modified_base 1225: mod_base = OTHER; note = N1-methylpseudouridine
  modified_base 1227: mod_base = OTHER; note = N1-methylpseudouridine
  modified_base 1228: mod_base = OTHER; note = N1-methylpseudouridine
  modified_base 1229: mod_base = OTHER; note = N1-methylpseudouridine
  modified_base 1243: mod_base = OTHER; note = N1-methylpseudouridine
  modified_base 1250: mod_base = OTHER; note = N1-methylpseudouridine
  modified_base 1251: mod_base = OTHER; note = N1-methylpseudouridine
  modified_base 1258: mod_base = OTHER; note = N1-methylpseudouridine
  modified_base 1273: mod_base = OTHER; note = N1-methylpseudouridine
  modified_base 1274: mod_base = OTHER; note = N1-methylpseudouridine
  modified_base 1276: mod_base = OTHER; note = N1-methylpseudouridine
  modified_base 1288: mod_base = OTHER; note = N1-methylpseudouridine
  modified_base 1290: mod_base = OTHER; note = N1-methylpseudouridine
  modified_base 1296: mod_base = OTHER; note = N1-methylpseudouridine
  modified_base 1305: mod_base = OTHER; note = N1-methylpseudouridine
  modified_base 1306: mod_base = OTHER; note = N1-methylpseudouridine
  modified_base 1315: mod_base = OTHER; note = N1-methylpseudouridine
  modified_base 1318: mod_base = OTHER; note = N1-methylpseudouridine
  modified_base 1319: mod_base = OTHER; note = N1-methylpseudouridine
  modified_base 1327: mod_base = OTHER; note = N1-methylpseudouridine
  modified_base 1331: mod_base = OTHER; note = N1-methylpseudouridine
  modified_base 1346: mod_base = OTHER; note = N1-methylpseudouridine
  modified_base 1351: mod_base = OTHER; note = N1-methylpseudouridine
  modified_base 1353: mod_base = OTHER; note = N1-methylpseudouridine
  modified_base 1354: mod_base = OTHER; note = N1-methylpseudouridine
  modified_base 1363: mod_base = OTHER; note = N1-methylpseudouridine
  modified_base 1366: mod_base = OTHER; note = N1-methylpseudouridine
  modified_base 1372: mod_base = OTHER; note = N1-methylpseudouridine
  modified_base 1374: mod_base = OTHER; note = N1-methylpseudouridine
  modified_base 1378: mod_base = OTHER; note = N1-methylpseudouridine
  modified_base 1382: mod_base = OTHER; note = N1-methylpseudouridine
  modified_base 1384: mod_base = OTHER; note = N1-methylpseudouridine
  modified_base 1395: mod_base = OTHER; note = N1-methylpseudouridine
  modified_base 1396: mod_base = OTHER; note = N1-methylpseudouridine
  modified_base 1397: mod_base = OTHER; note = N1-methylpseudouridine
  modified_base 1407: mod_base = OTHER; note = N1-methylpseudouridine
  modified_base 1408: mod_base = OTHER; note = N1-methylpseudouridine
  modified_base 1414: mod_base = OTHER; note = N1-methylpseudouridine
  modified_base 1418: mod_base = OTHER; note = N1-methylpseudouridine
  modified_base 1432: mod_base = OTHER; note = N1-methylpseudouridine
  modified_base 1438: mod_base = OTHER; note = N1-methylpseudouridine
  modified_base 1440: mod_base = OTHER; note = N1-methylpseudouridine
  modified_base 1452: mod_base = OTHER; note = N1-methylpseudouridine
  modified_base 1457: mod_base = OTHER; note = N1-methylpseudouridine
  modified_base 1460: mod_base = OTHER; note = N1-methylpseudouridine
  modified_base 1465: mod_base = OTHER; note = N1-methylpseudouridine
  modified_base 1469: mod_base = OTHER; note = N1-methylpseudouridine
  modified_base 1472: mod_base = OTHER; note = N1-methylpseudouridine
  modified_base 1474: mod_base = OTHER; note = N1-methylpseudouridine
  modified_base 1477: mod_base = OTHER; note = N1-methylpseudouridine
  modified_base 1486: mod_base = OTHER; note = N1-methylpseudouridine
  modified_base 1497: mod_base = OTHER; note = N1-methylpseudouridine
  modified_base 1499: mod_base = OTHER; note = N1-methylpseudouridine
  modified_base 1507: mod_base = OTHER; note = N1-methylpseudouridine
  modified_base 1509: mod_base = OTHER; note = N1-methylpseudouridine
  modified_base 1510: mod_base = OTHER; note = N1-methylpseudouridine
  modified_base 1511: mod_base = OTHER; note = N1-methylpseudouridine
  modified_base 1513: mod_base = OTHER; note = N1-methylpseudouridine
  modified_base 1526: mod_base = OTHER; note = N1-methylpseudouridine
  modified_base 1528: mod_base = OTHER; note = N1-methylpseudouridine
  modified_base 1530: mod_base = OTHER; note = N1-methylpseudouridine
  modified_base 1540: mod_base = OTHER; note = N1-methylpseudouridine
  modified_base 1543: mod_base = OTHER; note = N1-methylpseudouridine
  modified_base 1546: mod_base = OTHER; note = N1-methylpseudouridine
  modified_base 1553: mod_base = OTHER; note = N1-methylpseudouridine
  modified_base 1555: mod_base = OTHER; note = N1-methylpseudouridine
  modified_base 1558: mod_base = OTHER; note = N1-methylpseudouridine
  modified_base 1564: mod_base = OTHER; note = N1-methylpseudouridine
  modified_base 1571: mod_base = OTHER; note = N1-methylpseudouridine
  modified_base 1576: mod_base = OTHER; note = N1-methylpseudouridine
  modified_base 1591: mod_base = OTHER; note = N1-methylpseudouridine
  modified_base 1598: mod_base = OTHER; note = N1-methylpseudouridine
  modified_base 1603: mod_base = OTHER; note = N1-methylpseudouridine
  modified_base 1606: mod_base = OTHER; note = N1-methylpseudouridine
  modified_base 1607: mod_base = OTHER; note = N1-methylpseudouridine
  modified_base 1614: mod_base = OTHER; note = N1-methylpseudouridine
  modified_base 1628: mod_base = OTHER; note = N1-methylpseudouridine
  modified_base 1636: mod_base = OTHER; note = N1-methylpseudouridine
  modified_base 1642: mod_base = OTHER; note = N1-methylpseudouridine
  modified_base 1645: mod_base = OTHER; note = N1-methylpseudouridine
  modified_base 1652: mod_base = OTHER; note = N1-methylpseudouridine
  modified_base 1654: mod_base = OTHER; note = N1-methylpseudouridine
  modified_base 1655: mod_base = OTHER; note = N1-methylpseudouridine
  modified_base 1657: mod_base = OTHER; note = N1-methylpseudouridine
  modified_base 1669: mod_base = OTHER; note = N1-methylpseudouridine
  modified_base 1680: mod_base = OTHER; note = N1-methylpseudouridine
  modified_base 1690: mod_base = OTHER; note = N1-methylpseudouridine
  modified_base 1692: mod_base = OTHER; note = N1-methylpseudouridine
  modified_base 1693: mod_base = OTHER; note = N1-methylpseudouridine
  modified_base 1695: mod_base = OTHER; note = N1-methylpseudouridine
  modified_base 1696: mod_base = OTHER; note = N1-methylpseudouridine
  modified_base 1704: mod_base = OTHER; note = N1-methylpseudouridine
  modified_base 1712: mod_base = OTHER; note = N1-methylpseudouridine
  modified_base 1715: mod_base = OTHER; note = N1-methylpseudouridine
  modified_base 1716: mod_base = OTHER; note = N1-methylpseudouridine
  modified_base 1725: mod_base = OTHER; note = N1-methylpseudouridine
  modified_base 1729: mod_base = OTHER; note = N1-methylpseudouridine
  modified_base 1730: mod_base = OTHER; note = N1-methylpseudouridine
  modified_base 1743: mod_base = OTHER; note = N1-methylpseudouridine
  modified_base 1755: mod_base = OTHER; note = N1-methylpseudouridine
  modified_base 1756: mod_base = OTHER; note = N1-methylpseudouridine
  modified_base 1758: mod_base = OTHER; note = N1-methylpseudouridine
  modified_base 1764: mod_base = OTHER; note = N1-methylpseudouridine
  modified_base 1765: mod_base = OTHER; note = N1-methylpseudouridine
  modified_base 1768: mod_base = OTHER; note = N1-methylpseudouridine
  modified_base 1769: mod_base = OTHER; note = N1-methylpseudouridine
  modified_base 1777: mod_base = OTHER; note = N1-methylpseudouridine
  modified_base 1780: mod_base = OTHER; note = N1-methylpseudouridine
  modified_base 1789: mod_base = OTHER; note = N1-methylpseudouridine
  modified_base 1807: mod_base = OTHER; note = N1-methylpseudouridine
  modified_base 1810: mod_base = OTHER; note = N1-methylpseudouridine
  modified_base 1813: mod_base = OTHER; note = N1-methylpseudouridine
  modified_base 1819: mod_base = OTHER; note = N1-methylpseudouridine
  modified_base 1832: mod_base = OTHER; note = N1-methylpseudouridine
  modified_base 1834: mod_base = OTHER; note = N1-methylpseudouridine
  modified_base 1837: mod_base = OTHER; note = N1-methylpseudouridine
  modified_base 1853: mod_base = OTHER; note = N1-methylpseudouridine
  modified_base 1854: mod_base = OTHER; note = N1-methylpseudouridine
  modified_base 1855: mod_base = OTHER; note = N1-methylpseudouridine
  modified_base 1866: mod_base = OTHER; note = N1-methylpseudouridine
  modified_base 1870: mod_base = OTHER; note = N1-methylpseudouridine
  modified_base 1877: mod_base = OTHER; note = N1-methylpseudouridine
  modified_base 1882: mod_base = OTHER; note = N1-methylpseudouridine
  modified_base 1883: mod_base = OTHER; note = N1-methylpseudouridine
  modified_base 1888: mod_base = OTHER; note = N1-methylpseudouridine
  modified_base 1897: mod_base = OTHER; note = N1-methylpseudouridine
  modified_base 1906: mod_base = OTHER; note = N1-methylpseudouridine
  modified_base 1909: mod_base = OTHER; note = N1-methylpseudouridine
  modified_base 1925: mod_base = OTHER; note = N1-methylpseudouridine
  modified_base 1926: mod_base = OTHER; note = N1-methylpseudouridine
  modified_base 1927: mod_base = OTHER; note = N1-methylpseudouridine
  modified_base 1929: mod_base = OTHER; note = N1-methylpseudouridine
  modified_base 1935: mod_base = OTHER; note = N1-methylpseudouridine
  modified_base 1936: mod_base = OTHER; note = N1-methylpseudouridine
  modified_base 1939: mod_base = OTHER; note = N1-methylpseudouridine
  modified_base 1960: mod_base = OTHER; note = N1-methylpseudouridine
  modified_base 1969: mod_base = OTHER; note = N1-methylpseudouridine
  modified_base 1972: mod_base = OTHER; note = N1-methylpseudouridine
  modified_base 1977: mod_base = OTHER; note = N1-methylpseudouridine
  modified_base 1978: mod_base = OTHER; note = N1-methylpseudouridine
  modified_base 1984: mod_base = OTHER; note = N1-methylpseudouridine
  modified_base 1985: mod_base = OTHER; note = N1-methylpseudouridine
  modified_base 1989: mod_base = OTHER; note = N1-methylpseudouridine
  modified_base 1992: mod_base = OTHER; note = N1-methylpseudouridine
  modified_base 1996: mod_base = OTHER; note = N1-methylpseudouridine
  modified_base 2005: mod_base = OTHER; note = N1-methylpseudouridine
  modified_base 2019: mod_base = OTHER; note = N1-methylpseudouridine
  modified_base 2025: mod_base = OTHER; note = N1-methylpseudouridine
  modified_base 2026: mod_base = OTHER; note = N1-methylpseudouridine
  modified_base 2031: mod_base = OTHER; note = N1-methylpseudouridine
  modified_base 2035: mod_base = OTHER; note = N1-methylpseudouridine
  modified_base 2046: mod_base = OTHER; note = N1-methylpseudouridine
  modified_base 2059: mod_base = OTHER; note = N1-methylpseudouridine
  modified_base 2060: mod_base = OTHER; note = N1-methylpseudouridine
  modified_base 2063: mod_base = OTHER; note = N1-methylpseudouridine
  modified_base 2067: mod_base = OTHER; note = N1-methylpseudouridine
  modified_base 2073: mod_base = OTHER; note = N1-methylpseudouridine
  modified_base 2074: mod_base = OTHER; note = N1-methylpseudouridine
  modified_base 2083: mod_base = OTHER; note = N1-methylpseudouridine
  modified_base 2086: mod_base = OTHER; note = N1-methylpseudouridine
  modified_base 2100: mod_base = OTHER; note = N1-methylpseudouridine
  modified_base 2109: mod_base = OTHER; note = N1-methylpseudouridine
  modified_base 2112: mod_base = OTHER; note = N1-methylpseudouridine
  modified_base 2113: mod_base = OTHER; note = N1-methylpseudouridine
  modified_base 2116: mod_base = OTHER; note = N1-methylpseudouridine
  modified_base 2125: mod_base = OTHER; note = N1-methylpseudouridine
  modified_base 2133: mod_base = OTHER; note = N1-methylpseudouridine
  modified_base 2134: mod_base = OTHER; note = N1-methylpseudouridine
  modified_base 2145: mod_base = OTHER; note = N1-methylpseudouridine
  modified_base 2146: mod_base = OTHER; note = N1-methylpseudouridine
  modified_base 2150: mod_base = OTHER; note = N1-methylpseudouridine
  modified_base 2161: mod_base = OTHER; note = N1-methylpseudouridine
  modified_base 2164: mod_base = OTHER; note = N1-methylpseudouridine
  modified_base 2165: mod_base = OTHER; note = N1-methylpseudouridine
  modified_base 2168: mod_base = OTHER; note = N1-methylpseudouridine
  modified_base 2174: mod_base = OTHER; note = N1-methylpseudouridine
  modified_base 2175: mod_base = OTHER; note = N1-methylpseudouridine
  modified_base 2179: mod_base = OTHER; note = N1-methylpseudouridine
  modified_base 2182: mod_base = OTHER; note = N1-methylpseudouridine
  modified_base 2183: mod_base = OTHER; note = N1-methylpseudouridine
  modified_base 2184: mod_base = OTHER; note = N1-methylpseudouridine
  modified_base 2190: mod_base = OTHER; note = N1-methylpseudouridine
  modified_base 2193: mod_base = OTHER; note = N1-methylpseudouridine
  modified_base 2194: mod_base = OTHER; note = N1-methylpseudouridine
  modified_base 2198: mod_base = OTHER; note = N1-methylpseudouridine
  modified_base 2200: mod_base = OTHER; note = N1-methylpseudouridine
  modified_base 2202: mod_base = OTHER; note = N1-methylpseudouridine
  modified_base 2212: mod_base = OTHER; note = N1-methylpseudouridine
  modified_base 2213: mod_base = OTHER; note = N1-methylpseudouridine
  modified_base 2221: mod_base = OTHER; note = N1-methylpseudouridine
  modified_base 2226: mod_base = OTHER; note = N1-methylpseudouridine
  modified_base 2228: mod_base = OTHER; note = N1-methylpseudouridine
  modified_base 2230: mod_base = OTHER; note = N1-methylpseudouridine
  modified_base 2242: mod_base = OTHER; note = N1-methylpseudouridine
  modified_base 2256: mod_base = OTHER; note = N1-methylpseudouridine
  modified_base 2257: mod_base = OTHER; note = N1-methylpseudouridine
  modified_base 2258: mod_base = OTHER; note = N1-methylpseudouridine
  modified_base 2260: mod_base = OTHER; note = N1-methylpseudouridine
  modified_base 2261: mod_base = OTHER; note = N1-methylpseudouridine
  modified_base 2262: mod_base = OTHER; note = N1-methylpseudouridine
  modified_base 2284: mod_base = OTHER; note = N1-methylpseudouridine
  modified_base 2287: mod_base = OTHER; note = N1-methylpseudouridine
  modified_base 2293: mod_base = OTHER; note = N1-methylpseudouridine
  modified_base 2295: mod_base = OTHER; note = N1-methylpseudouridine
  modified_base 2296: mod_base = OTHER; note = N1-methylpseudouridine
  modified_base 2298: mod_base = OTHER; note = N1-methylpseudouridine
  modified_base 2299: mod_base = OTHER; note = N1-methylpseudouridine
  modified_base 2317: mod_base = OTHER; note = N1-methylpseudouridine
  modified_base 2323: mod_base = OTHER; note = N1-methylpseudouridine
  modified_base 2332: mod_base = OTHER; note = N1-methylpseudouridine
  modified_base 2343: mod_base = OTHER; note = N1-methylpseudouridine
  modified_base 2346: mod_base = OTHER; note = N1-methylpseudouridine
  modified_base 2347: mod_base = OTHER; note = N1-methylpseudouridine
  modified_base 2348: mod_base = OTHER; note = N1-methylpseudouridine
  modified_base 2356: mod_base = OTHER; note = N1-methylpseudouridine
  modified_base 2361: mod_base = OTHER; note = N1-methylpseudouridine
  modified_base 2364: mod_base = OTHER; note = N1-methylpseudouridine
  modified_base 2365: mod_base = OTHER; note = N1-methylpseudouridine
  modified_base 2366: mod_base = OTHER; note = N1-methylpseudouridine
  modified_base 2369: mod_base = OTHER; note = N1-methylpseudouridine
  modified_base 2370: mod_base = OTHER; note = N1-methylpseudouridine
  modified_base 2374: mod_base = OTHER; note = N1-methylpseudouridine
  modified_base 2380: mod_base = OTHER; note = N1-methylpseudouridine
  modified_base 2382: mod_base = OTHER; note = N1-methylpseudouridine
  modified_base 2389: mod_base = OTHER; note = N1-methylpseudouridine
  modified_base 2396: mod_base = OTHER; note = N1-methylpseudouridine
  modified_base 2400: mod_base = OTHER; note = N1-methylpseudouridine
  modified_base 2401: mod_base = OTHER; note = N1-methylpseudouridine
  modified_base 2413: mod_base = OTHER; note = N1-methylpseudouridine
  modified_base 2421: mod_base = OTHER; note = N1-methylpseudouridine
  modified_base 2429: mod_base = OTHER; note = N1-methylpseudouridine
  modified_base 2431: mod_base = OTHER; note = N1-methylpseudouridine
  modified_base 2434: mod_base = OTHER; note = N1-methylpseudouridine
  modified_base 2440: mod_base = OTHER; note = N1-methylpseudouridine
  modified_base 2443: mod_base = OTHER; note = N1-methylpseudouridine
  modified_base 2444: mod_base = OTHER; note = N1-methylpseudouridine
  modified_base 2450: mod_base = OTHER; note = N1-methylpseudouridine
  modified_base 2456: mod_base = OTHER; note = N1-methylpseudouridine
  modified_base 2457: mod_base = OTHER; note = N1-methylpseudouridine
  modified_base 2458: mod_base = OTHER; note = N1-methylpseudouridine
  modified_base 2461: mod_base = OTHER; note = N1-methylpseudouridine
  modified_base 2483: mod_base = OTHER; note = N1-methylpseudouridine
  modified_base 2485: mod_base = OTHER; note = N1-methylpseudouridine
  modified_base 2488: mod_base = OTHER; note = N1-methylpseudouridine
  modified_base 2497: mod_base = OTHER; note = N1-methylpseudouridine
  modified_base 2498: mod_base = OTHER; note = N1-methylpseudouridine
  modified_base 2500: mod_base = OTHER; note = N1-methylpseudouridine
  modified_base 2503: mod_base = OTHER; note = N1-methylpseudouridine
  modified_base 2509: mod_base = OTHER; note = N1-methylpseudouridine
  modified_base 2515: mod_base = OTHER; note = N1-methylpseudouridine
  modified_base 2517: mod_base = OTHER; note = N1-methylpseudouridine
  modified_base 2518: mod_base = OTHER; note = N1-methylpseudouridine
  modified_base 2525: mod_base = OTHER; note = N1-methylpseudouridine
  modified_base 2533: mod_base = OTHER; note = N1-methylpseudouridine
  modified_base 2536: mod_base = OTHER; note = N1-methylpseudouridine
  modified_base 2548: mod_base = OTHER; note = N1-methylpseudouridine
  modified_base 2556: mod_base = OTHER; note = N1-methylpseudouridine
  modified_base 2566: mod_base = OTHER; note = N1-methylpseudouridine
  modified_base 2568: mod_base = OTHER; note = N1-methylpseudouridine
  modified_base 2569: mod_base = OTHER; note = N1-methylpseudouridine
  modified_base 2581: mod_base = OTHER; note = N1-methylpseudouridine
  modified_base 2584: mod_base = OTHER; note = N1-methylpseudouridine
  modified_base 2593: mod_base = OTHER; note = N1-methylpseudouridine
  modified_base 2607: mod_base = OTHER; note = N1-methylpseudouridine
  modified_base 2616: mod_base = OTHER; note = N1-methylpseudouridine
  modified_base 2626: mod_base = OTHER; note = N1-methylpseudouridine
  modified_base 2628: mod_base = OTHER; note = N1-methylpseudouridine
  modified_base 2638: mod_base = OTHER; note = N1-methylpseudouridine
  modified_base 2641: mod_base = OTHER; note = N1-methylpseudouridine
  modified_base 2650: mod_base = OTHER; note = N1-methylpseudouridine
  modified_base 2651: mod_base = OTHER; note = N1-methylpseudouridine
  modified_base 2664: mod_base = OTHER; note = N1-methylpseudouridine
  modified_base 2677: mod_base = OTHER; note = N1-methylpseudouridine
  modified_base 2678: mod_base = OTHER; note = N1-methylpseudouridine
  modified_base 2680: mod_base = OTHER; note = N1-methylpseudouridine
  modified_base 2685: mod_base = OTHER; note = N1-methylpseudouridine
  modified_base 2686: mod_base = OTHER; note = N1-methylpseudouridine
  modified_base 2689: mod_base = OTHER; note = N1-methylpseudouridine
  modified_base 2694: mod_base = OTHER; note = N1-methylpseudouridine
  modified_base 2703: mod_base = OTHER; note = N1-methylpseudouridine
  modified_base 2704: mod_base = OTHER; note = N1-methylpseudouridine
  modified_base 2718: mod_base = OTHER; note = N1-methylpseudouridine
  modified_base 2719: mod_base = OTHER; note = N1-methylpseudouridine
  modified_base 2722: mod_base = OTHER; note = N1-methylpseudouridine
  modified_base 2728: mod_base = OTHER; note = N1-methylpseudouridine
  modified_base 2731: mod_base = OTHER; note = N1-methylpseudouridine
  modified_base 2742: mod_base = OTHER; note = N1-methylpseudouridine
  modified_base 2746: mod_base = OTHER; note = N1-methylpseudouridine
  modified_base 2751: mod_base = OTHER; note = N1-methylpseudouridine
  modified_base 2752: mod_base = OTHER; note = N1-methylpseudouridine
  modified_base 2764: mod_base = OTHER; note = N1-methylpseudouridine
  modified_base 2765: mod_base = OTHER; note = N1-methylpseudouridine
  modified_base 2779: mod_base = OTHER; note = N1-methylpseudouridine
  modified_base 2781: mod_base = OTHER; note = N1-methylpseudouridine
  modified_base 2795: mod_base = OTHER; note = N1-methylpseudouridine
  modified_base 2796: mod_base = OTHER; note = N1-methylpseudouridine
  modified_base 2800: mod_base = OTHER; note = N1-methylpseudouridine
  modified_base 2812: mod_base = OTHER; note = N1-methylpseudouridine
  modified_base 2819: mod_base = OTHER; note = N1-methylpseudouridine
  modified_base 2821: mod_base = OTHER; note = N1-methylpseudouridine
  modified_base 2825: mod_base = OTHER; note = N1-methylpseudouridine
  modified_base 2831: mod_base = OTHER; note = N1-methylpseudouridine
  modified_base 2839: mod_base = OTHER; note = N1-methylpseudouridine
  modified_base 2851: mod_base = OTHER; note = N1-methylpseudouridine
  modified_base 2854: mod_base = OTHER; note = N1-methylpseudouridine
  modified_base 2863: mod_base = OTHER; note = N1-methylpseudouridine
  modified_base 2869: mod_base = OTHER; note = N1-methylpseudouridine
  modified_base 2872: mod_base = OTHER; note = N1-methylpseudouridine
  modified_base 2881: mod_base = OTHER; note = N1-methylpseudouridine
  modified_base 2884: mod_base = OTHER; note = N1-methylpseudouridine
  modified_base 2890: mod_base = OTHER; note = N1-methylpseudouridine
  modified_base 2893: mod_base = OTHER; note = N1-methylpseudouridine
  modified_base 2909: mod_base = OTHER; note = N1-methylpseudouridine
  modified_base 2917: mod_base = OTHER; note = N1-methylpseudouridine
  modified_base 2920: mod_base = OTHER; note = N1-methylpseudouridine
  modified_base 2923: mod_base = OTHER; note = N1-methylpseudouridine
  modified_base 2929: mod_base = OTHER; note = N1-methylpseudouridine
  modified_base 2983: mod_base = OTHER; note = N1-methylpseudouridine
  modified_base 2992: mod_base = OTHER; note = N1-methylpseudouridine
  modified_base 3004: mod_base = OTHER; note = N1-methylpseudouridine
  modified_base 3013: mod_base = OTHER; note = N1-methylpseudouridine
  modified_base 3014: mod_base = OTHER; note = N1-methylpseudouridine
  modified_base 3025: mod_base = OTHER; note = N1-methylpseudouridine
  modified_base 3028: mod_base = OTHER; note = N1-methylpseudouridine
  modified_base 3043: mod_base = OTHER; note = N1-methylpseudouridine
  modified_base 3053: mod_base = OTHER; note = N1-methylpseudouridine
  modified_base 3058: mod_base = OTHER; note = N1-methylpseudouridine
  modified_base 3059: mod_base = OTHER; note = N1-methylpseudouridine
  modified_base 3073: mod_base = OTHER; note = N1-methylpseudouridine
  modified_base 3075: mod_base = OTHER; note = N1-methylpseudouridine
  modified_base 3079: mod_base = OTHER; note = N1-methylpseudouridine
  modified_base 3081: mod_base = OTHER; note = N1-methylpseudouridine
  modified_base 3084: mod_base = OTHER; note = N1-methylpseudouridine
  modified_base 3086: mod_base = OTHER; note = N1-methylpseudouridine
  modified_base 3088: mod_base = OTHER; note = N1-methylpseudouridine
  modified_base 3104: mod_base = OTHER; note = N1-methylpseudouridine
  modified_base 3106: mod_base = OTHER; note = N1-methylpseudouridine
  modified_base 3108: mod_base = OTHER; note = N1-methylpseudouridine
  modified_base 3112: mod_base = OTHER; note = N1-methylpseudouridine
  modified_base 3123: mod_base = OTHER; note = N1-methylpseudouridine
  modified_base 3124: mod_base = OTHER; note = N1-methylpseudouridine
  modified_base 3130: mod_base = OTHER; note = N1-methylpseudouridine
  modified_base 3134: mod_base = OTHER; note = N1-methylpseudouridine
  modified_base 3139: mod_base = OTHER; note = N1-methylpseudouridine
  modified_base 3141: mod_base = OTHER; note = N1-methylpseudouridine
  modified_base 3147: mod_base = OTHER; note = N1-methylpseudouridine
  modified_base 3152: mod_base = OTHER; note = N1-methylpseudouridine
  modified_base 3154: mod_base = OTHER; note = N1-methylpseudouridine
  modified_base 3158: mod_base = OTHER; note = N1-methylpseudouridine
  modified_base 3163: mod_base = OTHER; note = N1-methylpseudouridine
  modified_base 3164: mod_base = OTHER; note = N1-methylpseudouridine
  modified_base 3166: mod_base = OTHER; note = N1-methylpseudouridine
  modified_base 3177: mod_base = OTHER; note = N1-methylpseudouridine
  modified_base 3178: mod_base = OTHER; note = N1-methylpseudouridine
  modified_base 3179: mod_base = OTHER; note = N1-methylpseudouridine
  modified_base 3181: mod_base = OTHER; note = N1-methylpseudouridine
  modified_base 3191: mod_base = OTHER; note = N1-methylpseudouridine
  modified_base 3192: mod_base = OTHER; note = N1-methylpseudouridine
  modified_base 3196: mod_base = OTHER; note = N1-methylpseudouridine
  modified_base 3197: mod_base = OTHER; note = N1-methylpseudouridine
  modified_base 3200: mod_base = OTHER; note = N1-methylpseudouridine
  modified_base 3208: mod_base = OTHER; note = N1-methylpseudouridine
  modified_base 3211: mod_base = OTHER; note = N1-methylpseudouridine
  modified_base 3219: mod_base = OTHER; note = N1-methylpseudouridine
  modified_base 3245: mod_base = OTHER; note = N1-methylpseudouridine
  modified_base 3250: mod_base = OTHER; note = N1-methylpseudouridine
  modified_base 3265: mod_base = OTHER; note = N1-methylpseudouridine
  modified_base 3268: mod_base = OTHER; note = N1-methylpseudouridine
  modified_base 3277: mod_base = OTHER; note = N1-methylpseudouridine
  modified_base 3284: mod_base = OTHER; note = N1-methylpseudouridine
  modified_base 3285: mod_base = OTHER; note = N1-methylpseudouridine
  modified_base 3288: mod_base = OTHER; note = N1-methylpseudouridine
  modified_base 3298: mod_base = OTHER; note = N1-methylpseudouridine
  modified_base 3300: mod_base = OTHER; note = N1-methylpseudouridine
  modified_base 3301: mod_base = OTHER; note = N1-methylpseudouridine
  modified_base 3313: mod_base = OTHER; note = N1-methylpseudouridine
  modified_base 3316: mod_base = OTHER; note = N1-methylpseudouridine
  modified_base 3330: mod_base = OTHER; note = N1-methylpseudouridine
  modified_base 3331: mod_base = OTHER; note = N1-methylpseudouridine
  modified_base 3340: mod_base = OTHER; note = N1-methylpseudouridine
  modified_base 3362: mod_base = OTHER; note = N1-methylpseudouridine
  modified_base 3364: mod_base = OTHER; note = N1-methylpseudouridine
  modified_base 3365: mod_base = OTHER; note = N1-methylpseudouridine
  modified_base 3366: mod_base = OTHER; note = N1-methylpseudouridine
  modified_base 3373: mod_base = OTHER; note = N1-methylpseudouridine
  modified_base 3387: mod_base = OTHER; note = N1-methylpseudouridine
  modified_base 3388: mod_base = OTHER; note = N1-methylpseudouridine
  modified_base 3389: mod_base = OTHER; note = N1-methylpseudouridine
  modified_base 3391: mod_base = OTHER; note = N1-methylpseudouridine
  modified_base 3403: mod_base = OTHER; note = N1-methylpseudouridine
  modified_base 3406: mod_base = OTHER; note = N1-methylpseudouridine
  modified_base 3421: mod_base = OTHER; note = N1-methylpseudouridine
  modified_base 3425: mod_base = OTHER; note = N1-methylpseudouridine
  modified_base 3433: mod_base = OTHER; note = N1-methylpseudouridine
  modified_base 3442: mod_base = OTHER; note = N1-methylpseudouridine
  modified_base 3445: mod_base = OTHER; note = N1-methylpseudouridine
  modified_base 3450: mod_base = OTHER; note = N1-methylpseudouridine
  modified_base 3452: mod_base = OTHER; note = N1-methylpseudouridine
  modified_base 3457: mod_base = OTHER; note = N1-methylpseudouridine
  modified_base 3461: mod_base = OTHER; note = N1-methylpseudouridine
  modified_base 3468: mod_base = OTHER; note = N1-methylpseudouridine
  modified_base 3487: mod_base = OTHER; note = N1-methylpseudouridine
  modified_base 3490: mod_base = OTHER; note = N1-methylpseudouridine
  modified_base 3491: mod_base = OTHER; note = N1-methylpseudouridine
  modified_base 3499: mod_base = OTHER; note = N1-methylpseudouridine
  modified_base 3505: mod_base = OTHER; note = N1-methylpseudouridine
  modified_base 3508: mod_base = OTHER; note = N1-methylpseudouridine
  modified_base 3509: mod_base = OTHER; note = N1-methylpseudouridine
  modified_base 3514: mod_base = OTHER; note = N1-methylpseudouridine
  modified_base 3519: mod_base = OTHER; note = N1-methylpseudouridine
  modified_base 3526: mod_base = OTHER; note = N1-methylpseudouridine
  modified_base 3529: mod_base = OTHER; note = N1-methylpseudouridine
  modified_base 3531: mod_base = OTHER; note = N1-methylpseudouridine
  modified_base 3537: mod_base = OTHER; note = N1-methylpseudouridine
  modified_base 3538: mod_base = OTHER; note = N1-methylpseudouridine
  modified_base 3549: mod_base = OTHER; note = N1-methylpseudouridine
  modified_base 3550: mod_base = OTHER; note = N1-methylpseudouridine
  modified_base 3555: mod_base = OTHER; note = N1-methylpseudouridine
  modified_base 3556: mod_base = OTHER; note = N1-methylpseudouridine
  modified_base 3558: mod_base = OTHER; note = N1-methylpseudouridine
  modified_base 3560: mod_base = OTHER; note = N1-methylpseudouridine
  modified_base 3565: mod_base = OTHER; note = N1-methylpseudouridine
  modified_base 3566: mod_base = OTHER; note = N1-methylpseudouridine
  modified_base 3574: mod_base = OTHER; note = N1-methylpseudouridine
  modified_base 3582: mod_base = OTHER; note = N1-methylpseudouridine
  modified_base 3596: mod_base = OTHER; note = N1-methylpseudouridine
  modified_base 3603: mod_base = OTHER; note = N1-methylpseudouridine
  modified_base 3607: mod_base = OTHER; note = N1-methylpseudouridine
  modified_base 3616: mod_base = OTHER; note = N1-methylpseudouridine
  modified_base 3619: mod_base = OTHER; note = N1-methylpseudouridine
  modified_base 3623: mod_base = OTHER; note = N1-methylpseudouridine
  modified_base 3631: mod_base = OTHER; note = N1-methylpseudouridine
  modified_base 3634: mod_base = OTHER; note = N1-methylpseudouridine
  modified_base 3635: mod_base = OTHER; note = N1-methylpseudouridine
  modified_base 3642: mod_base = OTHER; note = N1-methylpseudouridine
  modified_base 3647: mod_base = OTHER; note = N1-methylpseudouridine
  modified_base 3652: mod_base = OTHER; note = N1-methylpseudouridine
  modified_base 3657: mod_base = OTHER; note = N1-methylpseudouridine
  modified_base 3663: mod_base = OTHER; note = N1-methylpseudouridine
  modified_base 3664: mod_base = OTHER; note = N1-methylpseudouridine
  modified_base 3667: mod_base = OTHER; note = N1-methylpseudouridine
  modified_base 3669: mod_base = OTHER; note = N1-methylpseudouridine
  modified_base 3678: mod_base = OTHER; note = N1-methylpseudouridine
  modified_base 3685: mod_base = OTHER; note = N1-methylpseudouridine
  modified_base 3687: mod_base = OTHER; note = N1-methylpseudouridine
  modified_base 3694: mod_base = OTHER; note = N1-methylpseudouridine
  modified_base 3703: mod_base = OTHER; note = N1-methylpseudouridine
  modified_base 3706: mod_base = OTHER; note = N1-methylpseudouridine
  modified_base 3714: mod_base = OTHER; note = N1-methylpseudouridine
  modified_base 3727: mod_base = OTHER; note = N1-methylpseudouridine
  modified_base 3747: mod_base = OTHER; note = N1-methylpseudouridine
  modified_base 3750: mod_base = OTHER; note = N1-methylpseudouridine
  modified_base 3751: mod_base = OTHER; note = N1-methylpseudouridine
  modified_base 3753: mod_base = OTHER; note = N1-methylpseudouridine
  modified_base 3754: mod_base = OTHER; note = N1-methylpseudouridine
  modified_base 3756: mod_base = OTHER; note = N1-methylpseudouridine
  modified_base 3759: mod_base = OTHER; note = N1-methylpseudouridine
  modified_base 3766: mod_base = OTHER; note = N1-methylpseudouridine
  modified_base 3769: mod_base = OTHER; note = N1-methylpseudouridine
  modified_base 3774: mod_base = OTHER; note = N1-methylpseudouridine
  modified_base 3775: mod_base = OTHER; note = N1-methylpseudouridine
  modified_base 3777: mod_base = OTHER; note = N1-methylpseudouridine
  modified_base 3778: mod_base = OTHER; note = N1-methylpseudouridine
  modified_base 3790: mod_base = OTHER; note = N1-methylpseudouridine
  modified_base 3796: mod_base = OTHER; note = N1-methylpseudouridine
  modified_base 3797: mod_base = OTHER; note = N1-methylpseudouridine
  modified_base 3811: mod_base = OTHER; note = N1-methylpseudouridine
  modified_base 3812: mod_base = OTHER; note = N1-methylpseudouridine
  modified_base 3825: mod_base = OTHER; note = N1-methylpseudouridine
  modified_base 3826: mod_base = OTHER; note = N1-methylpseudouridine
  modified_base 3829: mod_base = OTHER; note = N1-methylpseudouridine
  modified_base 3830: mod_base = OTHER; note = N1-methylpseudouridine
  modified_base 3836: mod_base = OTHER; note = N1-methylpseudouridine
  modified_base 3856: mod_base = OTHER; note = N1-methylpseudouridine
  modified_base 3857: mod_base = OTHER; note = N1-methylpseudouridine
  modified_base 3859: mod_base = OTHER; note = N1-methylpseudouridine
  modified_base 3861: mod_base = OTHER; note = N1-methylpseudouridine
  modified_base 3866: mod_base = OTHER; note = N1-methylpseudouridine
  modified_base 3879: mod_base = OTHER; note = N1-methylpseudouridine
  modified_base 3880: mod_base = OTHER; note = N1-methylpseudouridine
  modified_base 3881: mod_base = OTHER; note = N1-methylpseudouridine
  modified_base 3887: mod_base = OTHER; note = N1-methylpseudouridine
  modified_base 3889: mod_base = OTHER; note = N1-methylpseudouridine
  modified_base 3898: mod_base = OTHER; note = N1-methylpseudouridine
  modified_base 3900: mod_base = OTHER; note = N1-methylpseudouridine
  modified_base 3901: mod_base = OTHER; note = N1-methylpseudouridine
  modified_base 3903: mod_base = OTHER; note = N1-methylpseudouridine
  modified_base 3907: mod_base = OTHER; note = N1-methylpseudouridine
  modified_base 3916: mod_base = OTHER; note = N1-methylpseudouridine
  modified_base 3922: mod_base = OTHER; note = N1-methylpseudouridine
  modified_base 3923: mod_base = OTHER; note = N1-methylpseudouridine
  modified_base 3925: mod_base = OTHER; note = N1-methylpseudouridine
  modified_base 3940: mod_base = OTHER; note = N1-methylpseudouridine
  modified_base 3954: mod_base = OTHER; note = N1-methylpseudouridine
  modified_base 3955: mod_base = OTHER; note = N1-methylpseudouridine
  modified_base 3970: mod_base = OTHER; note = N1-methylpseudouridine
  modified_base 3973: mod_base = OTHER; note = N1-methylpseudouridine
  modified_base 3986: mod_base = OTHER; note = N1-methylpseudouridine
  modified_base 3987: mod_base = OTHER; note = N1-methylpseudouridine
  modified_base 3997: mod_base = OTHER; note = N1-methylpseudouridine
  modified_base 4000: mod_base = OTHER; note = N1-methylpseudouridine
  modified_base 4017: mod_base = OTHER; note = N1-methylpseudouridine
  modified_base 4032: mod_base = OTHER; note = N1-methylpseudouridine
  modified_base 4034: mod_base = OTHER; note = N1-methylpseudouridine
  modified_base 4041: mod_base = OTHER; note = N1-methylpseudouridine
  modified_base 4042: mod_base = OTHER; note = N1-methylpseudouridine
  modified_base 4047: mod_base = OTHER; note = N1-methylpseudouridine
  modified_base 4055: mod_base = OTHER; note = N1-methylpseudouridine
  modified_base 4057: mod_base = OTHER; note = N1-methylpseudouridine
  modified_base 4062: mod_base = OTHER; note = N1-methylpseudouridine
  modified_base 4065: mod_base = OTHER; note = N1-methylpseudouridine
  modified_base 4069: mod_base = OTHER; note = N1-methylpseudouridine
  modified_base 4072: mod_base = OTHER; note = N1-methylpseudouridine
  modified_base 4075: mod_base = OTHER; note = N1-methylpseudouridine
  modified_base 4078: mod_base = OTHER; note = N1-methylpseudouridine
  modified_base 4087: mod_base = OTHER; note = N1-methylpseudouridine
  modified_base 4101: mod_base = OTHER; note = N1-methylpseudouridine
  modified_base 4111: mod_base = OTHER; note = N1-methylpseudouridine
  modified_base 4116: mod_base = OTHER; note = N1-methylpseudouridine
  modified_base 4120: mod_base = OTHER; note = N1-methylpseudouridine
  modified_base 4129: mod_base = OTHER; note = N1-methylpseudouridine
  modified_base 4132: mod_base = OTHER; note = N1-methylpseudouridine
  modified_base 4138: mod_base = OTHER; note = N1-methylpseudouridine
  modified_base 4144: mod_base = OTHER; note = N1-methylpseudouridine
  modified_base 4145: mod_base = OTHER; note = N1-methylpseudouridine
  modified_base 4147: mod_base = OTHER; note = N1-methylpseudouridine
  modified_base 4155: mod_base = OTHER; note = N1-methylpseudouridine
  modified_base 4161: mod_base = OTHER; note = N1-methylpseudouridine
  modified_base 4162: mod_base = OTHER; note = N1-methylpseudouridine
  modified_base 4177: mod_base = OTHER; note = N1-methylpseudouridine
  modified_base 4178: mod_base = OTHER; note = N1-methylpseudouridine
  modified_base 4182: mod_base = OTHER; note = N1-methylpseudouridine
  modified_base 4183: mod_base = OTHER; note = N1-methylpseudouridine
  modified_base 4186: mod_base = OTHER; note = N1-methylpseudouridine
  modified_base 4199: mod_base = OTHER; note = N1-methylpseudouridine
  modified_base 4200: mod_base = OTHER; note = N1-methylpseudouridine
  modified_base 4210: mod_base = OTHER; note = N1-methylpseudouridine
  modified_base 4220: mod_base = OTHER; note = N1-methylpseudouridine
  modified_base 4222: mod_base = OTHER; note = N1-methylpseudouridine
  modified_base 4225: mod_base = OTHER; note = N1-methylpseudouridine
  modified_base 4226: mod_base = OTHER; note = N1-methylpseudouridine
  modified_base 4228: mod_base = OTHER; note = N1-methylpseudouridine
  modified_base 4229: mod_base = OTHER; note = N1-methylpseudouridine
  modified_base 4234: mod_base = OTHER; note = N1-methylpseudouridine
  modified_base 4242: mod_base = OTHER; note = N1-methylpseudouridine
  modified_base 4244: mod_base = OTHER; note = N1-methylpseudouridine
  modified_base 4245: mod_base = OTHER; note = N1-methylpseudouridine
  modified_base 4249: mod_base = OTHER; note = N1-methylpseudouridine
  modified_base 4251: mod_base = OTHER; note = N1-methylpseudouridine
  modified_base 4252: mod_base = OTHER; note = N1-methylpseudouridine
  modified_base 4258: mod_base = OTHER; note = N1-methylpseudouridine
  modified_base 4265: mod_base = OTHER; note = N1-methylpseudouridine
  modified_base 4279: mod_base = OTHER; note = N1-methylpseudouridine
  modified_base 4281: mod_base = OTHER; note = N1-methylpseudouridine
  modified_base 4282: mod_base = OTHER; note = N1-methylpseudouridine
  modified_base 4287: mod_base = OTHER; note = N1-methylpseudouridine
  modified_base 4300: mod_base = OTHER; note = N1-methylpseudouridine
  modified_base 4318: mod_base = OTHER; note = N1-methylpseudouridine
  modified_base 4323: mod_base = OTHER; note = N1-methylpseudouridine
  modified_base 4324: mod_base = OTHER; note = N1-methylpseudouridine
  modified_base 4328: mod_base = OTHER; note = N1-methylpseudouridine
  modified_base 4329: mod_base = OTHER; note = N1-methylpseudouridine
  modified_base 4335: mod_base = OTHER; note = N1-methylpseudouridine
  modified_base 4339: mod_base = OTHER; note = N1-methylpseudouridine
  modified_base 4344: mod_base = OTHER; note = N1-methylpseudouridine
  modified_base 4345: mod_base = OTHER; note = N1-methylpseudouridine
  modified_base 4346: mod_base = OTHER; note = N1-methylpseudouridine
  modified_base 4348: mod_base = OTHER; note = N1-methylpseudouridine
  modified_base 4350: mod_base = OTHER; note = N1-methylpseudouridine
  modified_base 4354: mod_base = OTHER; note = N1-methylpseudouridine
  modified_base 4365: mod_base = OTHER; note = N1-methylpseudouridine
  modified_base 4375: mod_base = OTHER; note = N1-methylpseudouridine
  modified_base 4382: mod_base = OTHER; note = N1-methylpseudouridine
  modified_base 4383: mod_base = OTHER; note = N1-methylpseudouridine
  modified_base 4411: mod_base = OTHER; note = N1-methylpseudouridine
  modified_base 4413: mod_base = OTHER; note = N1-methylpseudouridine
  modified_base 4414: mod_base = OTHER; note = N1-methylpseudouridine
  modified_base 4417: mod_base = OTHER; note = N1-methylpseudouridine
  modified_base 4434: mod_base = OTHER; note = N1-methylpseudouridine
  modified_base 4438: mod_base = OTHER; note = N1-methylpseudouridine
  modified_base 4442: mod_base = OTHER; note = N1-methylpseudouridine
  modified_base 4447: mod_base = OTHER; note = N1-methylpseudouridine
  modified_base 4450: mod_base = OTHER; note = N1-methylpseudouridine
  modified_base 4459: mod_base = OTHER; note = N1-methylpseudouridine
  modified_base 4461: mod_base = OTHER; note = N1-methylpseudouridine
  modified_base 4467: mod_base = OTHER; note = N1-methylpseudouridine
  modified_base 4468: mod_base = OTHER; note = N1-methylpseudouridine
  modified_base 4470: mod_base = OTHER; note = N1-methylpseudouridine
  modified_base 4480: mod_base = OTHER; note = N1-methylpseudouridine
  modified_base 4483: mod_base = OTHER; note = N1-methylpseudouridine
  modified_base 4486: mod_base = OTHER; note = N1-methylpseudouridine
  modified_base 4501: mod_base = OTHER; note = N1-methylpseudouridine
  modified_base 4505: mod_base = OTHER; note = N1-methylpseudouridine
  modified_base 4510: mod_base = OTHER; note = N1-methylpseudouridine
  modified_base 4513: mod_base = OTHER; note = N1-methylpseudouridine
  modified_base 4515: mod_base = OTHER; note = N1-methylpseudouridine
  modified_base 4521: mod_base = OTHER; note = N1-methylpseudouridine
  modified_base 4546: mod_base = OTHER; note = N1-methylpseudouridine
  modified_base 4559: mod_base = OTHER; note = N1-methylpseudouridine
  modified_base 4567: mod_base = OTHER; note = N1-methylpseudouridine
  modified_base 4568: mod_base = OTHER; note = N1-methylpseudouridine
  modified_base 4570: mod_base = OTHER; note = N1-methylpseudouridine
  modified_base 4576: mod_base = OTHER; note = N1-methylpseudouridine
  modified_base 4578: mod_base = OTHER; note = N1-methylpseudouridine
  modified_base 4579: mod_base = OTHER; note = N1-methylpseudouridine
  modified_base 4585: mod_base = OTHER; note = N1-methylpseudouridine
  modified_base 4589: mod_base = OTHER; note = N1-methylpseudouridine
  modified_base 4594: mod_base = OTHER; note = N1-methylpseudouridine
  modified_base 4595: mod_base = OTHER; note = N1-methylpseudouridine
  modified_base 4604: mod_base = OTHER; note = N1-methylpseudouridine
  modified_base 4611: mod_base = OTHER; note = N1-methylpseudouridine
  modified_base 4612: mod_base = OTHER; note = N1-methylpseudouridine
  modified_base 4617: mod_base = OTHER; note = N1-methylpseudouridine
  modified_base 4620: mod_base = OTHER; note = N1-methylpseudouridine
  modified_base 4621: mod_base = OTHER; note = N1-methylpseudouridine
  modified_base 4633: mod_base = OTHER; note = N1-methylpseudouridine
  modified_base 4647: mod_base = OTHER; note = N1-methylpseudouridine
  modified_base 4652: mod_base = OTHER; note = N1-methylpseudouridine
  modified_base 4653: mod_base = OTHER; note = N1-methylpseudouridine
  modified_base 4666: mod_base = OTHER; note = N1-methylpseudouridine
  modified_base 4669: mod_base = OTHER; note = N1-methylpseudouridine
  modified_base 4681: mod_base = OTHER; note = N1-methylpseudouridine
  modified_base 4684: mod_base = OTHER; note = N1-methylpseudouridine
  modified_base 4692: mod_base = OTHER; note = N1-methylpseudouridine
  modified_base 4696: mod_base = OTHER; note = N1-methylpseudouridine
  modified_base 4700: mod_base = OTHER; note = N1-methylpseudouridine
  modified_base 4705: mod_base = OTHER; note = N1-methylpseudouridine
  modified_base 4707: mod_base = OTHER; note = N1-methylpseudouridine
  modified_base 4709: mod_base = OTHER; note = N1-methylpseudouridine
  modified_base 4715: mod_base = OTHER; note = N1-methylpseudouridine
  modified_base 4720: mod_base = OTHER; note = N1-methylpseudouridine
  modified_base 4721: mod_base = OTHER; note = N1-methylpseudouridine
  modified_base 4726: mod_base = OTHER; note = N1-methylpseudouridine
  modified_base 4728: mod_base = OTHER; note = N1-methylpseudouridine
  modified_base 4734: mod_base = OTHER; note = N1-methylpseudouridine
  modified_base 4735: mod_base = OTHER; note = N1-methylpseudouridine
  modified_base 4757: mod_base = OTHER; note = N1-methylpseudouridine
  modified_base 4772: mod_base = OTHER; note = N1-methylpseudouridine
  modified_base 4776: mod_base = OTHER; note = N1-methylpseudouridine
  modified_base 4782: mod_base = OTHER; note = N1-methylpseudouridine
  modified_base 4783: mod_base = OTHER; note = N1-methylpseudouridine
  modified_base 4788: mod_base = OTHER; note = N1-methylpseudouridine
  modified_base 4810: mod_base = OTHER; note = N1-methylpseudouridine
  modified_base 4812: mod_base = OTHER; note = N1-methylpseudouridine
  modified_base 4823: mod_base = OTHER; note = N1-methylpseudouridine
  modified_base 4824: mod_base = OTHER; note = N1-methylpseudouridine
  modified_base 4827: mod_base = OTHER; note = N1-methylpseudouridine
  modified_base 4828: mod_base = OTHER; note = N1-methylpseudouridine
  modified_base 4833: mod_base = OTHER; note = N1-methylpseudouridine
  modified_base 4837: mod_base = OTHER; note = N1-methylpseudouridine
  modified_base 4838: mod_base = OTHER; note = N1-methylpseudouridine
  modified_base 4840: mod_base = OTHER; note = N1-methylpseudouridine
  modified_base 4848: mod_base = OTHER; note = N1-methylpseudouridine
  modified_base 4849: mod_base = OTHER; note = N1-methylpseudouridine
  modified_base 4853: mod_base = OTHER; note = N1-methylpseudouridine
  modified_base 4854: mod_base = OTHER; note = N1-methylpseudouridine
  modified_base 4856: mod_base = OTHER; note = N1-methylpseudouridine
  modified_base 4862: mod_base = OTHER; note = N1-methylpseudouridine
  modified_base 4867: mod_base = OTHER; note = N1-methylpseudouridine
  modified_base 4868: mod_base = OTHER; note = N1-methylpseudouridine
  modified_base 4870: mod_base = OTHER; note = N1-methylpseudouridine
  modified_base 4871: mod_base = OTHER; note = N1-methylpseudouridine
  modified_base 4873: mod_base = OTHER; note = N1-methylpseudouridine
  modified_base 4875: mod_base = OTHER; note = N1-methylpseudouridine
  modified_base 4879: mod_base = OTHER; note = N1-methylpseudouridine
  modified_base 4880: mod_base = OTHER; note = N1-methylpseudouridine
  modified_base 4886: mod_base = OTHER; note = N1-methylpseudouridine
  modified_base 4888: mod_base = OTHER; note = N1-methylpseudouridine
  modified_base 4892: mod_base = OTHER; note = N1-methylpseudouridine
  modified_base 4894: mod_base = OTHER; note = N1-methylpseudouridine
  modified_base 4895: mod_base = OTHER; note = N1-methylpseudouridine
  modified_base 4898: mod_base = OTHER; note = N1-methylpseudouridine
  modified_base 4900: mod_base = OTHER; note = N1-methylpseudouridine
  modified_base 4901: mod_base = OTHER; note = N1-methylpseudouridine
  modified_base 4902: mod_base = OTHER; note = N1-methylpseudouridine
  modified_base 4906: mod_base = OTHER; note = N1-methylpseudouridine
  modified_base 4913: mod_base = OTHER; note = N1-methylpseudouridine
  modified_base 4917: mod_base = OTHER; note = N1-methylpseudouridine
  modified_base 4924: mod_base = OTHER; note = N1-methylpseudouridine
  modified_base 4926: mod_base = OTHER; note = N1-methylpseudouridine
aggaaanaagagagaaaagaagagnaagaagaaananaagagccaccangnccgaagncgaanncagccacgagnacnggangagacangcacngacccncgcgaagagagcncgggangagagggaagngccagngggagcngngcnggngcncaacaacagggncannggggaagganggaacagggccannggacnncacganccgacggcncangcggaaancanggcacngagacagggcggncnngngangcagaacnancgccnganngangccacncngnacgngaccnncgaaccnngcgngangngcgccggngccanganccacncacgcancggncgggnggngnncggcgngcgaaacgcnaagacnggagccgccggancacnganggangngcnccancaccccgggangaaccacagggnggagancaccgaaggcanncnggccgacgaangcgcagcccngnngngncgcnncnnccggangccncgaagagngnncaacgcgcagaagaaggcgcagagcnccacngacncnggaggnnccncgggcggancgncagggnccgaaacnccnggaaccncggagncagcaacnccggaanccncaggaggcnccagcggaggcnccganaagaagnacagcancgggcnngccancggaaccaacncggncggcngggcngngancacngacgagnacaaggncccnnccaaaaagnncaaagngcncggcaacacngancggcacncgannaagaagaaccngancggngcacngcngnncgacncnggggagacngcggaagcaacncgccngaagaggacngcgcgcagacggnacaccaggcgcaagaaccggancngcnacnngcaagagannnncagcaacgaganggccaaggncgacgacncgnnnnnccaccggcncgaggaaagcnnccnggnggaggaaganaagaagcangagcgccancccancnncggaaacancgnggacgaagnggccnaccangagaagnacccgaccancnaccancngcgcaagaagcncgnggacagcacngacaaagccgacnngcgccngancnaccnngcccnggcccacangancaagnncagagggcacnnccngancgagggcgaccngaacccggacaannccgacgngganaagcngnncanccaacnggnacaaacnnacaaccagcngnnngaggagaacccgancaacgcnnccggcgnggacgcgaaggccanncngagcgcacggcngnccaagncccggagannagaaaaccnganngcccaacngccnggagaaaagaagaanggccngnncggaaaccngancgcccncncgcncggncngacccccaacnnnaagagcaacnncgaccnggcngaggacgcgaagcnccagcngnccaaggacaccnacgangangaccncganaancnccncgcccaaancggcgaccaanangcggaccngnnncnggccgccaagaancngnccgacgccanccnccngagcgananccngcgcgngaacacngaaancaccaaggccccacngagcgcnagcangannaagcgcnacgacgaacaccancaggaccncacccngcngaaggcncnngngcggcagcagcncccagagaagnacaaggagancnncnncgaccaancgaagaanggnnacgccggcnacanngacggaggagcgncacaggaggagnncnacaagnncannaagccaanccnggagaaganggacggaaccgaggaacngcncgngaagcngaacagagaagancnacngcgcaagcagcgcacnnncgacaacggancgancccacancaganncaccngggagagcngcacgcganccngcggagacaggaagannncnacccgnnccngaaggacaaccgcgagaagancgaaaaganccngaccnnccgcannccgnacnacgngggaccccncgcaagaggaaacncgcggnncgccnggangaccaggaagncggaagaaaccannacnccgnggaacnncgaggaagnggnggacaagggcgccncagcgcaanccnncancgaacggangaccaacnncgacaagaacnngccnaacgagaaagngcnnccnaagcanncccnccnnnacgaanacnncacngngnacaacgagcnnaccaaggncaaanangngaccgagggcangcgcaagccggccnnncnnnccggggagcaaaagaaggccancgnggaccngnngnncaagaccaaccggaaggncaccgncaagcagcngaaggaggacnacnnnaagaaaancgagngcnnngannccgncgaaancnccggagnggaaganaganncaacgccagccnaggcaccnaccacgancngcncaagancannaagganaaggannnccnggacaacgaggagaacgaggananccnggaggacanngngcngacccngacacngnncgaagancgcgaaangancgaggagcggcngaaaacanacgcccaccngnncgacgacaaggncangaagcagcncaagcggaggaggnacacggganggggaaggcngncccggaagcngancaacgggannagagacaagcagnccggaaagaccanncnggacnnccncaagncggacggcnncgcgaaccggaacnncangcaacnganccacgacgacncccngacgnncaaggaggacanncagaaggcccaagngnccggacagggaganncacngcacgaacacancgccaancnggcnggaagnccggccancaagaaaggcanccngcaaaccgngaaggncgnggacgagcncgngaaggncangggccgccacaagccngagaacancgngancgaaanggcccgggagaaccagaccacgcagaaagggcagaagaacagccgcgagaggangaagagaancgaggaaggaancaaggaacnnggaagccaganccngaaggaacaccccgnggaaaacacncagcnncaaaacgaaaagcngnaccncnacnancngcaaaacggacggganangnacgnggaccaggaannggacancaancgccngnccgacnacgangnggancacanngngccgcagagcnnncngaaggacganncaannganaacaaggngcncacccggnccgacaagaaccggggcaaaagcganaacgngccgagcgaagaggnggncaagaagangaagaannacnggcggcagcncnngaacgccaaacngancacccagcggaagnncgacaaccngaccaaggccgaaaggggcggncnnnccgaacnggacaaggccgggnnnancaagcgccaacnggnggaaacccggcagancacnaagcacgnggcccaganacnggacncnaggangaanaccaaanacgacgagaacgacaagcnganncgcgaagncaaagncannacccngaaanccaagcncgngnccgacnnccggaaggacnnccagnncnanaaggnncgcgaaancaacaacnaccaccacgcccangacgcgnaccngaacgccgncgngggnaccgcccngannaagaagnacccnaagcncgagnccgagnncgncnacggagacnacaaagngnacgacgngcggaagangancgccaagnccgagcaggaaanagggaaggccaccgccaagnacnncnncnacnccaacancangaacnncnncaagaccgagancacccnngccaacggggaganncggaagcgcccgnnganngagacnaacggagaaaccggcgaaanngngnggganaagggcagagacnnngcgacngngcgcaaagncnngncaangccccaagncaacanngncaaaaagaccgaagngcaaaccggcggcnncagcaaggaaagcanccngcccaagcgcaannccgacaagcncancgcccggaagaaggacngggaccccaagaaananggaggcnncgacncccccacngnggccnacnccgnccnggnggncgcgaaagnggaaaagggaaagncgaagaagcncaagnccgngaaggagcnccnggggancaccannanggaacggnccagcnncgagaagaacccganngacnnccnggaagccaagggnnacaaggaggncaagaaggancngannannaagcngccgaagnanncccncnncgaacncgaaaanggccgcaagcgaangnnggcancggcgggagagcnccagaagggaaacgaacnggccnngccnnccaaanacgngaacnnncngnaccnggccagccacnacgagaagcngaagggnncccccgaggacaacgagcagaagcagcngnncgnggagcagcacaagcacnaccnggangagancancgaacagancncggaanncnccaagagagnganccnggccgacgcgaaccngganaaggnccngnccgcgnacaacaagcaccgggacaagcccanccgggagcaggcngagaacannanccaccngnncacccncacnaaccnnggagcgccngccgcanncaagnacnncgacacaaccancgacagaaagcgcnacacnnccaccaaggaggngcnggacgccacccnganccaccagnccancacngggcncnangagacncgcanngaccngncccagnngggaggggacgaaggagccganaagagaaccgccgangggnccgaanncgagncgcccaagaagaagcggaaagngnaagcggccgcnnaannaagcngccnncngcggggcnngccnncnggccangcccnncnncncncccnngcaccngnaccncnnggncnnngaanaaagccngagnaggaagncnaga

SEQ ID NO: 2162 - RNA, 501 nt, synthetic construct
  source 1..501: mol_type = other RNA; note = Description of Artificial Sequence: Synthetic polynucleotide
  modified_base 2: mod_base = OTHER; note = N1-methylpseudouridine
  modified_base 4: mod_base = OTHER; note = N1-methylpseudouridine
  modified_base 11: mod_base = OTHER; note = N1-methylpseudouridine
  modified_base 16: mod_base = OTHER; note = N1-methylpseudouridine
  modified_base 17: mod_base = OTHER; note = N1-methylpseudouridine
  modified_base 28: mod_base = OTHER; note = N1-methylpseudouridine
  modified_base 31: mod_base = OTHER; note = N1-methylpseudouridine
  modified_base 35: mod_base = OTHER; note = N1-methylpseudouridine
  modified_base 42: mod_base = OTHER; note = N1-methylpseudouridine
  modified_base 47: mod_base = OTHER; note = N1-methylpseudouridine
  modified_base 53: mod_base = OTHER; note = N1-methylpseudouridine
  modified_base 66: mod_base = OTHER; note = N1-methylpseudouridine
  modified_base 72: mod_base = OTHER; note = N1-methylpseudouridine
  modified_base 83: mod_base = OTHER; note = N1-methylpseudouridine
  modified_base 89: mod_base = OTHER; note = N1-methylpseudouridine
  modified_base 96: mod_base = OTHER; note = N1-methylpseudouridine
  modified_base 98: mod_base = OTHER; note = N1-methylpseudouridine
  modified_base 101: mod_base = OTHER; note = N1-methylpseudouridine
  modified_base 104: mod_base = OTHER; note = N1-methylpseudouridine
  modified_base 107: mod_base = OTHER; note = N1-methylpseudouridine
  modified_base 119: mod_base = OTHER; note = N1-methylpseudouridine
  modified_base 122: mod_base = OTHER; note = N1-methylpseudouridine
  modified_base 123: mod_base = OTHER; note = N1-methylpseudouridine
  modified_base 133: mod_base = OTHER; note = N1-methylpseudouridine
  modified_base 146: mod_base = OTHER; note = N1-methylpseudouridine
  modified_base 147: mod_base = OTHER; note = N1-methylpseudouridine
  modified_base 152: mod_base = OTHER; note = N1-methylpseudouridine
  modified_base 153: mod_base = OTHER; note = N1-methylpseudouridine
  modified_base 159: mod_base = OTHER; note = N1-methylpseudouridine
  modified_base 168: mod_base = OTHER; note = N1-methylpseudouridine
  modified_base 171: mod_base = OTHER; note = N1-methylpseudouridine
  modified_base 179: mod_base = OTHER; note = N1-methylpseudouridine
  modified_base 182: mod_base = OTHER; note = N1-methylpseudouridine
  modified_base 188: mod_base = OTHER; note = N1-methylpseudouridine
  modified_base 201: mod_base = OTHER; note = N1-methylpseudouridine
  modified_base 203: mod_base = OTHER; note = N1-methylpseudouridine
  modified_base 204: mod_base = OTHER; note = N1-methylpseudouridine
  modified_base 206: mod_base = OTHER; note = N1-methylpseudouridine
  modified_base 209: mod_base = OTHER; note = N1-methylpseudouridine
  modified_base 217: mod_base = OTHER; note = N1-methylpseudouridine
  modified_base 219: mod_base = OTHER; note = N1-methylpseudouridine
  modified_base 224: mod_base = OTHER; note = N1-methylpseudouridine
  modified_base 227: mod_base = OTHER; note = N1-methylpseudouridine
  modified_base 228: mod_base = OTHER; note = N1-methylpseudouridine
  modified_base 231: mod_base = OTHER; note = N1-methylpseudouridine
  modified_base 237: mod_base = OTHER; note = N1-methylpseudouridine
  modified_base 239: mod_base = OTHER; note = N1-methylpseudouridine
  modified_base 241: mod_base = OTHER; note = N1-methylpseudouridine
  modified_base 245: mod_base = OTHER; note = N1-methylpseudouridine
  modified_base 250: mod_base = OTHER; note = N1-methylpseudouridine
  modified_base 251: mod_base = OTHER; note = N1-methylpseudouridine
  modified_base 258: mod_base = OTHER; note = N1-methylpseudouridine
  modified_base 259: mod_base = OTHER; note = N1-methylpseudouridine
  modified_base 263: mod_base = OTHER; note = N1-methylpseudouridine
  modified_base 266: mod_base = OTHER; note = N1-methylpseudouridine
  modified_base 268: mod_base = OTHER; note = N1-methylpseudouridine
  modified_base 276: mod_base = OTHER; note = N1-methylpseudouridine
  modified_base 281: mod_base = OTHER; note = N1-methylpseudouridine
  modified_base 284: mod_base = OTHER; note = N1-methylpseudouridine
  modified_base 289: mod_base = OTHER; note = N1-methylpseudouridine
  modified_base 296: mod_base = OTHER; note = N1-methylpseudouridine
  modified_base 300: mod_base = OTHER; note = N1-methylpseudouridine
  modified_base 305: mod_base = OTHER; note = N1-methylpseudouridine
  modified_base 308: mod_base = OTHER; note = N1-methylpseudouridine
  modified_base 310: mod_base = OTHER; note = N1-methylpseudouridine
  modified_base 311: mod_base = OTHER; note = N1-methylpseudouridine
  modified_base 317: mod_base = OTHER; note = N1-methylpseudouridine
  modified_base 327: mod_base = OTHER; note = N1-methylpseudouridine
  modified_base 333: mod_base = OTHER; note = N1-methylpseudouridine
  modified_base 346: mod_base = OTHER; note = N1-methylpseudouridine
  modified_base 350: mod_base = OTHER; note = N1-methylpseudouridine
  modified_base 353: mod_base = OTHER; note = N1-methylpseudouridine
  modified_base 357: mod_base = OTHER; note = N1-methylpseudouridine
  modified_base 359: mod_base = OTHER; note = N1-methylpseudouridine
  modified_base 362: mod_base = OTHER; note = N1-methylpseudouridine
  modified_base 366: mod_base = OTHER; note = N1-methylpseudouridine
  modified_base 377: mod_base = OTHER; note = N1-methylpseudouridine
  modified_base 389: mod_base = OTHER; note = N1-methylpseudouridine
  modified_base 395: mod_base = OTHER; note = N1-methylpseudouridine
  modified_base 407: mod_base = OTHER; note = N1-methylpseudouridine
  modified_base 408: mod_base = OTHER; note = N1-methylpseudouridine
  modified_base 410: mod_base = OTHER; note = N1-methylpseudouridine
  modified_base 421: mod_base = OTHER; note = N1-methylpseudouridine
  modified_base 431: mod_base = OTHER; note = N1-methylpseudouridine
  modified_base 433: mod_base = OTHER; note = N1-methylpseudouridine
  modified_base 434: mod_base = OTHER; note = N1-methylpseudouridine
  modified_base 436: mod_base = OTHER; note = N1-methylpseudouridine
  modified_base 438: mod_base = OTHER; note = N1-methylpseudouridine
  modified_base 442: mod_base = OTHER; note = N1-methylpseudouridine
  modified_base 443: mod_base = OTHER; note = N1-methylpseudouridine
  modified_base 445: mod_base = OTHER; note = N1-methylpseudouridine
  modified_base 446: mod_base = OTHER; note = N1-methylpseudouridine
  modified_base 452: mod_base = OTHER; note = N1-methylpseudouridine
  modified_base 456: mod_base = OTHER; note = N1-methylpseudouridine
  modified_base 464: mod_base = OTHER; note = N1-methylpseudouridine
  modified_base 466: mod_base = OTHER; note = N1-methylpseudouridine
  modified_base 467: mod_base = OTHER; note = N1-methylpseudouridine
  modified_base 493: mod_base = OTHER; note = N1-methylpseudouridine
  modified_base 498: mod_base = OTHER; note = N1-methylpseudouridine
angnccgaagncgaanncagccacgagnacnggangagacangcacngacccncgcgaagagagcncgggangagagggaagngccagngggagcngngcnggngcncaacaacagggncannggggaagganggaacagggccannggacnncacganccgacggcncangcggaaancanggcacngagacagggcggncnngngangcagaacnancgccnganngangccacncngnacgngaccnncgaaccnngcgngangngcgccggngccanganccacncacgcancggncgggnggngnncggcgngcgaaacgcnaagacnggagccgccggancacnganggangngcnccancaccccgggangaaccacagggnggagancaccgaaggcanncnggccgacgaangcgcagcccngnngngncgcnncnnccggangccncgaagagngnncaacgcgcagaagaaggcgcagagcnccacngac

SEQ ID NO: 2163 - RNA, 96 nt, synthetic construct
  source 1..96: mol_type = other RNA; note = Description of Artificial Sequence: Synthetic oligonucleotide
  modified_base 1: mod_base = OTHER; note = N1-methylpseudouridine
  modified_base 3: mod_base = OTHER; note = N1-methylpseudouridine
  modified_base 9: mod_base = OTHER; note = N1-methylpseudouridine
  modified_base 10: mod_base = OTHER; note = N1-methylpseudouridine
  modified_base 13: mod_base = OTHER; note = N1-methylpseudouridine
  modified_base 22: mod_base = OTHER; note = N1-methylpseudouridine
  modified_base 25: mod_base = OTHER; note = N1-methylpseudouridine
  modified_base 31: mod_base = OTHER; note = N1-methylpseudouridine
  modified_base 39: mod_base = OTHER; note = N1-methylpseudouridine
  modified_base 42: mod_base = OTHER; note = N1-methylpseudouridine
  modified_base 49: mod_base = OTHER; note = N1-methylpseudouridine
  modified_base 55: mod_base = OTHER; note = N1-methylpseudouridine
  modified_base 63: mod_base = OTHER; note = N1-methylpseudouridine
  modified_base 70: mod_base = OTHER; note = N1-methylpseudouridine
  modified_base 73: mod_base = OTHER; note = N1-methylpseudouridine
  modified_base 82: mod_base = OTHER; note = N1-methylpseudouridine
  modified_base 94: mod_base = OTHER; note = N1-methylpseudouridine
ncnggaggnnccncgggcggancgncagggnccgaaacnccnggaaccncggagncagcaacnccggaanccncaggaggcnccagcggaggcncc

SEQ ID NO: 2164 - RNA, 4101 nt, synthetic construct
  source 1..4101: mol_type = other RNA; note = Description of Artificial Sequence: Synthetic polynucleotide
  modified_base 3: mod_base = OTHER; note = N1-methylpseudouridine
  modified_base 10: mod_base = OTHER; note = N1-methylpseudouridine
  modified_base 17: mod_base = OTHER; note = N1-methylpseudouridine
  modified_base 23: mod_base = OTHER; note = N1-methylpseudouridine
  modified_base 24: mod_base = OTHER; note = N1-methylpseudouridine
  modified_base 29: mod_base = OTHER; note = N1-methylpseudouridine
  modified_base 40: mod_base = OTHER; note = N1-methylpseudouridine
  modified_base 44: mod_base = OTHER; note = N1-methylpseudouridine
  modified_base 49: mod_base = OTHER; note = N1-methylpseudouridine
  modified_base 54: mod_base = OTHER; note = N1-methylpseudouridine
  modified_base 56: mod_base = OTHER; note = N1-methylpseudouridine
  modified_base 59: mod_base = OTHER; note = N1-methylpseudouridine
  modified_base 63: mod_base = OTHER; note = N1-methylpseudouridine
  modified_base 70: mod_base = OTHER; note = N1-methylpseudouridine
  modified_base 77: mod_base = OTHER; note = N1-methylpseudouridine
  modified_base 81: mod_base = OTHER; note = N1-methylpseudouridine
  modified_base 82: mod_base = OTHER; note = N1-methylpseudouridine
  modified_base 91: mod_base = OTHER; note = N1-methylpseudouridine
  modified_base 92: mod_base = OTHER; note = N1-methylpseudouridine
  modified_base 98: mod_base = OTHER; note = N1-methylpseudouridine
  modified_base 101: mod_base = OTHER; note = N1-methylpseudouridine
  modified_base 111: mod_base = OTHER; note = N1-methylpseudouridine
  modified_base 114: mod_base = OTHER; note = N1-methylpseudouridine
  modified_base 121: mod_base = OTHER; note = N1-methylpseudouridine
  modified_base 125: mod_base = OTHER; note = N1-methylpseudouridine
  modified_base 126: mod_base = OTHER; note = N1-methylpseudouridine
  modified_base 137: mod_base = OTHER; note = N1-methylpseudouridine
  modified_base 140: mod_base = OTHER; note = N1-methylpseudouridine
  modified_base 144: mod_base = OTHER; note = N1-methylpseudouridine
  modified_base 149: mod_base = OTHER; note = N1-methylpseudouridine
  modified_base 152: mod_base = OTHER; note = N1-methylpseudouridine
  modified_base 154: mod_base = OTHER; note = N1-methylpseudouridine
  modified_base 155: mod_base = OTHER; note = N1-methylpseudouridine
  modified_base 160: mod_base = OTHER; note = N1-methylpseudouridine
  modified_base 162: mod_base = OTHER; note = N1-methylpseudouridine
  modified_base 171: mod_base = OTHER; note = N1-methylpseudouridine
  modified_base 183: mod_base = OTHER; note = N1-methylpseudouridine
  modified_base 188: mod_base = OTHER; note = N1-methylpseudouridine
  modified_base 198: mod_base = OTHER; note = N1-methylpseudouridine
  modified_base 211: mod_base = OTHER; note = N1-methylpseudouridine
  modified_base 233: mod_base = OTHER; note = N1-methylpseudouridine
  modified_base 235: mod_base = OTHER; note = N1-methylpseudouridine
  modified_base 238: mod_base = OTHER; note = N1-methylpseudouridine
  modified_base 241: mod_base = OTHER; note = N1-methylpseudouridine
  modified_base 242: mod_base = OTHER; note = N1-methylpseudouridine
  modified_base 251: mod_base = OTHER; note = N1-methylpseudouridine
  modified_base 252: mod_base = OTHER; note = N1-methylpseudouridine
  modified_base 253: mod_base = OTHER; note = N1-methylpseudouridine
  modified_base 254: mod_base = OTHER; note = N1-methylpseudouridine
  modified_base 266: mod_base = OTHER; note = N1-methylpseudouridine
  modified_base 275: mod_base = OTHER; note = N1-methylpseudouridine
  modified_base 283: mod_base = OTHER; note = N1-methylpseudouridine
  modified_base 286: mod_base = OTHER; note = N1-methylpseudouridine
  modified_base 287: mod_base = OTHER; note = N1-methylpseudouridine
  modified_base 288: mod_base = OTHER; note = N1-methylpseudouridine
  modified_base 289: mod_base = OTHER; note = N1-methylpseudouridine
  modified_base 290: mod_base = OTHER; note = N1-methylpseudouridine
  modified_base 299: mod_base = OTHER; note = N1-methylpseudouridine
  modified_base 310: mod_base = OTHER; note = N1-methylpseudouridine
  modified_base 311: mod_base = OTHER; note = N1-methylpseudouridine
  modified_base 314: mod_base = OTHER; note = N1-methylpseudouridine
  modified_base 317: mod_base = OTHER; note = N1-methylpseudouridine
  modified_base 327: mod_base = OTHER; note = N1-methylpseudouridine
  modified_base 336: mod_base = OTHER; note = N1-methylpseudouridine
  modified_base 345: mod_base = OTHER; note = N1-methylpseudouridine
  modified_base 350: mod_base = OTHER; note = N1-methylpseudouridine
  modified_base 352: mod_base = OTHER; note = N1-methylpseudouridine
  modified_base 353: mod_base = OTHER; note = N1-methylpseudouridine
  modified_base 362: mod_base = OTHER; note = N1-methylpseudouridine
  modified_base 365: mod_base = OTHER; note = N1-methylpseudouridine
  modified_base 374: mod_base = OTHER; note = N1-methylpseudouridine
  modified_base 379: mod_base = OTHER; note = N1-methylpseudouridine
  modified_base 384: mod_base = OTHER; note = N1-methylpseudouridine
  modified_base 391: mod_base = OTHER; note = N1-methylpseudouridine
  modified_base 401: mod_base = OTHER; note = N1-methylpseudouridine
  modified_base 403: mod_base = OTHER; note = N1-methylpseudouridine
  modified_base 408: mod_base = OTHER; note = N1-methylpseudouridine
  modified_base 410: mod_base = OTHER; note = N1-methylpseudouridine
  modified_base 422: mod_base = OTHER; note = N1-methylpseudouridine
  modified_base 425: mod_base = OTHER; note = N1-methylpseudouridine
  modified_base 435: mod_base = OTHER; note = N1-methylpseudouridine
  modified_base 448: mod_base = OTHER; note = N1-methylpseudouridine
  modified_base 449: mod_base = OTHER; note = N1-methylpseudouridine
  modified_base 455: mod_base = OTHER; note = N1-methylpseudouridine
  modified_base 458: mod_base = OTHER; note = N1-methylpseudouridine
  modified_base 460: mod_base = OTHER; note = N1-methylpseudouridine
  modified_base 464: mod_base = OTHER; note = N1-methylpseudouridine
  modified_base 465: mod_base = OTHER; note = N1-methylpseudouridine
  modified_base 470: mod_base = OTHER; note = N1-methylpseudouridine
  modified_base 479: mod_base = OTHER; note = N1-methylpseudouridine
  modified_base 482: mod_base = OTHER; note = N1-methylpseudouridine
  modified_base 487: mod_base = OTHER; note = N1-methylpseudouridine
  modified_base 488: mod_base = OTHER; note = N1-methylpseudouridine
  modified_base 499: mod_base = OTHER; note = N1-methylpseudouridine
  modified_base 500: mod_base = OTHER; note = N1-methylpseudouridine
  modified_base 503: mod_base = OTHER; note = N1-methylpseudouridine
  modified_base 506: mod_base = OTHER; note = N1-methylpseudouridine
  modified_base 518: mod_base = OTHER; note = N1-methylpseudouridine
  modified_base 531: mod_base = OTHER; note = N1-methylpseudouridine
  modified_base 532: mod_base = OTHER; note = N1-methylpseudouridine
  modified_base 539: mod_base = OTHER; note = N1-methylpseudouridine
  modified_base 543: mod_base = OTHER; note = N1-methylpseudouridine
  modified_base 548: mod_base = OTHER; note = N1-methylpseudouridine
  modified_base 550: mod_base = OTHER; note = N1-methylpseudouridine
  modified_base 551: mod_base = OTHER; note = N1-methylpseudouridine
  modified_base 554: mod_base = OTHER; note = N1-methylpseudouridine
  modified_base 560: mod_base = OTHER; note = N1-methylpseudouridine
  modified_base 563: mod_base = OTHER; note = N1-methylpseudouridine
  modified_base 570: mod_base = OTHER; note = N1-methylpseudouridine
  modified_base 571: mod_base = OTHER; note = N1-methylpseudouridine
  modified_base 581: mod_base = OTHER; note = N1-methylpseudouridine
  modified_base 583: mod_base = OTHER; note = N1-methylpseudouridine
  modified_base 584: mod_base = OTHER; note = N1-methylpseudouridine
  modified_base 585: mod_base = OTHER; note = N1-methylpseudouridine
  modified_base 599: mod_base = OTHER; note = N1-methylpseudouridine
  modified_base 606: mod_base = OTHER; note = N1-methylpseudouridine
  modified_base 607: mod_base = OTHER; note = N1-methylpseudouridine
  modified_base 614: mod_base = OTHER; note = N1-methylpseudouridine
  modified_base 629: mod_base = OTHER; note = N1-methylpseudouridine
  modified_base 630: mod_base = OTHER; note = N1-methylpseudouridine
  modified_base 632: mod_base = OTHER; note = N1-methylpseudouridine
  modified_base 644: mod_base = OTHER; note = N1-methylpseudouridine
  modified_base 646: mod_base = OTHER; note = N1-methylpseudouridine
  modified_base 652: mod_base = OTHER; note = N1-methylpseudouridine
  modified_base 661: mod_base = OTHER; note = N1-methylpseudouridine
  modified_base 662: mod_base = OTHER; note = N1-methylpseudouridine
  modified_base 671: mod_base = OTHER; note = N1-methylpseudouridine
  modified_base 674: mod_base = OTHER; note = N1-methylpseudouridine
  modified_base 675: mod_base = OTHER; note = N1-methylpseudouridine
  modified_base 683: mod_base = OTHER; note = N1-methylpseudouridine
  modified_base 687: mod_base = OTHER; note = N1-methylpseudouridine
  modified_base 702: mod_base = OTHER; note = N1-methylpseudouridine
  modified_base 707: mod_base = OTHER; note = N1-methylpseudouridine
  modified_base 709: mod_base = OTHER; note = N1-methylpseudouridine
  modified_base 710: mod_base = OTHER; note = N1-methylpseudouridine
  modified_base 719: mod_base = OTHER; note = N1-methylpseudouridine
  modified_base 722: mod_base = OTHER; note = N1-methylpseudouridine
  modified_base 728: mod_base = OTHER; note = N1-methylpseudouridine
  modified_base 730: mod_base = OTHER; note = N1-methylpseudouridine
  modified_base 734: mod_base = OTHER; note = N1-methylpseudouridine
  modified_base 738: mod_base = OTHER; note = N1-methylpseudouridine
  modified_base 740: mod_base = OTHER; note = N1-methylpseudouridine
  modified_base 751: mod_base = OTHER; note = N1-methylpseudouridine
  modified_base 752: mod_base = OTHER; note = N1-methylpseudouridine
  modified_base 753: mod_base = OTHER; note = N1-methylpseudouridine
  modified_base 763: mod_base = OTHER; note = N1-methylpseudouridine
  modified_base 764: mod_base = OTHER; note = N1-methylpseudouridine
  modified_base 770: mod_base = OTHER; note = N1-methylpseudouridine
  modified_base 774: mod_base = OTHER; note = N1-methylpseudouridine
  modified_base 788: mod_base = OTHER; note = N1-methylpseudouridine
  modified_base 794: mod_base = OTHER; note = N1-methylpseudouridine
  modified_base 796: mod_base = OTHER; note = N1-methylpseudouridine
  modified_base 808: mod_base = OTHER; note = N1-methylpseudouridine
  modified_base 813: mod_base = OTHER; note = N1-methylpseudouridine
  modified_base 816: mod_base = OTHER; note = N1-methylpseudouridine
  modified_base 821: mod_base = OTHER; note = N1-methylpseudouridine
  modified_base 825: mod_base = OTHER; note = N1-methylpseudouridine
  modified_base 828: mod_base = OTHER; note = N1-methylpseudouridine
  modified_base 830: mod_base = OTHER; note = N1-methylpseudouridine
  modified_base 833: mod_base = OTHER; note = N1-methylpseudouridine
  modified_base 842: mod_base = OTHER; note = N1-methylpseudouridine
  modified_base 853: mod_base = OTHER; note = N1-methylpseudouridine
  modified_base 855: mod_base = OTHER; note = N1-methylpseudouridine
  modified_base 863: mod_base = OTHER; note = N1-methylpseudouridine
  modified_base 865: mod_base = OTHER; note = N1-methylpseudouridine
  modified_base 866: mod_base = OTHER; note = N1-methylpseudouridine
  modified_base 867: mod_base = OTHER; note = N1-methylpseudouridine
  modified_base 869: mod_base = OTHER; note = N1-methylpseudouridine
  modified_base 882: mod_base = OTHER; note = N1-methylpseudouridine
  modified_base 884: mod_base = OTHER; note = N1-methylpseudouridine
  modified_base 886: mod_base = OTHER; note = N1-methylpseudouridine
  modified_base 896: mod_base = OTHER; note = N1-methylpseudouridine
  modified_base 899: mod_base = OTHER; note = N1-methylpseudouridine
  modified_base 902: mod_base = OTHER; note = N1-methylpseudouridine
  modified_base 909: mod_base = OTHER; note = N1-methylpseudouridine
  modified_base 911: mod_base = OTHER; note = N1-methylpseudouridine
  modified_base 914: mod_base = OTHER; note = N1-methylpseudouridine
  modified_base 920: mod_base = OTHER; note = N1-methylpseudouridine
  modified_base 927: mod_base = OTHER; note = N1-methylpseudouridine
  modified_base 932: mod_base = OTHER; note = N1-methylpseudouridine
  modified_base 947: mod_base = OTHER; note = N1-methylpseudouridine
  modified_base 954: mod_base = OTHER; note = N1-methylpseudouridine
  modified_base 959: mod_base = OTHER; note = N1-methylpseudouridine
  modified_base 962: mod_base = OTHER; note = N1-methylpseudouridine
  modified_base 963: mod_base = OTHER; note = N1-methylpseudouridine
  modified_base 970: mod_base = OTHER; note = N1-methylpseudouridine
  modified_base 984: mod_base = OTHER; note = N1-methylpseudouridine
  modified_base 992: mod_base = OTHER; note = N1-methylpseudouridine
  modified_base 998: mod_base = OTHER; note = N1-methylpseudouridine
  modified_base 1001: mod_base = OTHER; note = N1-methylpseudouridine
  modified_base 1008: mod_base = OTHER; note = N1-methylpseudouridine
  modified_base 1010: mod_base = OTHER; note = N1-methylpseudouridine
  modified_base 1011: mod_base = OTHER; note = N1-methylpseudouridine
  modified_base 1013: mod_base = OTHER; note = N1-methylpseudouridine
  modified_base 1025: mod_base = OTHER; note = N1-methylpseudouridine
  modified_base 1036: mod_base = OTHER; note = N1-methylpseudouridine
  modified_base 1046: mod_base = OTHER; note = N1-methylpseudouridine
  modified_base 1048: mod_base = OTHER; note = N1-methylpseudouridine
  modified_base 1049: mod_base = OTHER; note = N1-methylpseudouridine
  modified_base 1051: mod_base = OTHER; note = N1-methylpseudouridine
  modified_base 1052: mod_base = OTHER; note = N1-methylpseudouridine
  modified_base 1060: mod_base = OTHER; note = N1-methylpseudouridine
  modified_base 1068: mod_base = OTHER; note = N1-methylpseudouridine
  modified_base 1071: mod_base = OTHER; note = N1-methylpseudouridine
  modified_base 1072: mod_base = OTHER; note = N1-methylpseudouridine
  modified_base 1081: mod_base = OTHER; note = N1-methylpseudouridine
  modified_base 1085: mod_base = OTHER; note = N1-methylpseudouridine
  modified_base 1086: mod_base = OTHER; note = N1-methylpseudouridine
  modified_base 1099: mod_base = OTHER; note = N1-methylpseudouridine
  modified_base 1111: mod_base = OTHER; note = N1-methylpseudouridine
  modified_base 1112: mod_base = OTHER; note = N1-methylpseudouridine
  modified_base 1114: mod_base = OTHER; note = N1-methylpseudouridine
  modified_base 1120: mod_base = OTHER; note = N1-methylpseudouridine
  modified_base 1121: mod_base = OTHER; note = N1-methylpseudouridine
  modified_base 1124: mod_base = OTHER; note = N1-methylpseudouridine
  modified_base 1125: mod_base = OTHER; note = N1-methylpseudouridine
  modified_base 1133: mod_base = OTHER; note = N1-methylpseudouridine
  modified_base 1136: mod_base = OTHER; note = N1-methylpseudouridine
  modified_base 1145: mod_base = OTHER; note = N1-methylpseudouridine
  modified_base 1163: mod_base = OTHER; note = N1-methylpseudouridine
  modified_base 1166: mod_base = OTHER; note = N1-methylpseudouridine
  modified_base 1169: mod_base = OTHER; note = N1-methylpseudouridine
  modified_base 1175: mod_base = OTHER; note = N1-methylpseudouridine
  modified_base 1188: mod_base = OTHER; note = N1-methylpseudouridine
  modified_base 1190: mod_base = OTHER; note = N1-methylpseudouridine
  modified_base 1193: mod_base = OTHER; note = N1-methylpseudouridine
  modified_base 1209: mod_base = OTHER; note = N1-methylpseudouridine
  modified_base 1210: mod_base = OTHER; note = N1-methylpseudouridine
  modified_base 1211: mod_base = OTHER; note = N1-methylpseudouridine
  modified_base 1222: mod_base = OTHER; note = N1-methylpseudouridine
  modified_base 1226: mod_base = OTHER; note = N1-methylpseudouridine
  modified_base 1233: mod_base = OTHER; note = N1-methylpseudouridine
  modified_base 1238: mod_base = OTHER; note = N1-methylpseudouridine
  modified_base 1239: mod_base = OTHER; note = N1-methylpseudouridine
  modified_base 1244: mod_base = OTHER; note = N1-methylpseudouridine
  modified_base 1253: mod_base = OTHER; note = N1-methylpseudouridine
  modified_base 1262: mod_base = OTHER; note = N1-methylpseudouridine
  modified_base 1265: mod_base = OTHER; note = N1-methylpseudouridine
  modified_base 1281: mod_base = OTHER; note = N1-methylpseudouridine
  modified_base 1282: mod_base = OTHER; note = N1-methylpseudouridine
  modified_base 1283: mod_base = OTHER; note = N1-methylpseudouridine
  modified_base 1285: mod_base = OTHER; note = N1-methylpseudouridine
  modified_base 1291: mod_base = OTHER; note = N1-methylpseudouridine
  modified_base 1292: mod_base = OTHER; note = N1-methylpseudouridine
  modified_base 1295: mod_base = OTHER; note = N1-methylpseudouridine
  modified_base 1316: mod_base = OTHER; note = N1-methylpseudouridine
  modified_base 1325: mod_base = OTHER; note = N1-methylpseudouridine
  modified_base 1328: mod_base = OTHER; note = N1-methylpseudouridine
  modified_base 1333: mod_base = OTHER; note = N1-methylpseudouridine
  modified_base 1334: mod_base = OTHER; note = N1-methylpseudouridine
  modified_base 1340: mod_base = OTHER; note = N1-methylpseudouridine
  modified_base 1341: mod_base = OTHER; note = N1-methylpseudouridine
  modified_base 1345: mod_base = OTHER; note = N1-methylpseudouridine
  modified_base 1348: mod_base = OTHER; note = N1-methylpseudouridine
  modified_base 1352: mod_base = OTHER; note = N1-methylpseudouridine
  modified_base 1361: mod_base = OTHER; note = N1-methylpseudouridine
  modified_base 1375: mod_base = OTHER; note = N1-methylpseudouridine
  modified_base 1381: mod_base = OTHER; note = N1-methylpseudouridine
  modified_base 1382: mod_base = OTHER; note = N1-methylpseudouridine
  modified_base 1387: mod_base = OTHER; note = N1-methylpseudouridine
  modified_base 1391: mod_base = OTHER; note = N1-methylpseudouridine
  modified_base 1402: mod_base = OTHER; note = N1-methylpseudouridine
  modified_base 1415: mod_base = OTHER; note = N1-methylpseudouridine
  modified_base 1416: mod_base = OTHER; note = N1-methylpseudouridine
  modified_base 1419: mod_base = OTHER; note = N1-methylpseudouridine
  modified_base 1423: mod_base = OTHER; note = N1-methylpseudouridine
  modified_base 1429: mod_base = OTHER; note = N1-methylpseudouridine
  modified_base 1430: mod_base = OTHER; note = N1-methylpseudouridine
  modified_base 1439: mod_base = OTHER; note = N1-methylpseudouridine
  modified_base 1442: mod_base = OTHER; note = N1-methylpseudouridine
  modified_base 1456: mod_base = OTHER; note = N1-methylpseudouridine
  modified_base 1465: mod_base = OTHER; note = N1-methylpseudouridine
  modified_base 1468: mod_base = OTHER; note = N1-methylpseudouridine
  modified_base 1469: mod_base = OTHER; note = N1-methylpseudouridine
  modified_base 1472: mod_base = OTHER; note = N1-methylpseudouridine
  modified_base 1481: mod_base = OTHER; note = N1-methylpseudouridine
  modified_base 1489: mod_base = OTHER; note = N1-methylpseudouridine
  modified_base 1490: mod_base = OTHER; note = N1-methylpseudouridine
  modified_base 1501: mod_base = OTHER; note = N1-methylpseudouridine
  modified_base 1502: mod_base = OTHER; note = N1-methylpseudouridine
  modified_base 1506: mod_base = OTHER; note = N1-methylpseudouridine
  modified_base 1517: mod_base = OTHER; note = N1-methylpseudouridine
  modified_base 1520: mod_base = OTHER; note = N1-methylpseudouridine
  modified_base 1521: mod_base = OTHER; note = N1-methylpseudouridine
  modified_base 1524: mod_base = OTHER; note = N1-methylpseudouridine
  modified_base 1530: mod_base = OTHER; note = N1-methylpseudouridine
  modified_base 1531: mod_base = OTHER; note = N1-methylpseudouridine
  modified_base 1535: mod_base = OTHER; note = N1-methylpseudouridine
  modified_base 1538: mod_base = OTHER; note = N1-methylpseudouridine
  modified_base 1539: mod_base = OTHER; note = N1-methylpseudouridine
  modified_base 1540: mod_base = OTHER; note = N1-methylpseudouridine
  modified_base 1546: mod_base = OTHER; note = N1-methylpseudouridine
  modified_base 1549: mod_base = OTHER; note = N1-methylpseudouridine
  modified_base 1550: mod_base = OTHER; note = N1-methylpseudouridine
  modified_base 1554: mod_base = OTHER; note = N1-methylpseudouridine
  modified_base 1556: mod_base = OTHER; note = N1-methylpseudouridine
  modified_base 1558: mod_base = OTHER; note = N1-methylpseudouridine
  modified_base 1568: mod_base = OTHER; note = N1-methylpseudouridine
  modified_base 1569: mod_base = OTHER; note = N1-methylpseudouridine
  modified_base 1577: mod_base = OTHER; note = N1-methylpseudouridine
  modified_base 1582: mod_base = OTHER; note = N1-methylpseudouridine
  modified_base 1584: mod_base = OTHER; note = N1-methylpseudouridine
  modified_base 1586: mod_base = OTHER; note = N1-methylpseudouridine
  modified_base 1598: mod_base = OTHER; note = N1-methylpseudouridine
  modified_base 1612: mod_base = OTHER; note = N1-methylpseudouridine
  modified_base 1613: mod_base = OTHER; note = N1-methylpseudouridine
  modified_base 1614: mod_base = OTHER; note = N1-methylpseudouridine
  modified_base 1616: mod_base = OTHER; note = N1-methylpseudouridine
  modified_base 1617: mod_base = OTHER; note = N1-methylpseudouridine
  modified_base 1618: mod_base = OTHER; note = N1-methylpseudouridine
  modified_base 1640: mod_base = OTHER; note = N1-methylpseudouridine
  modified_base 1643: mod_base = OTHER; note = N1-methylpseudouridine
  modified_base 1649: mod_base = OTHER; note = N1-methylpseudouridine
  modified_base 1651: mod_base = OTHER; note = N1-methylpseudouridine
  modified_base 1652: mod_base = OTHER; note = N1-methylpseudouridine
  modified_base 1654: mod_base = OTHER; note = N1-methylpseudouridine
  modified_base 1655: mod_base = OTHER; note = N1-methylpseudouridine
  modified_base 1673: mod_base = OTHER; note = N1-methylpseudouridine
  modified_base 1679: mod_base = OTHER; note = N1-methylpseudouridine
  modified_base 1688: mod_base = OTHER; note = N1-methylpseudouridine
  modified_base 1699: mod_base = OTHER; note = N1-methylpseudouridine
  modified_base 1702: mod_base = OTHER; note = N1-methylpseudouridine
  modified_base 1703: mod_base = OTHER; note = N1-methylpseudouridine
  modified_base 1704: mod_base = OTHER; note = N1-methylpseudouridine
  modified_base 1712: mod_base = OTHER; note = N1-methylpseudouridine
  modified_base 1717: mod_base = OTHER; note = N1-methylpseudouridine
  modified_base 1720: mod_base = OTHER; note = N1-methylpseudouridine
  modified_base 1721: mod_base = OTHER; note = N1-methylpseudouridine
  modified_base 1722: mod_base = OTHER; note = N1-methylpseudouridine
  modified_base 1725: mod_base = OTHER; note = N1-methylpseudouridine
  modified_base 1726: mod_base = OTHER; note = N1-methylpseudouridine
  modified_base 1730: mod_base = OTHER; note = N1-methylpseudouridine
  modified_base 1736: mod_base = OTHER; note = N1-methylpseudouridine
  modified_base 1738: mod_base = OTHER; note = N1-methylpseudouridine
  modified_base 1745: mod_base = OTHER; note = N1-methylpseudouridine
  modified_base 1752: mod_base = OTHER; note = N1-methylpseudouridine
  modified_base 1756: mod_base = OTHER; note = N1-methylpseudouridine
  modified_base 1757: mod_base = OTHER; note = N1-methylpseudouridine
  modified_base 1769: mod_base = OTHER; note = N1-methylpseudouridine
  modified_base 1777: mod_base = OTHER; note = N1-methylpseudouridine
  modified_base 1785: mod_base = OTHER; note = N1-methylpseudouridine
  modified_base 1787: mod_base = OTHER; note = N1-methylpseudouridine
  modified_base 1790: mod_base = OTHER; note = N1-methylpseudouridine
  modified_base 1796: mod_base = OTHER; note = N1-methylpseudouridine
  modified_base 1799: mod_base = OTHER; note = N1-methylpseudouridine
  modified_base 1800: mod_base = OTHER; note = N1-methylpseudouridine
  modified_base 1806: mod_base = OTHER; note = N1-methylpseudouridine
  modified_base 1812: mod_base = OTHER; note = N1-methylpseudouridine
  modified_base 1813: mod_base = OTHER; note = N1-methylpseudouridine
  modified_base 1814: mod_base = OTHER; note = N1-methylpseudouridine
  modified_base 1817: mod_base = OTHER; note = N1-methylpseudouridine
  modified_base 1839: mod_base = OTHER; note = N1-methylpseudouridine
  modified_base 1841: mod_base = OTHER; note = N1-methylpseudouridine
  modified_base 1844: mod_base = OTHER; note = N1-methylpseudouridine
  modified_base 1853: mod_base = OTHER; note = N1-methylpseudouridine
  modified_base 1854: mod_base = OTHER; note = N1-methylpseudouridine
  modified_base 1856: mod_base = OTHER; note = N1-methylpseudouridine
  modified_base 1859: mod_base = OTHER; note = N1-methylpseudouridine
  modified_base 1865: mod_base = OTHER; note = N1-methylpseudouridine
  modified_base 1871: mod_base = OTHER; note = N1-methylpseudouridine
  modified_base 1873: mod_base = OTHER; note = N1-methylpseudouridine
  modified_base 1874: mod_base = OTHER; note = N1-methylpseudouridine
  modified_base 1881: mod_base = OTHER; note = N1-methylpseudouridine
  modified_base 1889: mod_base = OTHER; note = N1-methylpseudouridine
  modified_base 1892: mod_base = OTHER; note = N1-methylpseudouridine
  modified_base 1904: mod_base = OTHER; note = N1-methylpseudouridine
  modified_base 1912: mod_base = OTHER; note = N1-methylpseudouridine
  modified_base 1922: mod_base = OTHER; note = N1-methylpseudouridine
  modified_base 1924: mod_base = OTHER; note = N1-methylpseudouridine
  modified_base 1925: mod_base = OTHER; note = N1-methylpseudouridine
  modified_base 1937: mod_base = OTHER; note = N1-methylpseudouridine
  modified_base 1940: mod_base = OTHER; note = N1-methylpseudouridine
  modified_base 1949: mod_base = OTHER; note = N1-methylpseudouridine
  modified_base 1963: mod_base = OTHER; note = N1-methylpseudouridine
  modified_base 1972: mod_base = OTHER; note = N1-methylpseudouridine
  modified_base 1982: mod_base = OTHER; note = N1-methylpseudouridine
  modified_base 1984: mod_base = OTHER; note = N1-methylpseudouridine
  modified_base 1994: mod_base = OTHER; note = N1-methylpseudouridine
  modified_base 1997: mod_base = OTHER; note = N1-methylpseudouridine
  modified_base 2006: mod_base = OTHER; note = N1-methylpseudouridine
  modified_base 2007: mod_base = OTHER; note = N1-methylpseudouridine
  modified_base 2020: mod_base = OTHER; note = N1-methylpseudouridine
  modified_base 2033: mod_base = OTHER; note = N1-methylpseudouridine
  modified_base 2034: mod_base = OTHER; note = N1-methylpseudouridine
  modified_base 2036: mod_base = OTHER; note = N1-methylpseudouridine
  modified_base 2041: mod_base = OTHER; note = N1-methylpseudouridine
  modified_base 2042: mod_base = OTHER; note = N1-methylpseudouridine
  modified_base 2045: mod_base = OTHER; note = N1-methylpseudouridine
  modified_base 2050: mod_base = OTHER; note = N1-methylpseudouridine
  modified_base 2059: mod_base = OTHER; note = N1-methylpseudouridine
  modified_base 2060: mod_base = OTHER; note = N1-methylpseudouridine
  modified_base 2074: mod_base = OTHER; note = N1-methylpseudouridine
  modified_base 2075: mod_base = OTHER; note = N1-methylpseudouridine
  modified_base 2078: mod_base = OTHER; note = N1-methylpseudouridine
  modified_base 2084: mod_base = OTHER; note = N1-methylpseudouridine
  modified_base 2087: mod_base = OTHER; note = N1-methylpseudouridine
  modified_base 2098: mod_base = OTHER; note = N1-methylpseudouridine
  modified_base 2102: mod_base = OTHER; note = N1-methylpseudouridine
  modified_base 2107: mod_base = OTHER; note = N1-methylpseudouridine
  modified_base 2108: mod_base = OTHER; note = N1-methylpseudouridine
  modified_base 2120: mod_base = OTHER; note = N1-methylpseudouridine
  modified_base 2121: mod_base = OTHER; note = N1-methylpseudouridine
  modified_base 2135: mod_base = OTHER; note = N1-methylpseudouridine
  modified_base 2137: mod_base = OTHER; note = N1-methylpseudouridine
  modified_base 2151: mod_base = OTHER; note = N1-methylpseudouridine
  modified_base 2152: mod_base = OTHER; note = N1-methylpseudouridine
  modified_base 2156: mod_base = OTHER; note = N1-methylpseudouridine
  modified_base 2168: mod_base = OTHER; note = N1-methylpseudouridine
  modified_base 2175: mod_base = OTHER; note = N1-methylpseudouridine
  modified_base 2177: mod_base = OTHER; note = N1-methylpseudouridine
  modified_base 2181: mod_base = OTHER; note = N1-methylpseudouridine
  modified_base 2187: mod_base = OTHER; note = N1-methylpseudouridine
  modified_base 2195: mod_base = OTHER; note = N1-methylpseudouridine
  modified_base 2207: mod_base = OTHER; note = N1-methylpseudouridine
  modified_base 2210: mod_base = OTHER; note = N1-methylpseudouridine
  modified_base 2219: mod_base = OTHER; note = N1-methylpseudouridine
  modified_base 2225: mod_base = OTHER; note = N1-methylpseudouridine
  modified_base 2228: mod_base = OTHER; note = N1-methylpseudouridine
  modified_base 2237: mod_base = OTHER; note = N1-methylpseudouridine
  modified_base 2240: mod_base = OTHER; note = N1-methylpseudouridine
  modified_base 2246: mod_base = OTHER; note = N1-methylpseudouridine
  modified_base 2249: mod_base = OTHER; note = N1-methylpseudouridine
  modified_base 2265: mod_base = OTHER; note = N1-methylpseudouridine
  modified_base 2273: mod_base = OTHER; note = N1-methylpseudouridine
  modified_base 2276: mod_base = OTHER; note = N1-methylpseudouridine
  modified_base 2279: mod_base = OTHER; note = N1-methylpseudouridine
  modified_base 2285: mod_base = OTHER; note = N1-methylpseudouridine
  modified_base 2339: mod_base = OTHER; note = N1-methylpseudouridine
  modified_base 2348: mod_base = OTHER; note = N1-methylpseudouridine
  modified_base 2360: mod_base = OTHER; note = N1-methylpseudouridine
  modified_base 2369: mod_base = OTHER; note = N1-methylpseudouridine
  modified_base 2370: mod_base = OTHER; note = N1-methylpseudouridine
  modified_base 2381: mod_base = OTHER; note = N1-methylpseudouridine
  modified_base 2384: mod_base = OTHER; note = N1-methylpseudouridine
  modified_base 2399: mod_base = OTHER; note = N1-methylpseudouridine
  modified_base 2409: mod_base = OTHER; note = N1-methylpseudouridine
  modified_base 2414: mod_base = OTHER; note = N1-methylpseudouridine
  modified_base 2415: mod_base = OTHER; note = N1-methylpseudouridine
  modified_base 2429: mod_base = OTHER; note = N1-methylpseudouridine
  modified_base 2431: mod_base = OTHER; note = N1-methylpseudouridine
  modified_base 2435: mod_base = OTHER; note = N1-methylpseudouridine
  modified_base 2437: mod_base = OTHER; note = N1-methylpseudouridine
  modified_base 2440: mod_base = OTHER; note = N1-methylpseudouridine
  modified_base 2442: mod_base = OTHER; note = N1-methylpseudouridine
  modified_base 2444: mod_base = OTHER; note = N1-methylpseudouridine
  modified_base 2460: mod_base = OTHER; note = N1-methylpseudouridine
  modified_base 2462: mod_base = OTHER; note = N1-methylpseudouridine
  modified_base 2464: mod_base = OTHER; note = N1-methylpseudouridine
  modified_base 2468: mod_base = OTHER; note = N1-methylpseudouridine
  modified_base 2479: mod_base = OTHER; note = N1-methylpseudouridine
  modified_base 2480: mod_base = OTHER; note = N1-methylpseudouridine
  modified_base 2486: mod_base = OTHER; note = N1-methylpseudouridine
  modified_base 2490: mod_base = OTHER; note = N1-methylpseudouridine
  modified_base 2495: mod_base = OTHER; note = N1-methylpseudouridine
  modified_base 2497: mod_base = OTHER; note = N1-methylpseudouridine
  modified_base 2503: mod_base = OTHER; note = N1-methylpseudouridine
  modified_base 2508: mod_base = OTHER; note = N1-methylpseudouridine
  modified_base 2510: mod_base = OTHER; note = N1-methylpseudouridine
  modified_base 2514: mod_base = OTHER; note = N1-methylpseudouridine
  modified_base 2519: mod_base = OTHER; note = N1-methylpseudouridine
  modified_base 2520: mod_base = OTHER; note = N1-methylpseudouridine
  modified_base 2522: mod_base = OTHER; note = N1-methylpseudouridine
  modified_base 2533: mod_base = OTHER; note = N1-methylpseudouridine
  modified_base 2534: mod_base = OTHER; note = N1-methylpseudouridine
  modified_base 2535: mod_base = OTHER; note = N1-methylpseudouridine
  modified_base 2537: mod_base = OTHER; note = N1-methylpseudouridine
  modified_base 2547: mod_base = OTHER; note = N1-methylpseudouridine
  modified_base 2548: mod_base = OTHER; note = N1-methylpseudouridine
  modified_base 2552: mod_base = OTHER; note = N1-methylpseudouridine
  modified_base 2553: mod_base = OTHER; note = N1-methylpseudouridine
  modified_base 2556: mod_base = OTHER; note = N1-methylpseudouridine
  modified_base 2564: mod_base = OTHER; note = N1-methylpseudouridine
  modified_base 2567: mod_base = OTHER; note = N1-methylpseudouridine
  modified_base 2575: mod_base = OTHER; note = N1-methylpseudouridine
  modified_base 2601: mod_base = OTHER; note = N1-methylpseudouridine
  modified_base 2606: mod_base = OTHER; note = N1-methylpseudouridine
  modified_base 2621: mod_base = OTHER; note = N1-methylpseudouridine
  modified_base 2624: mod_base = OTHER; note = N1-methylpseudouridine
  modified_base 2633: mod_base = OTHER; note = N1-methylpseudouridine
  modified_base 2640: mod_base = OTHER; note = N1-methylpseudouridine
  modified_base 2641: mod_base = OTHER; note = N1-methylpseudouridine
  modified_base 2644: mod_base = OTHER; note = N1-methylpseudouridine
  modified_base 2654: mod_base = OTHER; note = N1-methylpseudouridine
  modified_base 2656: mod_base = OTHER; note = N1-methylpseudouridine
  modified_base 2657: mod_base = OTHER; note = N1-methylpseudouridine
  modified_base 2669: mod_base = OTHER; note = N1-methylpseudouridine
  modified_base 2672: mod_base = OTHER; note = N1-methylpseudouridine
  modified_base 2686: mod_base = OTHER; note = N1-methylpseudouridine
  modified_base 2687: mod_base = OTHER; note = N1-methylpseudouridine
  modified_base 2696: mod_base = OTHER; note = N1-methylpseudouridine
  modified_base 2718: mod_base = OTHER; note = N1-methylpseudouridine
  modified_base 2720: mod_base = OTHER; note = N1-methylpseudouridine
  modified_base 2721: mod_base = OTHER; note = N1-methylpseudouridine
  modified_base 2722: mod_base = OTHER; note = N1-methylpseudouridine
  modified_base 2729: mod_base = OTHER; note = N1-methylpseudouridine
  modified_base 2743: mod_base = OTHER; note = N1-methylpseudouridine
  modified_base 2744: mod_base = OTHER; note = N1-methylpseudouridine
  modified_base 2745: mod_base = OTHER; note = N1-methylpseudouridine
  modified_base 2747: mod_base = OTHER; note = N1-methylpseudouridine
  modified_base 2759: mod_base = OTHER; note = N1-methylpseudouridine
  modified_base 2762: mod_base = OTHER; note = N1-methylpseudouridine
  modified_base 2777: mod_base = OTHER; note = N1-methylpseudouridine
  modified_base 2781: mod_base = OTHER; note = N1-methylpseudouridine
  modified_base 2789: mod_base = OTHER; note = N1-methylpseudouridine
  modified_base 2798: mod_base = OTHER; note = N1-methylpseudouridine
  modified_base 2801: mod_base = OTHER; note = N1-methylpseudouridine
  modified_base 2806: mod_base = OTHER; note = N1-methylpseudouridine
  modified_base 2808: mod_base = OTHER; note = N1-methylpseudouridine
  modified_base 2813: mod_base = OTHER; note = N1-methylpseudouridine
  modified_base 2817: mod_base = OTHER; note = N1-methylpseudouridine
  modified_base 2824: mod_base = OTHER; note = N1-methylpseudouridine
  modified_base 2843: mod_base = OTHER; note = N1-methylpseudouridine
  modified_base 2846: mod_base = OTHER; note = N1-methylpseudouridine
  modified_base 2847: mod_base = OTHER; note = N1-methylpseudouridine
  modified_base 2855: mod_base = OTHER; note = N1-methylpseudouridine
  modified_base 2861: mod_base = OTHER; note = N1-methylpseudouridine
  modified_base 2864: mod_base = OTHER; note = N1-methylpseudouridine
  modified_base 2865: mod_base = OTHER; note = N1-methylpseudouridine
  modified_base 2870: mod_base = OTHER; note = N1-methylpseudouridine
  modified_base 2875: mod_base = OTHER; note = N1-methylpseudouridine
  modified_base 2882: mod_base = OTHER; note = N1-methylpseudouridine
  modified_base 2885: mod_base = OTHER; note = N1-methylpseudouridine
  modified_base 2887: mod_base = OTHER; note = N1-methylpseudouridine
  modified_base 2893: mod_base = OTHER; note = N1-methylpseudouridine
  modified_base 2894: mod_base = OTHER; note = N1-methylpseudouridine
  modified_base 2905: mod_base = OTHER; note = N1-methylpseudouridine
  modified_base 2906: mod_base = OTHER; note = N1-methylpseudouridine
  modified_base 2911: mod_base = OTHER; note = N1-methylpseudouridine
  modified_base 2912: mod_base = OTHER; note = N1-methylpseudouridine
  modified_base 2914: mod_base = OTHER; note = N1-methylpseudouridine
  modified_base 2916: mod_base = OTHER; note = N1-methylpseudouridine
  modified_base 2921: mod_base = OTHER; note = N1-methylpseudouridine
  modified_base 2922: mod_base = OTHER; note = N1-methylpseudouridine
  modified_base 2930: mod_base = OTHER; note = N1-methylpseudouridine
  modified_base 2938: mod_base = OTHER; note = N1-methylpseudouridine
  modified_base 2952: mod_base = OTHER; note = N1-methylpseudouridine
  modified_base 2959: mod_base = OTHER; note = N1-methylpseudouridine
  modified_base 2963: mod_base = OTHER; note = N1-methylpseudouridine
  modified_base 2972: mod_base = OTHER; note = N1-methylpseudouridine
  modified_base 2975: mod_base = OTHER; note = N1-methylpseudouridine
  modified_base 2979: mod_base = OTHER; note = N1-methylpseudouridine
  modified_base 2987: mod_base = OTHER; note = N1-methylpseudouridine
  modified_base 2990: mod_base = OTHER; note = N1-methylpseudouridine
  modified_base 2991: mod_base = OTHER; note = N1-methylpseudouridine
  modified_base 2998: mod_base = OTHER; note = N1-methylpseudouridine
  modified_base 3003: mod_base = OTHER; note = N1-methylpseudouridine
  modified_base 3008: mod_base = OTHER; note = N1-methylpseudouridine
  modified_base 3013: mod_base = OTHER; note = N1-methylpseudouridine
  modified_base 3019: mod_base = OTHER; note = N1-methylpseudouridine
  modified_base 3020: mod_base = OTHER; note = N1-methylpseudouridine
  modified_base 3023: mod_base = OTHER; note = N1-methylpseudouridine
  modified_base 3025: mod_base = OTHER; note = N1-methylpseudouridine
  modified_base 3034: mod_base = OTHER; note = N1-methylpseudouridine
  modified_base 3041: mod_base = OTHER; note = N1-methylpseudouridine
  modified_base 3043: mod_base = OTHER; note = N1-methylpseudouridine
  modified_base 3050: mod_base = OTHER; note = N1-methylpseudouridine
  modified_base 3059: mod_base = OTHER; note = N1-methylpseudouridine
  modified_base 3062: mod_base = OTHER; note = N1-methylpseudouridine
  modified_base 3070: mod_base = OTHER; note = N1-methylpseudouridine
  modified_base 3083: mod_base = OTHER; note = N1-methylpseudouridine
  modified_base 3103: mod_base = OTHER; note = N1-methylpseudouridine
  modified_base 3106: mod_base = OTHER; note = N1-methylpseudouridine
  modified_base 3107: mod_base = OTHER; note = N1-methylpseudouridine
  modified_base 3109: mod_base = OTHER; note = N1-methylpseudouridine
  modified_base 3110: mod_base = OTHER; note = N1-methylpseudouridine
  modified_base 3112: mod_base = OTHER; note = N1-methylpseudouridine
  modified_base 3115: mod_base = OTHER; note = N1-methylpseudouridine
  modified_base 3122: mod_base = OTHER; note = N1-methylpseudouridine
  modified_base 3125: mod_base = OTHER; note = N1-methylpseudouridine
  modified_base 3130: mod_base = OTHER; note = N1-methylpseudouridine
  modified_base 3131: mod_base = OTHER; note = N1-methylpseudouridine
  modified_base 3133: mod_base = OTHER; note = N1-methylpseudouridine
  modified_base 3134: mod_base = OTHER; note = N1-methylpseudouridine
  modified_base 3146: mod_base = OTHER; note = N1-methylpseudouridine
  modified_base 3152: mod_base = OTHER; note = N1-methylpseudouridine
  modified_base 3153: mod_base = OTHER; note = N1-methylpseudouridine
  modified_base 3167: mod_base = OTHER; note = N1-methylpseudouridine
  modified_base 3168: mod_base = OTHER; note = N1-methylpseudouridine
  modified_base 3181: mod_base = OTHER; note = N1-methylpseudouridine
  modified_base 3182: mod_base = OTHER; note = N1-methylpseudouridine
  modified_base 3185: mod_base = OTHER; note = N1-methylpseudouridine
  modified_base 3186: mod_base = OTHER; note = N1-methylpseudouridine
  modified_base 3192: mod_base = OTHER; note = N1-methylpseudouridine
  modified_base 3212: mod_base = OTHER; note = N1-methylpseudouridine
  modified_base 3213: mod_base = OTHER; note = N1-methylpseudouridine
  modified_base 3215: mod_base = OTHER; note = N1-methylpseudouridine
  modified_base 3217: mod_base = OTHER; note = N1-methylpseudouridine
  modified_base 3222: mod_base = OTHER; note = N1-methylpseudouridine
  modified_base 3235: mod_base = OTHER; note = N1-methylpseudouridine
  modified_base 3236: mod_base = OTHER; note = N1-methylpseudouridine
  modified_base 3237: mod_base = OTHER; note = N1-methylpseudouridine
  modified_base 3243: mod_base = OTHER; note = N1-methylpseudouridine
  modified_base 3245: mod_base = OTHER; note = N1-methylpseudouridine
  modified_base 3254: mod_base = OTHER; note = N1-methylpseudouridine
  modified_base 3256: mod_base = OTHER; note = N1-methylpseudouridine
  modified_base 3257: mod_base = OTHER; note = N1-methylpseudouridine
  modified_base 3259: mod_base = OTHER; note = N1-methylpseudouridine
  modified_base 3263: mod_base = OTHER; note = N1-methylpseudouridine
  modified_base 3272: mod_base = OTHER; note = N1-methylpseudouridine
  modified_base 3278: mod_base = OTHER; note = N1-methylpseudouridine
  modified_base 3279: mod_base = OTHER; note = N1-methylpseudouridine
  modified_base 3281: mod_base = OTHER; note = N1-methylpseudouridine
  modified_base 3296: mod_base = OTHER; note = N1-methylpseudouridine
  modified_base 3310: mod_base = OTHER; note = N1-methylpseudouridine
  modified_base 3311: mod_base = OTHER; note = N1-methylpseudouridine
  modified_base 3326: mod_base = OTHER; note = N1-methylpseudouridine
  modified_base 3329: mod_base = OTHER; note = N1-methylpseudouridine
  modified_base 3342: mod_base = OTHER; note = N1-methylpseudouridine
  modified_base 3343: mod_base = OTHER; note = N1-methylpseudouridine
  modified_base 3353: mod_base = OTHER; note = N1-methylpseudouridine
  modified_base 3356: mod_base = OTHER; note = N1-methylpseudouridine
  modified_base 3373: mod_base = OTHER; note = N1-methylpseudouridine
  modified_base 3388: mod_base = OTHER; note = N1-methylpseudouridine
  modified_base 3390: mod_base = OTHER; note = N1-methylpseudouridine
  modified_base 3397: mod_base = OTHER; note = N1-methylpseudouridine
  modified_base 3398: mod_base = OTHER; note = N1-methylpseudouridine
  modified_base 3403: mod_base = OTHER; note = N1-methylpseudouridine
  modified_base 3411: mod_base = OTHER; note = N1-methylpseudouridine
  modified_base 3413: mod_base = OTHER; note = N1-methylpseudouridine
  modified_base 3418: mod_base = OTHER; note = N1-methylpseudouridine
  modified_base 3421: mod_base = OTHER; note = N1-methylpseudouridine
  modified_base 3425: mod_base = OTHER; note = N1-methylpseudouridine
  modified_base 3428: mod_base = OTHER; note = N1-methylpseudouridine
  modified_base 3431: mod_base = OTHER; note = N1-methylpseudouridine
  modified_base 3434: mod_base = OTHER; note = N1-methylpseudouridine
  modified_base 3443: mod_base = OTHER; note = N1-methylpseudouridine
  modified_base 3457: mod_base = OTHER; note = N1-methylpseudouridine
  modified_base 3467: mod_base = OTHER; note = N1-methylpseudouridine
  modified_base 3472: mod_base = OTHER; note = N1-methylpseudouridine
  modified_base 3476: mod_base = OTHER; note = N1-methylpseudouridine
  modified_base 3485: mod_base = OTHER; note = N1-methylpseudouridine
  modified_base 3488: mod_base = OTHER; note = N1-methylpseudouridine
  modified_base 3494: mod_base = OTHER; note = N1-methylpseudouridine
  modified_base 3500: mod_base = OTHER; note = N1-methylpseudouridine
  modified_base 3501: mod_base = OTHER; note = N1-methylpseudouridine
  modified_base 3503: mod_base = OTHER; note = N1-methylpseudouridine
  modified_base 3511: mod_base = OTHER; note = N1-methylpseudouridine
  modified_base 3517: mod_base = OTHER; note = N1-methylpseudouridine
  modified_base 3518: mod_base = OTHER; note = N1-methylpseudouridine
  modified_base 3533: mod_base = OTHER; note = N1-methylpseudouridine
  modified_base 3534: mod_base = OTHER; note = N1-methylpseudouridine
  modified_base 3538: mod_base = OTHER; note = N1-methylpseudouridine
  modified_base 3539: mod_base = OTHER; note = N1-methylpseudouridine
  modified_base 3542: mod_base = OTHER; note = N1-methylpseudouridine
  modified_base 3555: mod_base = OTHER; note = N1-methylpseudouridine
  modified_base 3556: mod_base = OTHER; note = N1-methylpseudouridine
  modified_base 3566: mod_base = OTHER; note = N1-methylpseudouridine
  modified_base 3576: mod_base = OTHER; note = N1-methylpseudouridine
  modified_base 3578: mod_base = OTHER; note = N1-methylpseudouridine
  modified_base 3581: mod_base = OTHER; note = N1-methylpseudouridine
  modified_base 3582: mod_base = OTHER; note = N1-methylpseudouridine
  modified_base 3584: mod_base = OTHER; note = N1-methylpseudouridine
  modified_base 3585: mod_base = OTHER; note = N1-methylpseudouridine
  modified_base 3590: mod_base = OTHER; note = N1-methylpseudouridine
  modified_base 3598: mod_base = OTHER; note = N1-methylpseudouridine
  modified_base 3600: mod_base = OTHER; note = N1-methylpseudouridine
  modified_base 3601: mod_base = OTHER; note = N1-methylpseudouridine
  modified_base 3605: mod_base = OTHER; note = N1-methylpseudouridine
  modified_base 3607: mod_base = OTHER; note = N1-methylpseudouridine
  modified_base 3608: mod_base = OTHER; note = N1-methylpseudouridine
  modified_base 3614: mod_base = OTHER; note = N1-methylpseudouridine
  modified_base 3621: mod_base = OTHER; note = N1-methylpseudouridine
  modified_base 3635: mod_base = OTHER; note = N1-methylpseudouridine
  modified_base 3637: mod_base = OTHER; note = N1-methylpseudouridine
  modified_base 3638: mod_base = OTHER; note = N1-methylpseudouridine
  modified_base 3643: mod_base = OTHER; note = N1-methylpseudouridine
  modified_base 3656: mod_base = OTHER; note = N1-methylpseudouridine
  modified_base 3674: mod_base = OTHER; note = N1-methylpseudouridine
  modified_base 3679: mod_base = OTHER; note = N1-methylpseudouridine
  modified_base 3680: mod_base = OTHER; note = N1-methylpseudouridine
  modified_base 3684: mod_base = OTHER; note = N1-methylpseudouridine
  modified_base 3685: mod_base = OTHER; note = N1-methylpseudouridine
  modified_base 3691: mod_base = OTHER; note = N1-methylpseudouridine
  modified_base 3695: mod_base = OTHER; note = N1-methylpseudouridine
  modified_base 3700: mod_base = OTHER; note = N1-methylpseudouridine
  modified_base 3701: mod_base = OTHER; note = N1-methylpseudouridine
  modified_base 3702: mod_base = OTHER; note = N1-methylpseudouridine
  modified_base 3704: mod_base = OTHER; note = N1-methylpseudouridine
  modified_base 3706: mod_base = OTHER; note = N1-methylpseudouridine
  modified_base 3710: mod_base = OTHER; note = N1-methylpseudouridine
  modified_base 3721: mod_base = OTHER; note = N1-methylpseudouridine
  modified_base 3731: mod_base = OTHER; note = N1-methylpseudouridine
  modified_base 3738: mod_base = OTHER; note = N1-methylpseudouridine
  modified_base 3739: mod_base = OTHER; note = N1-methylpseudouridine
  modified_base 3767: mod_base = OTHER; note = N1-methylpseudouridine
  modified_base 3769: mod_base = OTHER; note = N1-methylpseudouridine
  modified_base 3770: mod_base = OTHER; note = N1-methylpseudouridine
  modified_base 3773: mod_base = OTHER; note = N1-methylpseudouridine
  modified_base 3790: mod_base = OTHER; note = N1-methylpseudouridine
  modified_base 3794: mod_base = OTHER; note = N1-methylpseudouridine
  modified_base 3798: mod_base = OTHER; note = N1-methylpseudouridine
  modified_base 3803: mod_base = OTHER; note = N1-methylpseudouridine
  modified_base 3806: mod_base = OTHER; note = N1-methylpseudouridine
  modified_base 3815: mod_base = OTHER; note = N1-methylpseudouridine
  modified_base 3817: mod_base = OTHER; note = N1-methylpseudouridine
  modified_base 3823: mod_base = OTHER; note = N1-methylpseudouridine
  modified_base 3824: mod_base = OTHER; note = N1-methylpseudouridine
  modified_base 3826: mod_base = OTHER; note = N1-methylpseudouridine
  modified_base 3836: mod_base = OTHER; note = N1-methylpseudouridine
  modified_base 3839: mod_base = OTHER; note = N1-methylpseudouridine
  modified_base 3842: mod_base = OTHER; note = N1-methylpseudouridine
  modified_base 3857: mod_base = OTHER; note = N1-methylpseudouridine
  modified_base 3861: mod_base = OTHER; note = N1-methylpseudouridine
  modified_base 3866: mod_base = OTHER; note = N1-methylpseudouridine
  modified_base 3869: mod_base = OTHER; note = N1-methylpseudouridine
  modified_base 3871: mod_base = OTHER; note = N1-methylpseudouridine
  modified_base 3877: mod_base = OTHER; note = N1-methylpseudouridine
  modified_base 3902: mod_base = OTHER; note = N1-methylpseudouridine
  modified_base 3915: mod_base = OTHER; note = N1-methylpseudouridine
  modified_base 3923: mod_base = OTHER; note = N1-methylpseudouridine
  modified_base 3924: mod_base = OTHER; note = N1-methylpseudouridine
  modified_base 3926: mod_base = OTHER; note = N1-methylpseudouridine
  modified_base 3932: mod_base = OTHER; note = N1-methylpseudouridine
  modified_base 3934: mod_base = OTHER; note = N1-methylpseudouridine
  modified_base 3935: mod_base = OTHER; note = N1-methylpseudouridine
  modified_base 3941: mod_base = OTHER; note = N1-methylpseudouridine
  modified_base 3945: mod_base = OTHER; note = N1-methylpseudouridine
  modified_base 3950: mod_base = OTHER; note = N1-methylpseudouridine
  modified_base 3951: mod_base = OTHER; note = N1-methylpseudouridine
  modified_base 3960: mod_base = OTHER; note = N1-methylpseudouridine
  modified_base 3967: mod_base = OTHER; note = N1-methylpseudouridine
  modified_base 3968: mod_base = OTHER; note = N1-methylpseudouridine
  modified_base 3973: mod_base = OTHER; note = N1-methylpseudouridine
  modified_base 3976: mod_base = OTHER; note = N1-methylpseudouridine
  modified_base 3977: mod_base = OTHER; note = N1-methylpseudouridine
  modified_base 3989: mod_base = OTHER; note = N1-methylpseudouridine
  modified_base 4003: mod_base = OTHER; note = N1-methylpseudouridine
  modified_base 4008: mod_base = OTHER; note = N1-methylpseudouridine
  modified_base 4009: mod_base = OTHER; note = N1-methylpseudouridine
  modified_base 4022: mod_base = OTHER; note = N1-methylpseudouridine
  modified_base 4025: mod_base = OTHER; note = N1-methylpseudouridine
  modified_base 4037: mod_base = OTHER; note = N1-methylpseudouridine
  modified_base 4040: mod_base = OTHER; note = N1-methylpseudouridine
  modified_base 4048: mod_base = OTHER; note = N1-methylpseudouridine
  modified_base 4052: mod_base = OTHER; note = N1-methylpseudouridine
  modified_base 4056: mod_base = OTHER; note = N1-methylpseudouridine
  modified_base 4061: mod_base = OTHER; note = N1-methylpseudouridine
  modified_base 4063: mod_base = OTHER; note = N1-methylpseudouridine
  modified_base 4065: mod_base = OTHER; note = N1-methylpseudouridine
  modified_base 4071: mod_base = OTHER; note = N1-methylpseudouridine
  modified_base 4076: mod_base = OTHER; note = N1-methylpseudouridine
  modified_base 4077: mod_base = OTHER; note = N1-methylpseudouridine
  modified_base 4082: mod_base = OTHER; note = N1-methylpseudouridine
  modified_base 4084: mod_base = OTHER; note = N1-methylpseudouridine
  modified_base 4090: mod_base = OTHER; note = N1-methylpseudouridine
  modified_base 4091: mod_base = OTHER; note = N1-methylpseudouridine
ganaagaagnacagcancgggcnngccancggaaccaacncggncggcngggcngngancacngacgagnacaaggncccnnccaaaaagnncaaagngcncggcaacacngancggcacncgannaagaagaaccngancggngcacngcngnncgacncnggggagacngcggaagcaacncgccngaagaggacngcgcgcagacggnacaccaggcgcaagaaccggancngcnacnngcaagagannnncagcaacgaganggccaaggncgacgacncgnnnnnccaccggcncgaggaaagcnnccnggnggaggaaganaagaagcangagcgccancccancnncggaaacancgnggacgaagnggccnaccangagaagnacccgaccancnaccancngcgcaagaagcncgnggacagcacngacaaagccgacnngcgccngancnaccnngcccnggcccacangancaagnncagagggcacnnccngancgagggcgaccngaacccggacaannccgacgngganaagcngnncanccaacnggnacaaacnnacaaccagcngnnngaggagaacccgancaacgcnnccggcgnggacgcgaaggccanncngagcgcacggcngnccaagncccggagannagaaaaccnganngcccaacngccnggagaaaagaagaanggccngnncggaaaccngancgcccncncgcncggncngacccccaacnnnaagagcaacnncgaccnggcngaggacgcgaagcnccagcngnccaaggacaccnacgangangaccncganaancnccncgcccaaancggcgaccaanangcggaccngnnncnggccgccaagaancngnccgacgccanccnccngagcgananccngcgcgngaacacngaaancaccaaggccccacngagcgcnagcangannaagcgcnacgacgaacaccancaggaccncacccngcngaaggcncnngngcggcagcagcncccagagaagnacaaggagancnncnncgaccaancgaagaanggnnacgccggcnacanngacggaggagcgncacaggaggagnncnacaagnncannaagccaanccnggagaaganggacggaaccgaggaacngcncgngaagcngaacagagaagancnacngcgcaagcagcgcacnnncgacaacggancgancccacancaganncaccngggagagcngcacgcganccngcggagacaggaagannncnacccgnnccngaaggacaaccgcgagaagancgaaaaganccngaccnnccgcannccgnacnacgngggaccccncgcaagaggaaacncgcggnncgccnggangaccaggaagncggaagaaaccannacnccgnggaacnncgaggaagnggnggacaagggcgccncagcgcaanccnncancgaacggangaccaacnncgacaagaacnngccnaacgagaaagngcnnccnaagcanncccnccnnnacgaanacnncacngngnacaacgagcnnaccaaggncaaanangngaccgagggcangcgcaagccggccnnncnnnccggggagcaaaagaaggccancgnggaccngnngnncaagaccaaccggaaggncaccgncaagcagcngaaggaggacnacnnnaagaaaancgagngcnnngannccgncgaaancnccggagnggaaganaganncaacgccagccnaggcaccnaccacgancngcncaagancannaagganaaggannnccnggacaacgaggagaacgaggananccnggaggacanngngcngacccngacacngnncgaagancgcgaaangancgaggagcggcngaaaacanacgcccaccngnncgacgacaaggncangaagcagcncaagcggaggaggnacacggganggggaaggcngncccggaagcngancaacgggannagagacaagcagnccggaaagaccanncnggacnnccncaagncggacggcnncgcgaaccggaacnncangcaacnganccacgacgacncccngacgnncaaggaggacanncagaaggcccaagngnccggacagggaganncacngcacgaacacancgccaancnggcnggaagnccggccancaagaaaggcanccngcaaaccgngaaggncgnggacgagcncgngaaggncangggccgccacaagccngagaacancgngancgaaanggcccgggagaaccagaccacgcagaaagggcagaagaacagccgcgagaggangaagagaancgaggaaggaancaaggaacnnggaagccaganccngaaggaacaccccgnggaaaacacncagcnncaaaacgaaaagcngnaccncnacnancngcaaaacggacggganangnacgnggaccaggaannggacancaancgccngnccgacnacgangnggancacanngngccgcagagcnnncngaaggacganncaannganaacaaggngcncacccggnccgacaagaaccggggcaaaagcganaacgngccgagcgaagaggnggncaagaagangaagaannacnggcggcagcncnngaacgccaaacngancacccagcggaagnncgacaaccngaccaaggccgaaaggggcggncnnnccgaacnggacaaggccgggnnnancaagcgccaacnggnggaaacccggcagancacnaagcacgnggcccaganacnggacncnaggangaanaccaaanacgacgagaacgacaagcnganncgcgaagncaaagncannacccngaaanccaagcncgngnccgacnnccggaaggacnnccagnncnanaaggnncgcgaaancaacaacnaccaccacgcccangacgcgnaccngaacgccgncgngggnaccgcccngannaagaagnacccnaagcncgagnccgagnncgncnacggagacnacaaagngnacgacgngcggaagangancgccaagnccgagcaggaaanagggaaggccaccgccaagnacnncnncnacnccaacancangaacnncnncaagaccgagancacccnngccaacggggaganncggaagcgcccgnnganngagacnaacggagaaaccggcgaaanngngnggganaagggcagagacnnngcgacngngcgcaaagncnngncaangccccaagncaacanngncaaaaagaccgaagngcaaaccggcggcnncagcaaggaaagcanccngcccaagcgcaannccgacaagcncancgcccggaagaaggacngggaccccaagaaananggaggcnncgacncccccacngnggccnacnccgnccnggnggncgcgaaagnggaaaagggaaagncgaagaagcncaagnccgngaaggagcnccnggggancaccannanggaacggnccagcnncgagaagaacccganngacnnccnggaagccaagggnnacaaggaggncaagaaggancngannannaagcngccgaagnanncccncnncgaacncgaaaanggccgcaagcgaangnnggcancggcgggagagcnccagaagggaaacgaacnggccnngccnnccaaanacgngaacnnncngnaccnggccagccacnacgagaagcngaagggnncccccgaggacaacgagcagaagcagcngnncgnggagcagcacaagcacnaccnggangagancancgaacagancncggaanncnccaagagagnganccnggccgacgcgaaccngganaaggnccngnccgcgnacaacaagcaccgggacaagcccanccgggagcaggcngagaacannanccaccngnncacccncacnaaccnnggagcgccngccgcanncaagnacnncgacacaaccancgacagaaagcgcnacacnnccaccaaggaggngcnggacgccacccnganccaccagnccancacngggcncnangagacncgcanngaccngncccagnngggaggggac

SEQ ID NO: 2165 - protein, 1367 aa, synthetic construct; identical to SEQ ID NO: 40
  source 1..1367: note = Description of Artificial Sequence: Synthetic polypeptide

SEQ ID NO: 2166 - RNA, 12 nt, synthetic construct
  source 1..12: mol_type = other RNA; note = Description of Artificial Sequence: Synthetic oligonucleotide
  modified_base 12: mod_base = OTHER; note = N1-methylpseudouridine
gaaggagccgan

SEQ ID NO: 2167 - RNA, 57 nt, synthetic construct
  source 1..57: mol_type = other RNA; note = Description of Artificial Sequence: Synthetic oligonucleotide
  modified_base 15: mod_base = OTHER; note = N1-methylpseudouridine
  modified_base 19: mod_base = OTHER; note = N1-methylpseudouridine
  modified_base 25: mod_base = OTHER; note = N1-methylpseudouridine
  modified_base 26: mod_base = OTHER; note = N1-methylpseudouridine
  modified_base 31: mod_base = OTHER; note = N1-methylpseudouridine
  modified_base 53: mod_base = OTHER; note = N1-methylpseudouridine
  modified_base 55: mod_base = OTHER; note = N1-methylpseudouridine
aagagaaccgccgangggnccgaanncgagncgcccaagaagaagcggaaagngnaa

SEQ ID NO: 2168 - RNA, 4929 nt, synthetic construct
  source 1..4929: mol_type = other RNA; note = Description of Artificial Sequence: Synthetic polynucleotide
  modified_base 7: mod_base = OTHER; note = N1-methylpseudouridine
  modified_base 25: mod_base = OTHER; note = N1-methylpseudouridine
  modified_base 35: mod_base = OTHER; note = N1-methylpseudouridine
  modified_base 37: mod_base = OTHER; note = N1-methylpseudouridine
  modified_base 49: mod_base = OTHER; note = N1-methylpseudouridine
  modified_base 51: mod_base = OTHER; note = N1-methylpseudouridine
  modified_base 58: mod_base = OTHER; note = N1-methylpseudouridine
  modified_base 63: mod_base = OTHER; note = N1-methylpseudouridine
  modified_base 64: mod_base = OTHER; note = N1-methylpseudouridine
  modified_base 66: mod_base = OTHER; note = N1-methylpseudouridine
  modified_base 75: mod_base = OTHER; note = N1-methylpseudouridine
  modified_base 77: mod_base = OTHER; note = N1-methylpseudouridine
  modified_base 78: mod_base = OTHER; note = N1-methylpseudouridine
  modified_base 82: mod_base = OTHER; note = N1-methylpseudouridine
  modified_base 92: mod_base = OTHER; note = N1-methylpseudouridine
  modified_base 94: mod_base = OTHER; note = N1-methylpseudouridine
  modified_base 100: mod_base = OTHER; note = N1-methylpseudouridine
  modified_base 113: mod_base = OTHER; note = N1-methylpseudouridine
  modified_base 119: mod_base = OTHER; note = N1-methylpseudouridine
  modified_base 130: mod_base = OTHER; note = N1-methylpseudouridine
  modified_base 136: mod_base = OTHER; note = N1-methylpseudouridine
  modified_base 145: mod_base = OTHER; note = N1-methylpseudouridine
  modified_base 148: mod_base = OTHER; note = N1-methylpseudouridine
  modified_base 151: mod_base = OTHER; note = N1-methylpseudouridine
  modified_base 154: mod_base = OTHER; note = N1-methylpseudouridine
  modified_base 161: mod_base = OTHER; note = N1-methylpseudouridine
  modified_base 166: mod_base = OTHER; note = N1-methylpseudouridine
  modified_base 169: mod_base = OTHER; note = N1-methylpseudouridine
  modified_base 180: mod_base = OTHER; note = N1-methylpseudouridine
  modified_base 185: mod_base = OTHER; note = N1-methylpseudouridine
  modified_base 193: mod_base = OTHER; note = N1-methylpseudouridine
  modified_base 194: mod_base = OTHER; note = N1-methylpseudouridine
  modified_base 199: mod_base = OTHER; note = N1-methylpseudouridine
  modified_base 203: mod_base = OTHER; note = N1-methylpseudouridine
  modified_base 206: mod_base = OTHER; note = N1-methylpseudouridine
  modified_base 212: mod_base = OTHER; note = N1-methylpseudouridine
  modified_base 226: mod_base = OTHER; note = N1-methylpseudouridine
  modified_base 227: mod_base = OTHER; note = N1-methylpseudouridine
  modified_base 229: mod_base = OTHER; note = N1-methylpseudouridine
  modified_base 233: mod_base = OTHER; note = N1-methylpseudouridine
  modified_base 235: mod_base = OTHER; note = N1-methylpseudouridine
  modified_base 236: mod_base = OTHER; note = N1-methylpseudouridine
  modified_base 250: mod_base = OTHER; note = N1-methylpseudouridine
  modified_base 253: mod_base = OTHER; note = N1-methylpseudouridine
  modified_base 256: mod_base = OTHER; note = N1-methylpseudouridine
  modified_base 263: mod_base = OTHER; note = N1-methylpseudouridine
  modified_base 264: mod_base = OTHER; note = N1-methylpseudouridine
  modified_base 271: mod_base = OTHER; note = N1-methylpseudouridine
  modified_base 274: mod_base = OTHER; note = N1-methylpseudouridine
  modified_base 275: mod_base = OTHER; note = N1-methylpseudouridine
  modified_base 286: mod_base = OTHER; note = N1-methylpseudouridine
  modified_base 287: mod_base = OTHER; note = N1-methylpseudouridine
  modified_base 288: mod_base = OTHER; note = N1-methylpseudouridine
  modified_base 292: mod_base = OTHER; note = N1-methylpseudouridine
  modified_base 297: mod_base = OTHER; note = N1-methylpseudouridine
  modified_base 298: mod_base = OTHER; note = N1-methylpseudouridine
  modified_base 299: mod_base = OTHER; note = N1-methylpseudouridine
  modified_base 306: mod_base = OTHER; note = N1-methylpseudouridine
  modified_base 310: mod_base = OTHER; note = N1-methylpseudouridine
  modified_base 311: mod_base = OTHER; note = N1-methylpseudouridine
  modified_base 313: mod_base = OTHER; note = N1-methylpseudouridine
  modified_base 315: mod_base = OTHER; note = N1-methylpseudouridine
  modified_base 328: mod_base = OTHER; note = N1-methylpseudouridine
  modified_base 331: mod_base = OTHER; note = N1-methylpseudouridine
  modified_base 336: mod_base = OTHER; note = N1-methylpseudouridine
  modified_base 338: mod_base = OTHER; note = N1-methylpseudouridine
  modified_base 343: mod_base = OTHER; note = N1-methylpseudouridine
  modified_base 352: mod_base = OTHER; note = N1-methylpseudouridine
  modified_base 355: mod_base = OTHER; note = N1-methylpseudouridine
  modified_base 356: mod_base = OTHER; note = N1-methylpseudouridine
  modified_base 357: mod_base = OTHER; note = N1-methylpseudouridine
  modified_base 358: mod_base = OTHER; note = N1-methylpseudouridine
  modified_base 364: mod_base = OTHER; note = N1-methylpseudouridine
  modified_base 371: mod_base = OTHER; note = N1-methylpseudouridine
  modified_base 380: mod_base = OTHER; note = N1-methylpseudouridine
  modified_base 393: mod_base = OTHER; note = N1-methylpseudouridine
  modified_base 395: mod_base = OTHER; note = N1-methylpseudouridine
  modified_base 397: mod_base = OTHER; note = N1-methylpseudouridine
  modified_base 400: mod_base = OTHER; note = N1-methylpseudouridine
  modified_base 406: mod_base = OTHER; note = N1-methylpseudouridine
  modified_base 409: mod_base = OTHER; note = N1-methylpseudouridine
  modified_base 416: mod_base = OTHER; note = N1-methylpseudouridine
  modified_base 424: mod_base = OTHER; note = N1-methylpseudouridine
  modified_base 436: mod_base = OTHER; note = N1-methylpseudouridine
  modified_base 442: mod_base = OTHER; note = N1-methylpseudouridine
  modified_base 454: mod_base = OTHER; note = N1-methylpseudouridine
  modified_base 456: mod_base = OTHER; note = N1-methylpseudouridine
  modified_base 457: mod_base = OTHER; note = N1-methylpseudouridine
  modified_base 468: mod_base = OTHER; note = N1-methylpseudouridine
  modified_base 470: mod_base = OTHER; note = N1-methylpseudouridine
  modified_base 473: mod_base = OTHER; note = N1-methylpseudouridine
  modified_base 478: mod_base = OTHER; note = N1-methylpseudouridine
  modified_base 481: mod_base = OTHER; note = N1-methylpseudouridine
  modified_base 482: mod_base = OTHER; note = N1-methylpseudouridine
  modified_base 483: mod_base = OTHER; note = N1-methylpseudouridine
  modified_base 489: mod_base = OTHER; note = N1-methylpseudouridine
  modified_base 490: mod_base = OTHER; note = N1-methylpseudouridine
  modified_base 492: mod_base = OTHER; note = N1-methylpseudouridine
  modified_base 493: mod_base = OTHER; note = N1-methylpseudouridine
  modified_base 499: mod_base = OTHER; note = N1-methylpseudouridine
  modified_base 511: mod_base = OTHER; note = N1-methylpseudouridine
  modified_base 513: mod_base = OTHER; note = N1-methylpseudouridine
  modified_base 514: mod_base = OTHER; note = N1-methylpseudouridine
  modified_base 537: mod_base = OTHER; note = N1-methylpseudouridine
  modified_base 545: mod_base = OTHER; note = N1-methylpseudouridine
  modified_base 548: mod_base = OTHER; note = N1-methylpseudouridine
  modified_base 551: mod_base = OTHER; note = N1-methylpseudouridine
  modified_base 560: mod_base = OTHER; note = N1-methylpseudouridine
  modified_base 561: mod_base = OTHER; note = N1-methylpseudouridine
  modified_base 570: mod_base = OTHER; note = N1-methylpseudouridine
  modified_base 572: mod_base = OTHER; note = N1-methylpseudouridine
  modified_base 575: mod_base = OTHER; note = N1-methylpseudouridine
  modified_base 579: mod_base = OTHER; note = N1-methylpseudouridine
  modified_base 597: mod_base = OTHER; note = N1-methylpseudouridine
  modified_base 603: mod_base = OTHER; note = N1-methylpseudouridine
  modified_base 611: mod_base = OTHER; note = N1-methylpseudouridine
  modified_base 620: mod_base = OTHER; note = N1-methylpseudouridine
  modified_base 621: mod_base = OTHER; note = N1-methylpseudouridine
  modified_base 630: mod_base = OTHER; note = N1-methylpseudouridine
  modified_base 633: mod_base = OTHER; note = N1-methylpseudouridine
  modified_base 654: mod_base = OTHER; note = N1-methylpseudouridine
  modified_base 657: mod_base = OTHER; note = N1-methylpseudouridine
  modified_base 661: mod_base = OTHER; note = N1-methylpseudouridine
  modified_base 662: mod_base = OTHER; note = N1-methylpseudouridine
  modified_base 665: mod_base = OTHER; note = N1-methylpseudouridine
  modified_base 667: mod_base = OTHER; note = N1-methylpseudouridine
  modified_base 673: mod_base = OTHER; note = N1-methylpseudouridine
  modified_base 677: mod_base = OTHER; note = N1-methylpseudouridine
  modified_base 683: mod_base = OTHER; note = N1-methylpseudouridine
  modified_base 686: mod_base = OTHER; note = N1-methylpseudouridine
  modified_base 688: mod_base = OTHER; note = N1-methylpseudouridine
  modified_base 689: mod_base = OTHER; note = N1-methylpseudouridine
  modified_base 693: mod_base = OTHER; note = N1-methylpseudouridine
  modified_base 698: mod_base = OTHER; note = N1-methylpseudouridine
  modified_base 700: mod_base = OTHER; note = N1-methylpseudouridine
  modified_base 703: mod_base = OTHER; note = N1-methylpseudouridine
  modified_base 707: mod_base = OTHER; note = N1-methylpseudouridine
  modified_base 714: mod_base = OTHER; note = N1-methylpseudouridine
  modified_base 716: mod_base = OTHER; note = N1-methylpseudouridine
  modified_base 721: mod_base = OTHER; note = N1-methylpseudouridine
  modified_base 728: mod_base = OTHER; note = N1-methylpseudouridine
  modified_base 735: mod_base = OTHER; note = N1-methylpseudouridine
  modified_base 736: mod_base = OTHER; note = N1-methylpseudouridine
  modified_base 742: mod_base = OTHER; note = N1-methylpseudouridine
  modified_base 745: mod_base = OTHER; note = N1-methylpseudouridine
  modified_base 764: mod_base = OTHER; note = N1-methylpseudouridine
  modified_base 769: mod_base = OTHER; note = N1-methylpseudouridine
  modified_base 781: mod_base = OTHER; note = N1-methylpseudouridine
  modified_base 784: mod_base = OTHER; note = N1-methylpseudouridine
  modified_base 788: mod_base = OTHER; note = N1-methylpseudouridine
  modified_base 793: mod_base = OTHER; note = N1-methylpseudouridine
  modified_base 795: mod_base = OTHER; note = N1-methylpseudouridine
  modified_base 796: mod_base = OTHER; note = N1-methylpseudouridine
  modified_base 798: mod_base = OTHER; note = N1-methylpseudouridine
  modified_base 799: mod_base = OTHER; note = N1-methylpseudouridine
  modified_base 800: mod_base = OTHER; note = N1-methylpseudouridine
  modified_base 804: mod_base = OTHER; note = N1-methylpseudouridine
  modified_base 832: mod_base = OTHER; note = N1-methylpseudouridine
  modified_base 833: mod_base = OTHER; note = N1-methylpseudouridine
  modified_base 845: mod_base = OTHER; note = N1-methylpseudouridine
  modified_base 855: mod_base = OTHER; note = N1-methylpseudouridine
  modified_base 872: mod_base = OTHER; note = N1-methylpseudouridine
  modified_base 877: mod_base = OTHER; note = N1-methylpseudouridine
  modified_base 878: mod_base = OTHER; note = N1-methylpseudouridine
  modified_base 879: mod_base = OTHER; note = N1-methylpseudouridine
  modified_base 881: mod_base = OTHER; note = N1-methylpseudouridine
  modified_base 882: mod_base = OTHER; note = N1-methylpseudouridine
  modified_base 886: mod_base = OTHER; note = N1-methylpseudouridine
  modified_base 895: mod_base = OTHER; note = N1-methylpseudouridine
  modified_base 897: mod_base = OTHER; note = N1-methylpseudouridine
  modified_base 898: mod_base = OTHER; note = N1-methylpseudouridine
  modified_base 899: mod_base = OTHER; note = N1-methylpseudouridine
  modified_base 910: mod_base = OTHER; note = N1-methylpseudouridine
  modified_base 919: mod_base = OTHER; note = N1-methylpseudouridine
  modified_base 920: mod_base = OTHER; note = N1-methylpseudouridine
  modified_base 926: mod_base = OTHER; note = N1-methylpseudouridine
  modified_base 927: mod_base = OTHER; note = N1-methylpseudouridine
  modified_base 930: mod_base = OTHER; note = N1-methylpseudouridine
  modified_base 931: mod_base = OTHER; note = N1-methylpseudouridine
  modified_base 933: mod_base = OTHER; note = N1-methylpseudouridine
  modified_base 934: mod_base = OTHER; note = N1-methylpseudouridine
  modified_base 943: mod_base = OTHER; note = N1-methylpseudouridine
  modified_base 944: mod_base = OTHER; note = N1-methylpseudouridine
  modified_base 951: mod_base = OTHER; note = N1-methylpseudouridine
  modified_base 953: mod_base = OTHER; note = N1-methylpseudouridine
  modified_base 954: mod_base = OTHER; note = N1-methylpseudouridine
  modified_base 955: mod_base = OTHER; note = N1-methylpseudouridine
  modified_base 958: mod_base = OTHER; note = N1-methylpseudouridine
  modified_base 961: mod_base = OTHER; note = N1-methylpseudouridine
  modified_base 980: mod_base = OTHER; note = N1-methylpseudouridine
  modified_base 994: mod_base = OTHER; note = N1-methylpseudouridine
  modified_base 996: mod_base = OTHER; note = N1-methylpseudouridine
  modified_base 997: mod_base = OTHER; note = N1-methylpseudouridine
  modified_base 998: mod_base = OTHER; note = N1-methylpseudouridine
  modified_base 1004: mod_base = OTHER; note = N1-methylpseudouridine
  modified_base 1006: mod_base = OTHER; note = N1-methylpseudouridine
  modified_base 1009: mod_base = OTHER; note = N1-methylpseudouridine
  modified_base 1018: mod_base = OTHER; note = N1-methylpseudouridine
  modified_base 1023: mod_base = OTHER; note = N1-methylpseudouridine
  modified_base 1028: mod_base = OTHER; note = N1-methylpseudouridine
  modified_base 1035: mod_base = OTHER; note = N1-methylpseudouridine
  modified_base 1040: mod_base = OTHER; note = N1-methylpseudouridine
  modified_base 1045: mod_base = OTHER; note = N1-methylpseudouridine
  modified_base 1047: mod_base = OTHER; note = N1-methylpseudouridine
  modified_base 1049: mod_base = OTHER; note = N1-methylpseudouridine
  modified_base 1052: mod_base = OTHER; note = N1-methylpseudouridine
  modified_base 1054: mod_base = OTHER; note = N1-methylpseudouridine
  modified_base 1055: mod_base = OTHER; note = N1-methylpseudouridine
  modified_base 1066: mod_base = OTHER; note = N1-methylpseudouridine
  modified_base 1067: mod_base = OTHER; note = N1-methylpseudouridine
  modified_base 1069: mod_base = OTHER; note = N1-methylpseudouridine
  modified_base 1073: mod_base = OTHER; note = N1-methylpseudouridine
  modified_base 1074: mod_base = OTHER; note = N1-methylpseudouridine
  modified_base 1082: mod_base = OTHER; note = N1-methylpseudouridine
  modified_base 1091: mod_base = OTHER; note = N1-methylpseudouridine
  modified_base 1093: mod_base = OTHER; note = N1-methylpseudouridine
  modified_base 1098: mod_base = OTHER; note = N1-methylpseudouridine
  modified_base 1099: mod_base = OTHER; note = N1-methylpseudouridine
  modified_base 1102: mod_base = OTHER; note = N1-methylpseudouridine
  modified_base 1104: mod_base = OTHER; note = N1-methylpseudouridine
  modified_base 1106: mod_base = OTHER; note = N1-methylpseudouridine
  modified_base 1108: mod_base = OTHER; note = N1-methylpseudouridine
  modified_base 1114: mod_base = OTHER; note = N1-methylpseudouridine
  modified_base 1123: mod_base = OTHER; note = N1-methylpseudouridine
  modified_base 1126: mod_base = OTHER; note = N1-methylpseudouridine
  modified_base 1131: mod_base = OTHER; note = N1-methylpseudouridine
  modified_base 1132: mod_base = OTHER; note = N1-methylpseudouridine
  modified_base 1133: mod_base = OTHER; note = N1-methylpseudouridine
  modified_base 1139: mod_base = OTHER; note = N1-methylpseudouridine
  modified_base 1143: mod_base = OTHER; note = N1-methylpseudouridine
  modified_base 1144: mod_base = OTHER; note = N1-methylpseudouridine
  modified_base 1145: mod_base = OTHER; note = N1-methylpseudouridine
  modified_base 1147: mod_base = OTHER; note = N1-methylpseudouridine
  modified_base 1148: mod_base = OTHER; note = N1-methylpseudouridine
  modified_base 1150: mod_base = OTHER; note = N1-methylpseudouridine
  modified_base 1160: mod_base = OTHER; note = N1-methylpseudouridine
  modified_base 1162: mod_base = OTHER; note = N1-methylpseudouridine
  modified_base 1163: mod_base = OTHER; note = N1-methylpseudouridine
  modified_base 1166: mod_base = OTHER; note = N1-methylpseudouridine
  modified_base 1176: mod_base = OTHER; note = N1-methylpseudouridine
  modified_base 1183: mod_base = OTHER; note = N1-methylpseudouridine
  modified_base 1187: mod_base = OTHER; note = N1-methylpseudouridine
  modified_base 1192: mod_base = OTHER; note = N1-methylpseudouridine
  modified_base 1194: mod_base = OTHER; note = N1-methylpseudouridine
  modified_base 1195: mod_base = OTHER; note = N1-methylpseudouridine
  modified_base 1198: mod_base = OTHER; note = N1-methylpseudouridine
  modified_base 1204: mod_base = OTHER; note = N1-methylpseudouridine
  modified_base 1207: mod_base = OTHER; note = N1-methylpseudouridine
  modified_base 1215: mod_base = OTHER; note = N1-methylpseudouridine
  modified_base 1217: mod_base = OTHER; note = N1-methylpseudouridine
  modified_base 1225: mod_base = OTHER; note = N1-methylpseudouridine
  modified_base 1227: mod_base = OTHER; note = N1-methylpseudouridine
  modified_base 1228: mod_base = OTHER; note = N1-methylpseudouridine
  modified_base 1238: mod_base = OTHER; note = N1-methylpseudouridine
  modified_base 1243: mod_base = OTHER; note = N1-methylpseudouridine
  modified_base 1247: mod_base = OTHER; note = N1-methylpseudouridine
  modified_base 1251: mod_base = OTHER; note = N1-methylpseudouridine
  modified_base 1253: mod_base = OTHER; note = N1-methylpseudouridine
  modified_base 1258: mod_base = OTHER; note = N1-methylpseudouridine
  modified_base 1273: mod_base = OTHER; note = N1-methylpseudouridine
  modified_base 1276: mod_base = OTHER; note = N1-methylpseudouridine
  modified_base 1278: mod_base = OTHER; note = N1-methylpseudouridine
  modified_base 1288: mod_base = OTHER; note = N1-methylpseudouridine
  modified_base 1289: mod_base = OTHER; note = N1-methylpseudouridine
  modified_base 1292: mod_base = OTHER; note = N1-methylpseudouridine
  modified_base 1296: mod_base = OTHER; note = N1-methylpseudouridine
  modified_base 1298: mod_base = OTHER; note = N1-methylpseudouridine
  modified_base 1306: mod_base = OTHER; note = N1-methylpseudouridine
  modified_base 1307: mod_base = OTHER; note = N1-methylpseudouridine
  modified_base 1315: mod_base = OTHER; note = N1-methylpseudouridine
  modified_base 1318: mod_base = OTHER; note = N1-methylpseudouridine
  modified_base 1326: mod_base = OTHER; note = N1-methylpseudouridine
  modified_base 1327: mod_base = OTHER; note = N1-methylpseudouridine
  modified_base 1346: mod_base = OTHER; note = N1-methylpseudouridine
  modified_base 1350: mod_base = OTHER; note = N1-methylpseudouridine
  modified_base 1351: mod_base = OTHER; note = N1-methylpseudouridine
  modified_base 1353: mod_base = OTHER; note = N1-methylpseudouridine
  modified_base 1354: mod_base = OTHER; note = N1-methylpseudouridine
  modified_base 1355: mod_base = OTHER; note = N1-methylpseudouridine
  modified_base 1358: mod_base = OTHER; note = N1-methylpseudouridine
  modified_base 1363: mod_base = OTHER; note = N1-methylpseudouridine
  modified_base 1364: mod_base = OTHER; note = N1-methylpseudouridine
  modified_base 1366: mod_base = OTHER; note = N1-methylpseudouridine
  modified_base 1367: mod_base = OTHER; note = N1-methylpseudouridine
  modified_base 1372: mod_base = OTHER; note = N1-methylpseudouridine
  modified_base 1376: mod_base = OTHER; note = N1-methylpseudouridine
  modified_base 1378: mod_base = OTHER; note = N1-methylpseudouridine
  modified_base 1384: mod_base = OTHER; note = N1-methylpseudouridine
  modified_base 1385: mod_base = OTHER; note = N1-methylpseudouridine
  modified_base 1391: mod_base = OTHER; note = N1-methylpseudouridine
  modified_base 1395: mod_base = OTHER; note = N1-methylpseudouridine
  modified_base 1396: mod_base = OTHER; note = N1-methylpseudouridine
  modified_base 1401: mod_base = OTHER; note = N1-methylpseudouridine
  modified_base 1407: mod_base = OTHER; note = N1-methylpseudouridine
  modified_base 1408: mod_base = OTHER; note = N1-methylpseudouridine
  modified_base 1412: mod_base = OTHER; note = N1-methylpseudouridine
  modified_base 1414: mod_base = OTHER; note = N1-methylpseudouridine
  modified_base 1415: mod_base = OTHER; note = N1-methylpseudouridine
  modified_base 1432: mod_base = OTHER; note = N1-methylpseudouridine
  modified_base 1438: mod_base = OTHER; note = N1-methylpseudouridine
  modified_base 1439: mod_base = OTHER; note = N1-methylpseudouridine
  modified_base 1448: mod_base = OTHER; note = N1-methylpseudouridine
  modified_base 1452: mod_base = OTHER; note = N1-methylpseudouridine
  modified_base 1457: mod_base = OTHER; note = N1-methylpseudouridine
  modified_base 1463: mod_base = OTHER; note = N1-methylpseudouridine
  modified_base 1465: mod_base = OTHER; note = N1-methylpseudouridine
  modified_base 1466: mod_base = OTHER; note = N1-methylpseudouridine
  modified_base 1469: mod_base = OTHER; note = N1-methylpseudouridine
  modified_base 1474: mod_base = OTHER; note = N1-methylpseudouridine
  modified_base 1477: mod_base = OTHER; note = N1-methylpseudouridine
  modified_base 1486: mod_base = OTHER; note = N1-methylpseudouridine
  modified_base 1497: mod_base = OTHER; note = N1-methylpseudouridine
  modified_base 1507: mod_base = OTHER; note = N1-methylpseudouridine
  modified_base 1508: mod_base = OTHER; note = N1-methylpseudouridine
  modified_base 1509: mod_base = OTHER; note = N1-methylpseudouridine
  modified_base 1510: mod_base = OTHER; note = N1-methylpseudouridine
  modified_base 1512: mod_base = OTHER; note = N1-methylpseudouridine
  modified_base 1513: mod_base = OTHER; note = N1-methylpseudouridine
  modified_base 1526: mod_base = OTHER; note = N1-methylpseudouridine
  modified_base 1527: mod_base = OTHER; note = N1-methylpseudouridine
  modified_base 1528: mod_base = OTHER; note = N1-methylpseudouridine
  modified_base 1530: mod_base = OTHER; note = N1-methylpseudouridine
  modified_base 1540: mod_base = OTHER; note = N1-methylpseudouridine
  modified_base 1543: mod_base = OTHER; note = N1-methylpseudouridine
  modified_base 1545: mod_base = OTHER; note = N1-methylpseudouridine
  modified_base 1546: mod_base = OTHER; note = N1-methylpseudouridine
  modified_base 1555: mod_base = OTHER; note = N1-methylpseudouridine
  modified_base 1558: mod_base = OTHER; note = N1-methylpseudouridine
  modified_base 1564: mod_base = OTHER; note = N1-methylpseudouridine
  modified_base 1571: mod_base = OTHER; note = N1-methylpseudouridine
  modified_base 1576: mod_base = OTHER; note = N1-methylpseudouridine
  modified_base 1577: mod_base = OTHER; note = N1-methylpseudouridine
  modified_base 1580: mod_base = OTHER; note = N1-methylpseudouridine
  modified_base 1591: mod_base = OTHER; note = N1-methylpseudouridine
  modified_base 1592: mod_base = OTHER; note = N1-methylpseudouridine
  modified_base 1593: mod_base = OTHER; note = N1-methylpseudouridine
  modified_base 1603: mod_base = OTHER; note = N1-methylpseudouridine
  modified_base 1606: mod_base = OTHER; note = N1-methylpseudouridine
  modified_base 1614: mod_base = OTHER; note = N1-methylpseudouridine
  modified_base 1619: mod_base = OTHER; note = N1-methylpseudouridine
  modified_base 1625: mod_base = OTHER; note = N1-methylpseudouridine
  modified_base 1628: mod_base = OTHER; note = N1-methylpseudouridine
  modified_base 1634: mod_base = OTHER; note = N1-methylpseudouridine
  modified_base 1636: mod_base = OTHER; note = N1-methylpseudouridine
  modified_base 1642: mod_base = OTHER; note = N1-methylpseudouridine
  modified_base 1645: mod_base = OTHER; note = N1-methylpseudouridine
  modified_base 1646: mod_base = OTHER; note = N1-methylpseudouridine
  modified_base 1654: mod_base = OTHER; note = N1-methylpseudouridine
  modified_base 1655: mod_base = OTHER; note = N1-methylpseudouridine
  modified_base 1657: mod_base = OTHER; note = N1-methylpseudouridine
  modified_base 1668: mod_base = OTHER; note = N1-methylpseudouridine
  modified_base 1669: mod_base = OTHER; note = N1-methylpseudouridine
  modified_base 1673: mod_base = OTHER; note = N1-methylpseudouridine
  modified_base 1680: mod_base = OTHER; note = N1-methylpseudouridine
  modified_base 1682: mod_base = OTHER; note = N1-methylpseudouridine
  modified_base 1690: mod_base = OTHER; note = N1-methylpseudouridine
  modified_base 1692: mod_base = OTHER; note = N1-methylpseudouridine
  modified_base 1693: mod_base = OTHER; note = N1-methylpseudouridine
  modified_base 1694: mod_base = OTHER; note = N1-methylpseudouridine
  modified_base 1695: mod_base = OTHER; note = N1-methylpseudouridine
  modified_base 1696: mod_base = OTHER; note = N1-methylpseudouridine
  modified_base 1715: mod_base = OTHER; note = N1-methylpseudouridine
  modified_base 1716: mod_base = OTHER; note = N1-methylpseudouridine
  modified_base 1718: mod_base = OTHER; note = N1-methylpseudouridine
  modified_base 1721: mod_base = OTHER; note = N1-methylpseudouridine
  modified_base 1725: mod_base = OTHER; note = N1-methylpseudouridine
  modified_base 1729: mod_base = OTHER; note = N1-methylpseudouridine
  modified_base 1742: mod_base = OTHER; note = N1-methylpseudouridine
  modified_base 1743: mod_base = OTHER; note = N1-methylpseudouridine
  modified_base 1745: mod_base = OTHER; note = N1-methylpseudouridine
  modified_base 1755: mod_base = OTHER; note = N1-methylpseudouridine
  modified_base 1756: mod_base = OTHER; note = N1-methylpseudouridine
  modified_base 1758: mod_base = OTHER; note = N1-methylpseudouridine
  modified_base 1764: mod_base = OTHER; note = N1-methylpseudouridine
  modified_base 1765: mod_base = OTHER; note = N1-methylpseudouridine
  modified_base 1766: mod_base = OTHER; note = N1-methylpseudouridine
  modified_base 1768: mod_base = OTHER; note = N1-methylpseudouridine
  modified_base 1777: mod_base = OTHER; note = N1-methylpseudouridine
  modified_base 1778: mod_base = OTHER; note = N1-methylpseudouridine
  modified_base 1780: mod_base = OTHER; note = N1-methylpseudouridine
  modified_base 1789: mod_base = OTHER; note = N1-methylpseudouridine
  modified_base 1793: mod_base = OTHER; note = N1-methylpseudouridine
  modified_base 1807: mod_base = OTHER; note = N1-methylpseudouridine
  modified_base 1809: mod_base = OTHER; note = N1-methylpseudouridine
  modified_base 1810: mod_base = OTHER; note = N1-methylpseudouridine
  modified_base 1813: mod_base = OTHER; note = N1-methylpseudouridine
  modified_base 1819: mod_base = OTHER; note = N1-methylpseudouridine
  modified_base 1834: mod_base = OTHER; note = N1-methylpseudouridine
  modified_base 1837: mod_base = OTHER; note = N1-methylpseudouridine
  modified_base 1854: mod_base = OTHER; note = N1-methylpseudouridine
  modified_base 1855: mod_base = OTHER; note = N1-methylpseudouridine
  modified_base 1859: mod_base = OTHER; note = N1-methylpseudouridine
  modified_base 1862: mod_base = OTHER; note = N1-methylpseudouridine
  modified_base 1870: mod_base = OTHER; note = N1-methylpseudouridine
  modified_base 1882: mod_base = OTHER; note = N1-methylpseudouridine
  modified_base 1883: mod_base = OTHER; note = N1-methylpseudouridine
  modified_base 1886: mod_base = OTHER; note = N1-methylpseudouridine
  modified_base 1887: mod_base = OTHER; note = N1-methylpseudouridine
  modified_base 1888: mod_base = OTHER; note = N1-methylpseudouridine
  modified_base 1892: mod_base = OTHER; note = N1-methylpseudouridine
  modified_base 1897: mod_base = OTHER; note = N1-methylpseudouridine
  modified_base 1901: mod_base = OTHER; note = N1-methylpseudouridine
  modified_base 1906: mod_base = OTHER; note = N1-methylpseudouridine
  modified_base 1908: mod_base = OTHER; note = N1-methylpseudouridine
  modified_base 1909: mod_base = OTHER; note = N1-methylpseudouridine
  modified_base 1925: mod_base = OTHER; note = N1-methylpseudouridine
  modified_base 1926: mod_base = OTHER; note = N1-methylpseudouridine
  modified_base 1927: mod_base = OTHER; note = N1-methylpseudouridine
  modified_base 1928: mod_base = OTHER; note = N1-methylpseudouridine
  modified_base 1929: mod_base = OTHER; note = N1-methylpseudouridine
  modified_base 1935: mod_base = OTHER; note = N1-methylpseudouridine
  modified_base 1936: mod_base = OTHER; note = N1-methylpseudouridine
  modified_base 1939: mod_base = OTHER; note = N1-methylpseudouridine
  modified_base 1949: mod_base = OTHER; note = N1-methylpseudouridine
  modified_base 1960: mod_base = OTHER; note = N1-methylpseudouridine
  modified_base 1961: mod_base = OTHER; note = N1-methylpseudouridine
  modified_base 1969: mod_base = OTHER; note = N1-methylpseudouridine
  modified_base 1972: mod_base = OTHER; note = N1-methylpseudouridine
  modified_base 1973: mod_base = OTHER; note = N1-methylpseudouridine
  modified_base 1977: mod_base = OTHER; note = N1-methylpseudouridine
  modified_base 1978: mod_base = OTHER; note = N1-methylpseudouridine
  modified_base 1979: mod_base = OTHER; note = N1-methylpseudouridine
  modified_base 1984: mod_base = OTHER; note = N1-methylpseudouridine
  modified_base 1985: mod_base = OTHER; note = N1-methylpseudouridine
  modified_base 1989: mod_base = OTHER; note = N1-methylpseudouridine
  modified_base 1991: mod_base = OTHER; note = N1-methylpseudouridine
  modified_base 1992: mod_base = OTHER; note = N1-methylpseudouridine
  modified_base 1996: mod_base = OTHER; note = N1-methylpseudouridine
  modified_base 2005: mod_base = OTHER; note = N1-methylpseudouridine
  modified_base 2015: mod_base = OTHER; note = N1-methylpseudouridine
  modified_base 2018: mod_base = OTHER; note = N1-methylpseudouridine
  modified_base 2019: mod_base = OTHER; note = N1-methylpseudouridine
  modified_base 2021: mod_base = OTHER; note = N1-methylpseudouridine
  modified_base 2025: mod_base = OTHER; note = N1-methylpseudouridine
  modified_base 2026: mod_base = OTHER; note = N1-methylpseudouridine
  modified_base 2027: mod_base = OTHER; note = N1-methylpseudouridine
  modified_base 2031: mod_base = OTHER; note = N1-methylpseudouridine
  modified_base 2035: mod_base = OTHER; note = N1-methylpseudouridine
  modified_base 2059: mod_base = OTHER; note = N1-methylpseudouridine
  modified_base 2067: mod_base = OTHER; note = N1-methylpseudouridine
  modified_base 2073: mod_base = OTHER; note = N1-methylpseudouridine
  modified_base 2074: mod_base = OTHER; note = N1-methylpseudouridine
  modified_base 2075: mod_base = OTHER; note = N1-methylpseudouridine
  modified_base 2083: mod_base = OTHER; note = N1-methylpseudouridine
  modified_base 2086: mod_base = OTHER; note = N1-methylpseudouridine
  modified_base 2090: mod_base = OTHER; note = N1-methylpseudouridine
  modified_base 2096: mod_base = OTHER; note = N1-methylpseudouridine
  modified_base 2109: mod_base = OTHER; note = N1-methylpseudouridine
  modified_base 2112: mod_base = OTHER; note = N1-methylpseudouridine
  modified_base 2113: mod_base = OTHER; note = N1-methylpseudouridine
  modified_base 2114: mod_base = OTHER; note = N1-methylpseudouridine
  modified_base 2116: mod_base = OTHER; note = N1-methylpseudouridine
  modified_base 2125: mod_base = OTHER; note = N1-methylpseudouridine
  modified_base 2129: mod_base = OTHER; note = N1-methylpseudouridine
  modified_base 2132: mod_base = OTHER; note = N1-methylpseudouridine
  modified_base 2133: mod_base = OTHER; note = N1-methylpseudouridine
  modified_base 2134: mod_base = OTHER; note = N1-methylpseudouridine
  modified_base 2138: mod_base = OTHER; note = N1-methylpseudouridine
  modified_base 2144: mod_base = OTHER; note = N1-methylpseudouridine
  modified_base 2146: mod_base = OTHER; note = N1-methylpseudouridine
  modified_base 2153: mod_base = OTHER; note = N1-methylpseudouridine
  modified_base 2161: mod_base = OTHER; note = N1-methylpseudouridine
  modified_base 2163: mod_base = OTHER; note = N1-methylpseudouridine
  modified_base 2164: mod_base = OTHER; note = N1-methylpseudouridine
  modified_base 2174: mod_base = OTHER; note = N1-methylpseudouridine
  modified_base 2179: mod_base = OTHER; note = N1-methylpseudouridine
  modified_base 2180: mod_base = OTHER; note = N1-methylpseudouridine
  modified_base 2181: mod_base = OTHER; note = N1-methylpseudouridine
  modified_base 2182: mod_base = OTHER; note = N1-methylpseudouridine
  modified_base 2184: mod_base = OTHER; note = N1-methylpseudouridine
  modified_base 2186: mod_base = OTHER; note = N1-methylpseudouridine
  modified_base 2190: mod_base = OTHER; note = N1-methylpseudouridine
  modified_base 2192: mod_base = OTHER; note = N1-methylpseudouridine
  modified_base 2193: mod_base = OTHER; note = N1-methylpseudouridine
  modified_base 2194: mod_base = OTHER; note = N1-methylpseudouridine
  modified_base 2195: mod_base = OTHER; note = N1-methylpseudouridine
  modified_base 2198: mod_base = OTHER; note = N1-methylpseudouridine
  modified_base 2200: mod_base = OTHER; note = N1-methylpseudouridine
  modified_base 2202: mod_base = OTHER; note = N1-methylpseudouridine
  modified_base 2212: mod_base = OTHER; note = N1-methylpseudouridine
  modified_base 2221: mod_base = OTHER; note = N1-methylpseudouridine
  modified_base 2226: mod_base = OTHER; note = N1-methylpseudouridine
  modified_base 2228: mod_base = OTHER; note = N1-methylpseudouridine
  modified_base 2230: mod_base = OTHER; note = N1-methylpseudouridine
  modified_base 2234: mod_base = OTHER; note = N1-methylpseudouridine
  modified_base 2242: mod_base = OTHER; note = N1-methylpseudouridine
  modified_base 2256: mod_base = OTHER; note = N1-methylpseudouridine
  modified_base 2257: mod_base = OTHER; note = N1-methylpseudouridine
  modified_base 2258: mod_base = OTHER; note = N1-methylpseudouridine
  modified_base 2259: mod_base = OTHER; note = N1-methylpseudouridine
  modified_base 2260: mod_base = OTHER; note = N1-methylpseudouridine
  modified_base 2282: mod_base = OTHER; note = N1-methylpseudouridine
  modified_base 2284: mod_base = OTHER; note = N1-methylpseudouridine
  modified_base 2285: mod_base = OTHER; note = N1-methylpseudouridine
  modified_base 2287: mod_base = OTHER; note = N1-methylpseudouridine
  modified_base 2292: mod_base = OTHER; note = N1-methylpseudouridine
  modified_base 2293: mod_base = OTHER; note = N1-methylpseudouridine
  modified_base 2296: mod_base = OTHER; note = N1-methylpseudouridine
  modified_base 2297: mod_base = OTHER; note = N1-methylpseudouridine
  modified_base 2298: mod_base = OTHER; note = N1-methylpseudouridine
  modified_base 2299: mod_base = OTHER; note = N1-methylpseudouridine
  modified_base 2300: mod_base = OTHER; note = N1-methylpseudouridine
  modified_base 2309: mod_base = OTHER; note = N1-methylpseudouridine
  modified_base 2317: mod_base = OTHER; note = N1-methylpseudouridine
  modified_base 2318: mod_base = OTHER; note = N1-methylpseudouridine
  modified_base 2323: mod_base = OTHER; note = N1-methylpseudouridine
  modified_base 2332: mod_base = OTHER; note = N1-methylpseudouridine
  modified_base 2343: mod_base = OTHER; note = N1-methylpseudouridine
  modified_base 2346: mod_base = OTHER; note = N1-methylpseudouridine
  modified_base 2347: mod_base = OTHER; note = N1-methylpseudouridine
  modified_base 2348: mod_base = OTHER; note = N1-methylpseudouridine
  modified_base 2356: mod_base = OTHER; note = N1-methylpseudouridine
  modified_base 2361: mod_base = OTHER; note = N1-methylpseudouridine
  modified_base 2364: mod_base = OTHER; note = N1-methylpseudouridine
  modified_base 2365: mod_base = OTHER; note = N1-methylpseudouridine
  modified_base 2366: mod_base = OTHER; note = N1-methylpseudouridine
  modified_base 2370: mod_base = OTHER; note = N1-methylpseudouridine
  modified_base 2372: mod_base = OTHER; note = N1-methylpseudouridine
  modified_base 2374: mod_base = OTHER; note = N1-methylpseudouridine
  modified_base 2380: mod_base = OTHER; note = N1-methylpseudouridine
  modified_base 2381: mod_base = OTHER; note = N1-methylpseudouridine
  modified_base 2384: mod_base = OTHER; note = N1-methylpseudouridine
  modified_base 2389: mod_base = OTHER; note = N1-methylpseudouridine
  modified_base 2396: mod_base = OTHER; note = N1-methylpseudouridine
  modified_base 2400: mod_base = OTHER; note = N1-methylpseudouridine
  modified_base 2401: mod_base = OTHER; note = N1-methylpseudouridine
  modified_base 2405: mod_base = OTHER; note = N1-methylpseudouridine
  modified_base 2413: mod_base = OTHER; note = N1-methylpseudouridine
  modified_base 2421: mod_base = OTHER; note = N1-methylpseudouridine
  modified_base 2429: mod_base = OTHER; note = N1-methylpseudouridine
  modified_base 2431: mod_base = OTHER; note = N1-methylpseudouridine
  modified_base 2433: mod_base = OTHER; note = N1-methylpseudouridine
  modified_base 2434: mod_base = OTHER; note = N1-methylpseudouridine
  modified_base 2440: mod_base = OTHER; note = N1-methylpseudouridine
  modified_base 2441: mod_base = OTHER; note = N1-methylpseudouridine
  modified_base 2443: mod_base = OTHER; note = N1-methylpseudouridine
  modified_base 2450: mod_base = OTHER; note = N1-methylpseudouridine
  modified_base 2456: mod_base = OTHER; note = N1-methylpseudouridine
  modified_base 2457: mod_base = OTHER; note = N1-methylpseudouridine
  modified_base 2458: mod_base = OTHER; note = N1-methylpseudouridine
  modified_base 2459: mod_base = OTHER; note = N1-methylpseudouridine
  modified_base 2461: mod_base = OTHER; note = N1-methylpseudouridine
  modified_base 2477: mod_base = OTHER; note = N1-methylpseudouridine
  modified_base 2485: mod_base = OTHER; note = N1-methylpseudouridine
  modified_base 2487: mod_base = OTHER; note = N1-methylpseudouridine
  modified_base 2488: mod_base = OTHER; note = N1-methylpseudouridine
  modified_base 2495: mod_base = OTHER; note = N1-methylpseudouridine
  modified_base 2497: mod_base = OTHER; note = N1-methylpseudouridine
  modified_base 2498: mod_base = OTHER; note = N1-methylpseudouridine
  modified_base 2500: mod_base = OTHER; note = N1-methylpseudouridine
  modified_base 2501: mod_base = OTHER; note = N1-methylpseudouridine
  modified_base 2502: mod_base = OTHER; note = N1-methylpseudouridine
  modified_base 2503: mod_base = OTHER; note = N1-methylpseudouridine
  modified_base 2507: mod_base = OTHER; note = N1-methylpseudouridine
  modified_base 2508: mod_base = OTHER; note = N1-methylpseudouridine
  modified_base 2509: mod_base = OTHER; note = N1-methylpseudouridine
  modified_base 2513: mod_base = OTHER; note = N1-methylpseudouridine
  modified_base 2515: mod_base = OTHER; note = N1-methylpseudouridine
  modified_base 2516: mod_base = OTHER; note = N1-methylpseudouridine
  modified_base 2517: mod_base = OTHER; note = N1-methylpseudouridine
  modified_base 2518: mod_base = OTHER; note = N1-methylpseudouridine
  modified_base 2525: mod_base = OTHER; note = N1-methylpseudouridine
  modified_base 2533: mod_base = OTHER; note = N1-methylpseudouridine
  modified_base 2536: mod_base = OTHER; note = N1-methylpseudouridine
  modified_base 2547: mod_base = OTHER; note = N1-methylpseudouridine
  modified_base 2548: mod_base = OTHER; note = N1-methylpseudouridine
  modified_base 2555: mod_base = OTHER; note = N1-methylpseudouridine
  modified_base 2556: mod_base = OTHER; note = N1-methylpseudouridine
  modified_base 2558: mod_base = OTHER; note = N1-methylpseudouridine
  modified_base 2564: mod_base = OTHER; note = N1-methylpseudouridine
  modified_base 2566: mod_base = OTHER; note = N1-methylpseudouridine
  modified_base 2567: mod_base = OTHER; note = N1-methylpseudouridine
  modified_base 2568: mod_base = OTHER; note = N1-methylpseudouridine
  modified_base 2569: mod_base = OTHER; note = N1-methylpseudouridine
  modified_base 2570: mod_base = OTHER; note = N1-methylpseudouridine
  modified_base 2573: mod_base = OTHER; note = N1-methylpseudouridine
  modified_base 2581: mod_base = OTHER; note = N1-methylpseudouridine
  modified_base 2582: mod_base = OTHER; note = N1-methylpseudouridine
  modified_base 2584: mod_base = OTHER; note = N1-methylpseudouridine
  modified_base 2593: mod_base = OTHER; note = N1-methylpseudouridine
  modified_base 2607: mod_base = OTHER; note = N1-methylpseudouridine
  modified_base 2609: mod_base = OTHER; note = N1-methylpseudouridine
  modified_base 2612: mod_base = OTHER; note = N1-methylpseudouridine
  modified_base 2615: mod_base = OTHER; note = N1-methylpseudouridine
  modified_base 2616: mod_base = OTHER; note = N1-methylpseudouridine
  modified_base 2626: mod_base = OTHER; note = N1-methylpseudouridine
  modified_base 2628: mod_base = OTHER; note = N1-methylpseudouridine
  modified_base 2638: mod_base = OTHER; note = N1-methylpseudouridine
  modified_base 2641: mod_base = OTHER; note = N1-methylpseudouridine
  modified_base 2642: mod_base = OTHER; note = N1-methylpseudouridine
  modified_base 2650: mod_base = OTHER; note = N1-methylpseudouridine
  modified_base 2666: mod_base = OTHER; note = N1-methylpseudouridine
  modified_base 2669: mod_base = OTHER; note = N1-methylpseudouridine
  modified_base 2677: mod_base = OTHER; note = N1-methylpseudouridine
  modified_base 2678: mod_base = OTHER; note = N1-methylpseudouridine
  modified_base 2679: mod_base = OTHER; note = N1-methylpseudouridine
  modified_base 2680: mod_base = OTHER; note = N1-methylpseudouridine
  modified_base 2685: mod_base = OTHER; note = N1-methylpseudouridine
  modified_base 2686: mod_base = OTHER; note = N1-methylpseudouridine
  modified_base 2689: mod_base = OTHER; note = N1-methylpseudouridine
  modified_base 2690: mod_base = OTHER; note = N1-methylpseudouridine
  modified_base 2703: mod_base = OTHER; note = N1-methylpseudouridine
  modified_base 2704: mod_base = OTHER; note = N1-methylpseudouridine
  modified_base 2705: mod_base = OTHER; note = N1-methylpseudouridine
  modified_base 2711: mod_base = OTHER; note = N1-methylpseudouridine
  modified_base 2718: mod_base = OTHER; note = N1-methylpseudouridine
  modified_base 2719: mod_base = OTHER; note = N1-methylpseudouridine
  modified_base 2722: mod_base = OTHER; note = N1-methylpseudouridine
  modified_base 2727: mod_base = OTHER; note = N1-methylpseudouridine
  modified_base 2728: mod_base = OTHER; note = N1-methylpseudouridine
  modified_base 2731: mod_base = OTHER; note = N1-methylpseudouridine
  modified_base 2735: mod_base = OTHER; note = N1-methylpseudouridine
  modified_base 2738: mod_base = OTHER; note = N1-methylpseudouridine
  modified_base 2741: mod_base = OTHER; note = N1-methylpseudouridine
  modified_base 2742: mod_base = OTHER; note = N1-methylpseudouridine
  modified_base 2744: mod_base = OTHER; note = N1-methylpseudouridine
  modified_base 2745: mod_base = OTHER; note = N1-methylpseudouridine
  modified_base 2746: mod_base = OTHER; note = N1-methylpseudouridine
  modified_base 2751: mod_base = OTHER; note = N1-methylpseudouridine
  modified_base 2752: mod_base = OTHER; note = N1-methylpseudouridine
  modified_base 2753: mod_base = OTHER; note = N1-methylpseudouridine
  modified_base 2762: mod_base = OTHER; note = N1-methylpseudouridine
  modified_base 2764: mod_base = OTHER; note = N1-methylpseudouridine
  modified_base 2779: mod_base = OTHER; note = N1-methylpseudouridine
  modified_base 2783: mod_base = OTHER; note = N1-methylpseudouridine
  modified_base 2795: mod_base = OTHER; note = N1-methylpseudouridine
  modified_base 2798: mod_base = OTHER; note = N1-methylpseudouridine
  modified_base 2800: mod_base = OTHER; note = N1-methylpseudouridine
  modified_base 2804: mod_base = OTHER; note = N1-methylpseudouridine
  modified_base 2812: mod_base = OTHER; note = N1-methylpseudouridine
  modified_base 2813: mod_base = OTHER; note = N1-methylpseudouridine
  modified_base 2821: mod_base = OTHER; note = N1-methylpseudouridine
  modified_base 2822: mod_base = OTHER; note = N1-methylpseudouridine
  modified_base 2829: mod_base = OTHER; note = N1-methylpseudouridine
  modified_base 2839: mod_base = OTHER; note = N1-methylpseudouridine
  modified_base 2849: mod_base = OTHER; note = N1-methylpseudouridine
  modified_base 2851: mod_base = OTHER; note = N1-methylpseudouridine
  modified_base 2854: mod_base = OTHER; note = N1-methylpseudouridine
  modified_base 2863: mod_base = OTHER; note = N1-methylpseudouridine
  modified_base 2869: mod_base = OTHER; note = N1-methylpseudouridine
  modified_base 2872: mod_base = OTHER; note = N1-methylpseudouridine
  modified_base 2876: mod_base = OTHER; note = N1-methylpseudouridine
  modified_base 2881: mod_base = OTHER; note = N1-methylpseudouridine
  modified_base 2882: mod_base = OTHER; note = N1-methylpseudouridine
  modified_base 2884: mod_base = OTHER; note = N1-methylpseudouridine
  modified_base 2890: mod_base = OTHER; note = N1-methylpseudouridine
  modified_base 2893: mod_base = OTHER; note = N1-methylpseudouridine
  modified_base 2903: mod_base = OTHER; note = N1-methylpseudouridine
  modified_base 2909: mod_base = OTHER; note = N1-methylpseudouridine
  modified_base 2915: mod_base = OTHER; note = N1-methylpseudouridine
  modified_base 2917: mod_base = OTHER; note = N1-methylpseudouridine
  modified_base 2918: mod_base = OTHER; note = N1-methylpseudouridine
  modified_base 2920: mod_base = OTHER; note = N1-methylpseudouridine
  modified_base 2923: mod_base = OTHER; note = N1-methylpseudouridine
  modified_base 2929: mod_base = OTHER; note = N1-methylpseudouridine
  modified_base 2933: mod_base = OTHER; note = N1-methylpseudouridine
  modified_base 2942: mod_base = OTHER; note = N1-methylpseudouridine
  modified_base 2951: mod_base = OTHER; note = N1-methylpseudouridine
  modified_base 2960: mod_base = OTHER; note = N1-methylpseudouridine
  modified_base 2969: mod_base = OTHER; note = N1-methylpseudouridine
  modified_base 2970: mod_base = OTHER; note = N1-methylpseudouridine
  modified_base 2983: mod_base = OTHER; note = N1-methylpseudouridine
  modified_base 2992: mod_base = OTHER; note = N1-methylpseudouridine
  modified_base 3004: mod_base = OTHER; note = N1-methylpseudouridine
  modified_base 3005: mod_base = OTHER; note = N1-methylpseudouridine
  modified_base 3013: mod_base = OTHER; note = N1-methylpseudouridine
  modified_base 3018: mod_base = OTHER; note = N1-methylpseudouridine
  modified_base 3025: mod_base = OTHER; note = N1-methylpseudouridine
  modified_base 3027: mod_base = OTHER; note = N1-methylpseudouridine
  modified_base 3028: mod_base = OTHER; note = N1-methylpseudouridine
  modified_base 3038: mod_base = OTHER; note = N1-methylpseudouridine
  modified_base 3041: mod_base = OTHER; note = N1-methylpseudouridine
  modified_base 3043: mod_base = OTHER; note = N1-methylpseudouridine
  modified_base 3058: mod_base = OTHER; note = N1-methylpseudouridine
  modified_base 3059: mod_base = OTHER; note = N1-methylpseudouridine
  modified_base 3073: mod_base = OTHER; note = N1-methylpseudouridine
  modified_base 3075: mod_base = OTHER; note = N1-methylpseudouridine
  modified_base 3079: mod_base = OTHER; note = N1-methylpseudouridine
  modified_base 3081: mod_base = OTHER; note = N1-methylpseudouridine
  modified_base 3083: mod_base = OTHER; note = N1-methylpseudouridine
  modified_base 3084: mod_base = OTHER; note = N1-methylpseudouridine
  modified_base 3086: mod_base = OTHER; note = N1-methylpseudouridine
  modified_base 3088: mod_base = OTHER; note = N1-methylpseudouridine
  modified_base 3095: mod_base = OTHER; note = N1-methylpseudouridine
  modified_base 3106: mod_base = OTHER; note = N1-methylpseudouridine
  modified_base 3108: mod_base = OTHER; note = N1-methylpseudouridine
  modified_base 3110: mod_base = OTHER; note = N1-methylpseudouridine
  modified_base 3112: mod_base = OTHER; note = N1-methylpseudouridine
  modified_base 3124: mod_base = OTHER; note = N1-methylpseudouridine
  modified_base 3128: mod_base = OTHER; note = N1-methylpseudouridine
  modified_base 3130: mod_base = OTHER; note = N1-methylpseudouridine
  modified_base 3134: mod_base = OTHER; note = N1-methylpseudouridine
  modified_base 3138: mod_base = OTHER; note = N1-methylpseudouridine
  modified_base 3139: mod_base = OTHER; note = N1-methylpseudouridine
  modified_base 3141: mod_base = OTHER; note = N1-methylpseudouridine
  modified_base 3146: mod_base = OTHER; note = N1-methylpseudouridine
  modified_base 3147: mod_base = OTHER; note = N1-methylpseudouridine
  modified_base 3149: mod_base = OTHER; note = N1-methylpseudouridine
  modified_base 3152: mod_base = OTHER; note = N1-methylpseudouridine
  modified_base 3154: mod_base = OTHER; note = N1-methylpseudouridine
  modified_base 3158: mod_base = OTHER; note = N1-methylpseudouridine
  modified_base 3163: mod_base = OTHER; note = N1-methylpseudouridine
  modified_base 3166: mod_base = OTHER; note = N1-methylpseudouridine
  modified_base 3174: mod_base = OTHER; note = N1-methylpseudouridine
  modified_base 3177: mod_base = OTHER; note = N1-methylpseudouridine
  modified_base 3178: mod_base = OTHER; note = N1-methylpseudouridine
  modified_base 3180: mod_base = OTHER; note = N1-methylpseudouridine
  modified_base 3181: mod_base = OTHER; note = N1-methylpseudouridine
  modified_base 3191: mod_base = OTHER; note = N1-methylpseudouridine
  modified_base 3194: mod_base = OTHER; note = N1-methylpseudouridine
  modified_base 3196: mod_base = OTHER; note = N1-methylpseudouridine
  modified_base 3197: mod_base = OTHER; note = N1-methylpseudouridine
  modified_base 3203: mod_base = OTHER; note = N1-methylpseudouridine
  modified_base 3208: mod_base = OTHER; note = N1-methylpseudouridine
  modified_base 3211: mod_base = OTHER; note = N1-methylpseudouridine
  modified_base 3212: mod_base = OTHER; note = N1-methylpseudouridine
  modified_base 3219: mod_base = OTHER; note = N1-methylpseudouridine
  modified_base 3240: mod_base = OTHER; note = N1-methylpseudouridine
  modified_base 3245: mod_base = OTHER; note = N1-methylpseudouridine
  modified_base 3250: mod_base = OTHER; note = N1-methylpseudouridine
  modified_base 3257: mod_base = OTHER; note = N1-methylpseudouridine
  modified_base 3265: mod_base = OTHER; note = N1-methylpseudouridine
  modified_base 3268: mod_base = OTHER; note = N1-methylpseudouridine
  modified_base 3277: mod_base = OTHER; note = N1-methylpseudouridine
  modified_base 3284: mod_base = OTHER; note = N1-methylpseudouridine
  modified_base 3285: mod_base = OTHER; note = N1-methylpseudouridine
  modified_base 3287: mod_base = OTHER; note = N1-methylpseudouridine
  modified_base 3288: mod_base = OTHER; note = N1-methylpseudouridine
  modified_base 3298: mod_base = OTHER; note = N1-methylpseudouridine
  modified_base 3301: mod_base = OTHER; note = N1-methylpseudouridine
  modified_base 3313: mod_base = OTHER; note = N1-methylpseudouridine
  modified_base 3314: mod_base = OTHER; note = N1-methylpseudouridine
  modified_base 3316: mod_base = OTHER; note = N1-methylpseudouridine
  modified_base 3317: mod_base = OTHER; note = N1-methylpseudouridine
  modified_base 3320: mod_base = OTHER; note = N1-methylpseudouridine
  modified_base 3330: mod_base = OTHER; note = N1-methylpseudouridine
  modified_base 3331: mod_base = OTHER; note = N1-methylpseudouridine
  modified_base 3335: mod_base = OTHER; note = N1-methylpseudouridine
  modified_base 3340: mod_base = OTHER; note = N1-methylpseudouridine
  modified_base 3341: mod_base = OTHER; note = N1-methylpseudouridine
  modified_base 3350: mod_base = OTHER; note = N1-methylpseudouridine
  modified_base 3363: mod_base = OTHER; note = N1-methylpseudouridine
  modified_base 3364: mod_base = OTHER; note = N1-methylpseudouridine
  modified_base 3366: mod_base = OTHER; note = N1-methylpseudouridine
  modified_base 3368: mod_base = OTHER; note = N1-methylpseudouridine
  modified_base 3373: mod_base = OTHER; note = N1-methylpseudouridine
  modified_base 3377: mod_base = OTHER; note = N1-methylpseudouridine
  modified_base 3383: mod_base = OTHER; note = N1-methylpseudouridine
  modified_base 3387: mod_base = OTHER; note = N1-methylpseudouridine
  modified_base 3388: mod_base = OTHER; note = N1-methylpseudouridine
  modified_base 3391: mod_base = OTHER; note = N1-methylpseudouridine
  modified_base 3403: mod_base = OTHER; note = N1-methylpseudouridine
  modified_base 3404: mod_base = OTHER; note = N1-methylpseudouridine
  modified_base 3406: mod_base = OTHER; note = N1-methylpseudouridine
  modified_base 3413: mod_base = OTHER; note = N1-methylpseudouridine
  modified_base 3421: mod_base = OTHER; note = N1-methylpseudouridine
  modified_base 3433: mod_base = OTHER; note = N1-methylpseudouridine
  modified_base 3434: mod_base = OTHER; note = N1-methylpseudouridine
  modified_base 3442: mod_base = OTHER; note = N1-methylpseudouridine
  modified_base 3445: mod_base = OTHER; note = N1-methylpseudouridine
  modified_base 3446: mod_base = OTHER; note = N1-methylpseudouridine
  modified_base 3449: mod_base = OTHER; note = N1-methylpseudouridine
  modified_base 3450: mod_base = OTHER; note = N1-methylpseudouridine
  modified_base 3457: mod_base = OTHER; note = N1-methylpseudouridine
  modified_base 3464: mod_base = OTHER; note = N1-methylpseudouridine
  modified_base 3468: mod_base = OTHER; note = N1-methylpseudouridine
  modified_base 3470: mod_base = OTHER; note = N1-methylpseudouridine
  modified_base 3473: mod_base = OTHER; note = N1-methylpseudouridine
  modified_base 3482: mod_base = OTHER; note = N1-methylpseudouridine
  modified_base 3487: mod_base = OTHER; note = N1-methylpseudouridine
  modified_base 3490: mod_base = OTHER; note = N1-methylpseudouridine
  modified_base 3499: mod_base = OTHER; note = N1-methylpseudouridine
  modified_base 3505: mod_base = OTHER; note = N1-methylpseudouridine
  modified_base 3508: mod_base = OTHER; note = N1-methylpseudouridine
  modified_base 3514: mod_base = OTHER; note = N1-methylpseudouridine
  modified_base 3515: mod_base = OTHER; note = N1-methylpseudouridine
  modified_base 3519: mod_base = OTHER; note = N1-methylpseudouridine
  modified_base 3526: mod_base = OTHER; note = N1-methylpseudouridine
  modified_base 3529: mod_base = OTHER; note = N1-methylpseudouridine
  modified_base 3536: mod_base = OTHER; note = N1-methylpseudouridine
  modified_base 3537: mod_base = OTHER; note = N1-methylpseudouridine
  modified_base 3538: mod_base = OTHER; note = N1-methylpseudouridine
  modified_base 3539: mod_base = OTHER; note = N1-methylpseudouridine
  modified_base 3549: mod_base = OTHER; note = N1-methylpseudouridine
  modified_base 3550: mod_base = OTHER; note = N1-methylpseudouridine
  modified_base 3555: mod_base = OTHER; note = N1-methylpseudouridine
  modified_base 3556: mod_base = OTHER; note = N1-methylpseudouridine
  modified_base 3557: mod_base = OTHER; note = N1-methylpseudouridine
  modified_base 3558: mod_base = OTHER; note = N1-methylpseudouridine
  modified_base 3560: mod_base = OTHER; note = N1-methylpseudouridine
  modified_base 3565: mod_base = OTHER; note = N1-methylpseudouridine
  modified_base 3574: mod_base = OTHER; note = N1-methylpseudouridine
  modified_base 3581: mod_base = OTHER; note = N1-methylpseudouridine
  modified_base 3582: mod_base = OTHER; note = N1-methylpseudouridine
  modified_base 3584: mod_base = OTHER; note = N1-methylpseudouridine
  modified_base 3587: mod_base = OTHER; note = N1-methylpseudouridine
  modified_base 3596: mod_base = OTHER; note = N1-methylpseudouridine
  modified_base 3602: mod_base = OTHER; note = N1-methylpseudouridine
  modified_base 3603: mod_base = OTHER; note = N1-methylpseudouridine
  modified_base 3607: mod_base = OTHER; note = N1-methylpseudouridine
  modified_base 3616: mod_base = OTHER; note = N1-methylpseudouridine
  modified_base 3617: mod_base = OTHER; note = N1-methylpseudouridine
  modified_base 3619: mod_base = OTHER; note = N1-methylpseudouridine
  modified_base 3631: mod_base = OTHER; note = N1-methylpseudouridine
  modified_base 3632: mod_base = OTHER; note = N1-methylpseudouridine
  modified_base 3634: mod_base = OTHER; note = N1-methylpseudouridine
  modified_base 3642: mod_base = OTHER; note = N1-methylpseudouridine
  modified_base 3651: mod_base = OTHER; note = N1-methylpseudouridine
  modified_base 3652: mod_base = OTHER; note = N1-methylpseudouridine
  modified_base 3659: mod_base = OTHER; note = N1-methylpseudouridine
  modified_base 3663: mod_base = OTHER; note = N1-methylpseudouridine
  modified_base 3664: mod_base = OTHER; note = N1-methylpseudouridine
  modified_base 3665: mod_base = OTHER; note = N1-methylpseudouridine
  modified_base 3667: mod_base = OTHER; note = N1-methylpseudouridine
  modified_base 3669: mod_base = OTHER; note = N1-methylpseudouridine
  modified_base 3671: mod_base = OTHER; note = N1-methylpseudouridine
  modified_base 3678: mod_base = OTHER; note = N1-methylpseudouridine
  modified_base 3680: mod_base = OTHER; note = N1-methylpseudouridine
  modified_base 3685: mod_base = OTHER; note = N1-methylpseudouridine
  modified_base 3687: mod_base = OTHER; note = N1-methylpseudouridine
  modified_base 3692: mod_base = OTHER; note = N1-methylpseudouridine
  modified_base 3694: mod_base = OTHER; note = N1-methylpseudouridine
  modified_base 3703: mod_base = OTHER; note = N1-methylpseudouridine
  modified_base 3706: mod_base = OTHER; note = N1-methylpseudouridine
  modified_base 3707: mod_base = OTHER; note = N1-methylpseudouridine
  modified_base 3714: mod_base = OTHER; note = N1-methylpseudouridine
  modified_base 3727: mod_base = OTHER; note = N1-methylpseudouridine
  modified_base 3731: mod_base = OTHER; note = N1-methylpseudouridine
  modified_base 3740: mod_base = OTHER; note = N1-methylpseudouridine
  modified_base 3743: mod_base = OTHER; note = N1-methylpseudouridine
  modified_base 3747: mod_base = OTHER; note = N1-methylpseudouridine
  modified_base 3750: mod_base = OTHER; note = N1-methylpseudouridine
  modified_base 3751: mod_base = OTHER; note = N1-methylpseudouridine
  modified_base 3753: mod_base = OTHER; note = N1-methylpseudouridine
  modified_base 3754: mod_base = OTHER; note = N1-methylpseudouridine
  modified_base 3755: mod_base = OTHER; note = N1-methylpseudouridine
  modified_base 3756: mod_base = OTHER; note = N1-methylpseudouridine
  modified_base 3759: mod_base = OTHER; note = N1-methylpseudouridine
  modified_base 3764: mod_base = OTHER; note = N1-methylpseudouridine
  modified_base 3766: mod_base = OTHER; note = N1-methylpseudouridine
  modified_base 3767: mod_base = OTHER; note = N1-methylpseudouridine
  modified_base 3769: mod_base = OTHER; note = N1-methylpseudouridine
  modified_base 3774: mod_base = OTHER; note = N1-methylpseudouridine
  modified_base 3775: mod_base = OTHER; note = N1-methylpseudouridine
  modified_base 3776: mod_base = OTHER; note = N1-methylpseudouridine
  modified_base 3777: mod_base = OTHER; note = N1-methylpseudouridine
  modified_base 3778: mod_base = OTHER; note = N1-methylpseudouridine
  modified_base 3790: mod_base = OTHER; note = N1-methylpseudouridine
  modified_base 3794: mod_base = OTHER; note = N1-methylpseudouridine
  modified_base 3796: mod_base = OTHER; note = N1-methylpseudouridine
  modified_base 3800: mod_base = OTHER; note = N1-methylpseudouridine
  modified_base 3811: mod_base = OTHER; note = N1-methylpseudouridine
  modified_base 3812: mod_base = OTHER; note = N1-methylpseudouridine
  modified_base 3825: mod_base = OTHER; note = N1-methylpseudouridine
  modified_base 3826: mod_base = OTHER; note = N1-methylpseudouridine
  modified_base 3829: mod_base = OTHER; note = N1-methylpseudouridine
  modified_base 3839: mod_base = OTHER; note = N1-methylpseudouridine
  modified_base 3848: mod_base = OTHER; note = N1-methylpseudouridine
  modified_base 3851: mod_base = OTHER; note = N1-methylpseudouridine
  modified_base 3856: mod_base = OTHER; note = N1-methylpseudouridine
  modified_base 3859: mod_base = OTHER; note = N1-methylpseudouridine
  modified_base 3860: mod_base = OTHER; note = N1-methylpseudouridine
  modified_base 3861: mod_base = OTHER; note = N1-methylpseudouridine
  modified_base 3878: mod_base = OTHER; note = N1-methylpseudouridine
  modified_base 3879: mod_base = OTHER; note = N1-methylpseudouridine
  modified_base 3880: mod_base = OTHER; note = N1-methylpseudouridine
  modified_base 3889: mod_base = OTHER; note = N1-methylpseudouridine
  modified_base 3898: mod_base = OTHER; note = N1-methylpseudouridine
  modified_base 3901: mod_base = OTHER; note = N1-methylpseudouridine
  modified_base 3903: mod_base = OTHER; note = N1-methylpseudouridine
  modified_base 3907: mod_base = OTHER; note = N1-methylpseudouridine
  modified_base 3916: mod_base = OTHER; note = N1-methylpseudouridine
  modified_base 3920: mod_base = OTHER; note = N1-methylpseudouridine
  modified_base 3922: mod_base = OTHER; note = N1-methylpseudouridine
  modified_base 3925: mod_base = OTHER; note = N1-methylpseudouridine
  modified_base 3940: mod_base = OTHER; note = N1-methylpseudouridine
  modified_base 3953: mod_base = OTHER; note = N1-methylpseudouridine
  modified_base 3954: mod_base = OTHER; note = N1-methylpseudouridine
  modified_base 3955: mod_base = OTHER; note = N1-methylpseudouridine
  modified_base 3957: mod_base = OTHER; note = N1-methylpseudouridine
  modified_base 3966: mod_base = OTHER; note = N1-methylpseudouridine
  modified_base 3970: mod_base = OTHER; note = N1-methylpseudouridine
  modified_base 3973: mod_base = OTHER; note = N1-methylpseudouridine
  modified_base 3986: mod_base = OTHER; note = N1-methylpseudouridine
  modified_base 3987: mod_base = OTHER; note = N1-methylpseudouridine
  modified_base 3997: mod_base = OTHER; note = N1-methylpseudouridine
  modified_base 4000: mod_base = OTHER; note = N1-methylpseudouridine
  modified_base 4004: mod_base = OTHER; note = N1-methylpseudouridine
  modified_base 4017: mod_base = OTHER; note = N1-methylpseudouridine
  modified_base 4022: mod_base = OTHER; note = N1-methylpseudouridine
  modified_base 4032: mod_base = OTHER; note = N1-methylpseudouridine
  modified_base 4034: mod_base = OTHER; note = N1-methylpseudouridine
  modified_base 4041: mod_base = OTHER; note = N1-methylpseudouridine
  modified_base 4042: mod_base = OTHER; note = N1-methylpseudouridine
  modified_base 4043: mod_base = OTHER; note = N1-methylpseudouridine
  modified_base 4046: mod_base = OTHER; note = N1-methylpseudouridine
  modified_base 4047: mod_base = OTHER; note = N1-methylpseudouridine
  modified_base 4057: mod_base = OTHER; note = N1-methylpseudouridine
  modified_base 4062: mod_base = OTHER; note = N1-methylpseudouridine
  modified_base 4064: mod_base = OTHER; note = N1-methylpseudouridine
  modified_base 4065: mod_base = OTHER; note = N1-methylpseudouridine
  modified_base 4069: mod_base = OTHER; note = N1-methylpseudouridine
  modified_base 4072: mod_base = OTHER; note = N1-methylpseudouridine
  modified_base 4075: mod_base = OTHER; note = N1-methylpseudouridine
  modified_base 4078: mod_base = OTHER; note = N1-methylpseudouridine
  modified_base 4082: mod_base = OTHER; note = N1-methylpseudouridine
  modified_base 4087: mod_base = OTHER; note = N1-methylpseudouridine
  modified_base 4101: mod_base = OTHER; note = N1-methylpseudouridine
  modified_base 4103: mod_base = OTHER; note = N1-methylpseudouridine
  modified_base 4111: mod_base = OTHER; note = N1-methylpseudouridine
  modified_base 4112: mod_base = OTHER; note = N1-methylpseudouridine
  modified_base 4116: mod_base = OTHER; note = N1-methylpseudouridine
  modified_base 4118: mod_base = OTHER; note = N1-methylpseudouridine
  modified_base 4120: mod_base = OTHER; note = N1-methylpseudouridine
  modified_base 4129: mod_base = OTHER; note = N1-methylpseudouridine
  modified_base 4132: mod_base = OTHER; note = N1-methylpseudouridine
  modified_base 4138: mod_base = OTHER; note = N1-methylpseudouridine
  modified_base 4144: mod_base = OTHER; note = N1-methylpseudouridine
  modified_base 4145: mod_base = OTHER; note = N1-methylpseudouridine
  modified_base 4147: mod_base = OTHER; note = N1-methylpseudouridine
  modified_base 4157: mod_base = OTHER; note = N1-methylpseudouridine
  modified_base 4161: mod_base = OTHER; note = N1-methylpseudouridine
  modified_base 4162: mod_base = OTHER; note = N1-methylpseudouridine
  modified_base 4175: mod_base = OTHER; note = N1-methylpseudouridine
  modified_base 4177: mod_base = OTHER; note = N1-methylpseudouridine
  modified_base 4181: mod_base = OTHER; note = N1-methylpseudouridine
  modified_base 4182: mod_base = OTHER; note = N1-methylpseudouridine
  modified_base 4183: mod_base = OTHER; note = N1-methylpseudouridine
  modified_base 4184: mod_base = OTHER; note = N1-methylpseudouridine
  modified_base 4186: mod_base = OTHER; note = N1-methylpseudouridine
  modified_base 4200: mod_base = OTHER; note = N1-methylpseudouridine
  modified_base 4202: mod_base = OTHER; note = N1-methylpseudouridine
  modified_base 4210: mod_base = OTHER; note = N1-methylpseudouridine
  modified_base 4211: mod_base = OTHER; note = N1-methylpseudouridine
  modified_base 4220: mod_base = OTHER; note = N1-methylpseudouridine
  modified_base 4222: mod_base = OTHER; note = N1-methylpseudouridine
  modified_base 4225: mod_base = OTHER; note = N1-methylpseudouridine
  modified_base 4228: mod_base = OTHER; note = N1-methylpseudouridine
  modified_base 4234: mod_base = OTHER; note = N1-methylpseudouridine
  modified_base 4242: mod_base = OTHER; note = N1-methylpseudouridine
  modified_base 4244: mod_base = OTHER; note = N1-methylpseudouridine
  modified_base 4247: mod_base = OTHER; note = N1-methylpseudouridine
  modified_base 4249: mod_base = OTHER; note = N1-methylpseudouridine
  modified_base 4250: mod_base = OTHER; note = N1-methylpseudouridine
  modified_base 4251: mod_base = OTHER; note = N1-methylpseudouridine
  modified_base 4252: mod_base = OTHER; note = N1-methylpseudouridine
  modified_base 4253: mod_base = OTHER; note = N1-methylpseudouridine
  modified_base 4257: mod_base = OTHER; note = N1-methylpseudouridine
  modified_base 4258: mod_base = OTHER; note = N1-methylpseudouridine
  modified_base 4279: mod_base = OTHER; note = N1-methylpseudouridine
  modified_base 4282: mod_base = OTHER; note = N1-methylpseudouridine
  modified_base 4283: mod_base = OTHER; note = N1-methylpseudouridine
  modified_base 4287: mod_base = OTHER; note = N1-methylpseudouridine
  modified_base 4289: mod_base = OTHER; note = N1-methylpseudouridine
  modified_base 4295: mod_base = OTHER; note = N1-methylpseudouridine
  modified_base 4299: mod_base = OTHER; note = N1-methylpseudouridine
  modified_base 4300: mod_base = OTHER; note = N1-methylpseudouridine
  modified_base 4313: mod_base = OTHER; note = N1-methylpseudouridine
  modified_base 4318: mod_base = OTHER; note = N1-methylpseudouridine
  modified_base 4323: mod_base = OTHER; note = N1-methylpseudouridine
  modified_base 4324: mod_base = OTHER; note = N1-methylpseudouridine
  modified_base 4329: mod_base = OTHER; note = N1-methylpseudouridine
  modified_base 4335: mod_base = OTHER; note = N1-methylpseudouridine
  modified_base 4337: mod_base = OTHER; note = N1-methylpseudouridine
  modified_base 4339: mod_base = OTHER; note = N1-methylpseudouridine
  modified_base 4343: mod_base = OTHER; note = N1-methylpseudouridine
  modified_base 4344: mod_base = OTHER; note = N1-methylpseudouridine
  modified_base 4345: mod_base = OTHER; note = N1-methylpseudouridine
  modified_base 4347: mod_base = OTHER; note = N1-methylpseudouridine
  modified_base 4348: mod_base = OTHER; note = N1-methylpseudouridine
  modified_base 4350: mod_base = OTHER; note = N1-methylpseudouridine
  modified_base 4354: mod_base = OTHER; note = N1-methylpseudouridine
  modified_base 4355: mod_base = OTHER; note = N1-methylpseudouridine
  modified_base 4361: mod_base = OTHER; note = N1-methylpseudouridine
  modified_base 4365: mod_base = OTHER; note = N1-methylpseudouridine
  modified_base 4367: mod_base = OTHER; note = N1-methylpseudouridine
  modified_base 4375: mod_base = OTHER; note = N1-methylpseudouridine
  modified_base 4394: mod_base = OTHER; note = N1-methylpseudouridine
  modified_base 4397: mod_base = OTHER; note = N1-methylpseudouridine
  modified_base 4410: mod_base = OTHER; note = N1-methylpseudouridine
  modified_base 4411: mod_base = OTHER; note = N1-methylpseudouridine
  modified_base 4413: mod_base = OTHER; note = N1-methylpseudouridine
  modified_base 4414: mod_base = OTHER; note = N1-methylpseudouridine
  modified_base 4417: mod_base = OTHER; note = N1-methylpseudouridine
  modified_base 4418: mod_base = OTHER; note = N1-methylpseudouridine
  modified_base 4427: mod_base = OTHER; note = N1-methylpseudouridine
  modified_base 4433: mod_base = OTHER; note = N1-methylpseudouridine
  modified_base 4434: mod_base = OTHER; note = N1-methylpseudouridine
  modified_base 4436: mod_base = OTHER; note = N1-methylpseudouridine
  modified_base 4437: mod_base = OTHER; note = N1-methylpseudouridine
  modified_base 4438: mod_base = OTHER; note = N1-methylpseudouridine
  modified_base 4447: mod_base = OTHER; note = N1-methylpseudouridine
  modified_base 4450: mod_base = OTHER; note = N1-methylpseudouridine
  modified_base 4459: mod_base = OTHER; note = N1-methylpseudouridine
  modified_base 4467: mod_base = OTHER; note = N1-methylpseudouridine
  modified_base 4468: mod_base = OTHER; note = N1-methylpseudouridine
  modified_base 4480: mod_base = OTHER; note = N1-methylpseudouridine
  modified_base 4483: mod_base = OTHER; note = N1-methylpseudouridine
  modified_base 4486: mod_base = OTHER; note = N1-methylpseudouridine
  modified_base 4487: mod_base = OTHER; note = N1-methylpseudouridine
  modified_base 4499: mod_base = OTHER; note = N1-methylpseudouridine
  modified_base 4501: mod_base = OTHER; note = N1-methylpseudouridine
  modified_base 4510: mod_base = OTHER; note = N1-methylpseudouridine
  modified_base 4513: mod_base = OTHER; note = N1-methylpseudouridine
  modified_base 4515: mod_base = OTHER; note = N1-methylpseudouridine
  modified_base 4521: mod_base = OTHER; note = N1-methylpseudouridine
  modified_base 4523: mod_base = OTHER; note = N1-methylpseudouridine
  modified_base 4532: mod_base = OTHER; note = N1-methylpseudouridine
  modified_base 4544: mod_base = OTHER; note = N1-methylpseudouridine
  modified_base 4546: mod_base = OTHER; note = N1-methylpseudouridine
  modified_base 4565: mod_base = OTHER; note = N1-methylpseudouridine
  modified_base 4567: mod_base = OTHER; note = N1-methylpseudouridine
  modified_base 4570: mod_base = OTHER; note = N1-methylpseudouridine
  modified_base 4574: mod_base = OTHER; note = N1-methylpseudouridine
  modified_base 4576: mod_base = OTHER; note = N1-methylpseudouridine
  modified_base 4578: mod_base = OTHER; note = N1-methylpseudouridine
  modified_base 4579: mod_base = OTHER; note = N1-methylpseudouridine
  modified_base 4585: mod_base = OTHER; note = N1-methylpseudouridine
  modified_base 4586: mod_base = OTHER; note = N1-methylpseudouridine
  modified_base 4589: mod_base = OTHER; note = N1-methylpseudouridine
  modified_base 4592: mod_base = OTHER; note = N1-methylpseudouridine
  modified_base 4594: mod_base = OTHER; note = N1-methylpseudouridine
  modified_base 4595: mod_base = OTHER; note = N1-methylpseudouridine
  modified_base 4601: mod_base = OTHER; note = N1-methylpseudouridine
  modified_base 4611: mod_base = OTHER; note = N1-methylpseudouridine
  modified_base 4612: mod_base = OTHER; note = N1-methylpseudouridine
  modified_base 4617: mod_base = OTHER; note = N1-methylpseudouridine
  modified_base 4619: mod_base = OTHER; note = N1-methylpseudouridine
  modified_base 4620: mod_base = OTHER; note = N1-methylpseudouridine
  modified_base 4621: mod_base = OTHER; note = N1-methylpseudouridine
  modified_base 4622: mod_base = OTHER; note = N1-methylpseudouridine
  modified_base 4631: mod_base = OTHER; note = N1-methylpseudouridine
  modified_base 4633: mod_base = OTHER; note = N1-methylpseudouridine
  modified_base 4637: mod_base = OTHER; note = N1-methylpseudouridine
  modified_base 4647: mod_base = OTHER; note = N1-methylpseudouridine
  modified_base 4649: mod_base = OTHER; note = N1-methylpseudouridine
  modified_base 4653: mod_base = OTHER; note = N1-methylpseudouridine
  modified_base 4655: mod_base = OTHER; note = N1-methylpseudouridine
  modified_base 4666: mod_base = OTHER; note = N1-methylpseudouridine
  modified_base 4667: mod_base = OTHER; note = N1-methylpseudouridine
  modified_base 4669: mod_base = OTHER; note = N1-methylpseudouridine
  modified_base 4676: mod_base = OTHER; note = N1-methylpseudouridine
  modified_base 4679: mod_base = OTHER; note = N1-methylpseudouridine
  modified_base 4681: mod_base = OTHER; note = N1-methylpseudouridine
  modified_base 4682: mod_base = OTHER; note = N1-methylpseudouridine
  modified_base 4684: mod_base = OTHER; note = N1-methylpseudouridine
  modified_base 4688: mod_base = OTHER; note = N1-methylpseudouridine
  modified_base 4692: mod_base = OTHER; note = N1-methylpseudouridine
  modified_base 4696: mod_base = OTHER; note = N1-methylpseudouridine
  modified_base 4697: mod_base = OTHER; note = N1-methylpseudouridine
  modified_base 4705: mod_base = OTHER; note = N1-methylpseudouridine
  modified_base 4707: mod_base = OTHER; note = N1-methylpseudouridine
  modified_base 4720: mod_base = OTHER; note = N1-methylpseudouridine
  modified_base 4721: mod_base = OTHER; note = N1-methylpseudouridine
  modified_base 4725: mod_base = OTHER; note = N1-methylpseudouridine
  modified_base 4726: mod_base = OTHER; note = N1-methylpseudouridine
  modified_base 4728: mod_base = OTHER; note = N1-methylpseudouridine
  modified_base 4735: mod_base = OTHER; note = N1-methylpseudouridine
  modified_base 4736: mod_base = OTHER; note = N1-methylpseudouridine
  modified_base 4739: mod_base = OTHER; note = N1-methylpseudouridine
  modified_base 4742: mod_base = OTHER; note = N1-methylpseudouridine
  modified_base 4751: mod_base = OTHER; note = N1-methylpseudouridine
  modified_base 4776: mod_base = OTHER; note = N1-methylpseudouridine
  modified_base 4782: mod_base = OTHER; note = N1-methylpseudouridine
  modified_base 4783: mod_base = OTHER; note = N1-methylpseudouridine
  modified_base 4810: mod_base = OTHER; note = N1-methylpseudouridine
  modified_base 4811: mod_base = OTHER; note = N1-methylpseudouridine
  modified_base 4812: mod_base = OTHER; note = N1-methylpseudouridine
  modified_base 4823: mod_base = OTHER; note = N1-methylpseudouridine
  modified_base 4824: mod_base = OTHER; note = N1-methylpseudouridine
  modified_base 4827: mod_base = OTHER; note = N1-methylpseudouridine
  modified_base 4828: mod_base = OTHER; note = N1-methylpseudouridine
  modified_base 4833: mod_base = OTHER; note = N1-methylpseudouridine
  modified_base 4837: mod_base = OTHER; note = N1-methylpseudouridine
  modified_base 4838: mod_base = OTHER; note = N1-methylpseudouridine
  modified_base 4840: mod_base = OTHER; note = N1-methylpseudouridine
  modified_base 4848: mod_base = OTHER; note = N1-methylpseudouridine
  modified_base 4849: mod_base = OTHER; note = N1-methylpseudouridine
  modified_base 4853: mod_base = OTHER; note = N1-methylpseudouridine
  modified_base 4854: mod_base = OTHER; note = N1-methylpseudouridine
  modified_base 4856: mod_base = OTHER; note = N1-methylpseudouridine
  modified_base 4862: mod_base = OTHER; note = N1-methylpseudouridine
  modified_base 4867: mod_base = OTHER; note = N1-methylpseudouridine
  modified_base 4868: mod_base = OTHER; note = N1-methylpseudouridine
  modified_base 4870: mod_base = OTHER; note = N1-methylpseudouridine
  modified_base 4871: mod_base = OTHER; note = N1-methylpseudouridine
  modified_base 4873: mod_base = OTHER; note = N1-methylpseudouridine
  modified_base 4875: mod_base = OTHER; note = N1-methylpseudouridine
  modified_base 4879: mod_base = OTHER; note = N1-methylpseudouridine
  modified_base 4880: mod_base = OTHER; note = N1-methylpseudouridine
  modified_base 4886: mod_base = OTHER; note = N1-methylpseudouridine
  modified_base 4888: mod_base = OTHER; note = N1-methylpseudouridine
  modified_base 4892: mod_base = OTHER; note = N1-methylpseudouridine
  modified_base 4894: mod_base = OTHER; note = N1-methylpseudouridine
  modified_base 4895: mod_base = OTHER; note = N1-methylpseudouridine
  modified_base 4898: mod_base = OTHER; note = N1-methylpseudouridine
  modified_base 4900: mod_base = OTHER; note = N1-methylpseudouridine
  modified_base 4901: mod_base = OTHER; note = N1-methylpseudouridine
  modified_base 4902: mod_base = OTHER; note = N1-methylpseudouridine
  modified_base 4906: mod_base = OTHER; note = N1-methylpseudouridine
  modified_base 4913: mod_base = OTHER; note = N1-methylpseudouridine
  modified_base 4917: mod_base = OTHER; note = N1-methylpseudouridine
  modified_base 4924: mod_base = OTHER; note = N1-methylpseudouridine
  modified_base 4926: mod_base = OTHER; note = N1-methylpseudouridine
aggaaanaagagagaaaagaagagnaagaagaaananaagagccaccangncagaagnagaanncncccacgagnannggangagacacgcncncacacncgccaagcgagcnagggangaaagggaagnaccagngggggccgnacnggnacncaacaanagggncanaggagaggggnggaancgagcaanngggcngcangancccacngcacacgcggagannanggcncnnagacaagggggccnggngangcagaannaccgccncanngacgcaacccnnnacgngacannngagccangcgnnangngcgcgggcgcaanganacacncnagganaggccgcgnagnnnncggagnccgaaangcgaagacnggggcggccggancncnganggacgngcnccaccanccaggcangaaccaccgagnggaganaacggaaggcancnnggcggacgaangngcngcgcnccnnngcaggnncnnccggangccaagacgggnanncaacgcgcagaagaaggcacagncaagcacnganagnggcggcagnnccggaggancnagngggnccgaaacgccagggaccnccgaanccgcaacncccgaaagnncaggaggcnccnccggcggcagcgacaagaagnacnccannggncnggcgancggnacgaanagngnngggngggcngnaanaacngacgagnanaaggngcccagnaagaagnncaaagnccnggggaacacagaccgacanagcancaagaagaaccnganaggngcgcncnngnnngacnccggagagacagcagaagccacacgacnnaaacgaaccgcncgaaggcggnacacacggcgaaagaanaggannngnnaccngcaggaganannnagcaacgaganggcaaaggnngacgannccnncnnccaccggcnngaagagncnnnccnggnggaggaggacaagaaacangaacgccaccccanannnggcaananagnggacgaagnagcanaccangagaaanacccnaccananancancnncgaaagaagcnngnaganncaacgganaaagcagancncaggnngananancnggcacnggcacacangancaagnnncgaggncacnnncnnancgagggcgancnnaanccggacaacnccgacgngganaagcngnncanccagcncgnccaaacgnanaaccaacncnncgaggagaanccgancaangccncnggagnggacgcgaaagcganacncncagcaaggcnnagnaagncncgccggcnngagaaccncancgcacagnngccaggagagaagaagaanggcnngnnnggnaaccnnanngcacncagncncggccnnacaccnaacnncaagnccaacnncgancnngccgaggacgccaagcnccagcnnagcaagganaccnacgangacgancnnganaaccngcnggcccaganaggcgaccagnacgcggaccnnnncnnggcagcaaagaannngnccgacgccanccncnngagcgacanccnccgggnaaacacngaaannacnaaggcgccacnnnccgccagcangancaagaganacgangagcancancaggancngacccngcnnaaagcgcnngnacgccagcaanngccngagaagnanaaagaaancnnnnncgaccaaagcaagaacggnnangcnggcnacanagacggcggggcnncncaggaggaanncnacaagnnnancaagccganncncgagaagangganggaacagaggagcngnnggngaaacngaaccgggaggaccngcncagaaagcagcggaccnncganaangggagcancccgcaccaganncannngggngagcngcangcaancnngcgcaggcaagaagannnnnaccccnnccncaaggacaanagagagaaganngagaaganccnnacgnnnaggannccgnannacgnaggcccgcncgcacgcggnaanncncgcnnngcgnggangacacgaaagagcgaggaaaccanaacacccnggaacnnngaagaggncgncganaagggngccagcgcacaancannnancgaacgaangacnaannncganaagaancncccaaangagaaggngnngccaaagcanagccnnnngnangagnannnnacngnanacaacgagcncaccaaggngaaanangncacngaagggangcgcaagccggccnnnnngagcggagaacagaagaaagcnanngnagacnngcnnnnnaagacgaanagaaaggnnacggncaagcagcncaaagaagacnacnnnaagaaganagaangcnnngacncngncgagannagnggggnagaggancganncaangcaagccnggggacanaccacgancncnngaagannancaagganaaggannnncnggacaacgaagagaangaagacancnnggaagananngnnnngacnnngacncnnnncgaagancgcgaganganagaggaaaggnngaagacnnangcccancnnnnngangacaaggnnangaaacaacngaagagacggcgananacnggnngggggagacncncacgaaagcncannaacggcanccgggacaaacagagnggnaagacgannnnggacnnccnnaagagcgacgggnnngcgaanaggaacnncangcagnnganccanganganncnnngaccnnnaaggaggananacagaaggcacaagncagnggacaaggaganagncngcangagcacanngccaaccnngcgggcnccccagccancaagaagggnanccngcaaaccgncaaagnagnagangaacnngngaaagncangggacgacanaagccngagaananngngancgaaanggcnagggagaancagacgacncagaagggncagaagaannccagggaacggangaagagaanagaggagggaannaaggaacncgggncacaaananngaaggagcanccngnagagaacacacagcnncagaacgagaagcngnaccngnannancnccagaanggcagagacangnangncgaccaagaacngganancaancgcnngnccgannangangnagancacanagncccacaanccnncnngaaagacganagnanngacaanaaggnacnnacgaganccgacaagaaccgcggaaagnccganaacgnaccgagngaagaagnggnaaagaagangaagaannannggaggcagcnccncaacgccaaacnnannacncagagaaagnncganaaccnnacgaaagcngagcgaggcgggnngncngagcncganaaagcngganncanaaagcggcagcnngnggaaacnagacagancacaaagcacgnngcacaganccnngannccagaangaacacnaaanangangagaacganaagcnganacgcgaggngaaagnaanaacacnnaagncaaagcnggnaagcgannnncgcaaagacnnccaannnnanaaggncagagaganaaacaannancancacgcgcangacgcnnaccngaacgcagnngnggggacagcacnnanaaagaaanacccaaagnnggaaagngaannngncnanggagacnanaaggnanacgangnacggaaganganngcgaagncagagcaagaaancggnaaggcaacngcnaagnacnncnnnnacncaaanannangaacnnnnncaagacggaaancacncnggcnaacggagaaanncggaagaggcccnnganagagacgaanggggagacnggngagancgnnngggacaaagggcgagannncgcaacggnccgaaaggngcncncaangccacaagncaananagncaagaagacagaggnacaaacaggaggnnncnccaaggaancaanacncccaaagcggaannccgacaaacnganagcnagaaagaaggacnggganccgaagaagnanggagggnnngannccccaacagnagcgnanncagnacnggnggnagcnaaggnggagaaaggcaagncnaagaagcnnaagncngncaaagagcngcncggcancaccannanggagcgcagnagcnncgagaagaacccnanagannnncnggaagccaaaggananaaggaggnnaagaaggancncancancaaacncccgaagnanagncnnnnngagnnggagaacggacgaaagcgcangcnngcgncngcgggngaanngcagaaaggaaangagcncgccnngccgncaaagnangncaannncnngnaccnngcgagncacnangagaagcngaaaggaagcccagaaganaangaacagaagcaanngnncgnngaacaacanaagcannannnggacgagancancgagcaaancagcgagnncagcaagcgcgncanacnngcggacgccaancnggacaaagngcngnccgccnanaacaaacanagggacaaaccnanacgagagcaggcagagaananaanacancncnncacacnnacnaancnnggagcnccagccgcanncaagnannnngacacgacnanagancgcaagcgananaccncnacgaaagaagnncnggacgcnacncnnanacancaanccannacgggccngnacgagacgagganngacnngncacagcnnggnggngacgagggngcagacaagcgaacagcggacgggncagaanncgaaagccccaagaagaagcggaaagnnnaagcggccgcnnaannaagcngccnncngcggggcnngccnncnggccangcccnncnncncncccnngcaccngnaccncnnggncnnngaanaaagccngagnaggaagncnaga

SEQ ID NO: 2169 - RNA, 501 nt, synthetic construct
  source 1..501: mol_type = other RNA; note = Description of Artificial Sequence: Synthetic polynucleotide
  modified_base 2: mod_base = OTHER; note = N1-methylpseudouridine
  modified_base 4: mod_base = OTHER; note = N1-methylpseudouridine
  modified_base 11: mod_base = OTHER; note = N1-methylpseudouridine
  modified_base 16: mod_base = OTHER; note = N1-methylpseudouridine
  modified_base 17: mod_base = OTHER; note = N1-methylpseudouridine
  modified_base 19: mod_base = OTHER; note = N1-methylpseudouridine
  modified_base 28: mod_base = OTHER; note = N1-methylpseudouridine
  modified_base 30: mod_base = OTHER; note = N1-methylpseudouridine
  modified_base 31: mod_base = OTHER; note = N1-methylpseudouridine
  modified_base 35: mod_base = OTHER; note = N1-methylpseudouridine
  modified_base 45: mod_base = OTHER; note = N1-methylpseudouridine
  modified_base 47: mod_base = OTHER; note = N1-methylpseudouridine
  modified_base 53: mod_base = OTHER; note = N1-methylpseudouridine
  modified_base 66: mod_base = OTHER; note = N1-methylpseudouridine
  modified_base 72: mod_base = OTHER; note = N1-methylpseudouridine
  modified_base 83: mod_base = OTHER; note = N1-methylpseudouridine
  modified_base 89: mod_base = OTHER; note = N1-methylpseudouridine
  modified_base 98: mod_base = OTHER; note = N1-methylpseudouridine
  modified_base 101: mod_base = OTHER; note = N1-methylpseudouridine
  modified_base 104: mod_base = OTHER; note = N1-methylpseudouridine
  modified_base 107: mod_base = OTHER; note = N1-methylpseudouridine
  modified_base 114: mod_base = OTHER; note = N1-methylpseudouridine
  modified_base 119: mod_base = OTHER; note = N1-methylpseudouridine
  modified_base 122: mod_base = OTHER; note = N1-methylpseudouridine
  modified_base 133: mod_base = OTHER; note = N1-methylpseudouridine
  modified_base 138: mod_base = OTHER; note = N1-methylpseudouridine
  modified_base 146: mod_base = OTHER; note = N1-methylpseudouridine
  modified_base 147: mod_base = OTHER; note = N1-methylpseudouridine
  modified_base 152: mod_base = OTHER; note = N1-methylpseudouridine
  modified_base 156: mod_base = OTHER; note = N1-methylpseudouridine
  modified_base 159: mod_base = OTHER; note = N1-methylpseudouridine
  modified_base 165: mod_base = OTHER; note = N1-methylpseudouridine
  modified_base 179: mod_base = OTHER; note = N1-methylpseudouridine
  modified_base 180: mod_base = OTHER; note = N1-methylpseudouridine
  modified_base 182: mod_base = OTHER; note = N1-methylpseudouridine
  modified_base 186: mod_base = OTHER; note = N1-methylpseudouridine
  modified_base 188: mod_base = OTHER; note = N1-methylpseudouridine
  modified_base 189: mod_base = OTHER; note = N1-methylpseudouridine
  modified_base 203: mod_base = OTHER; note = N1-methylpseudouridine
  modified_base 206: mod_base = OTHER; note = N1-methylpseudouridine
  modified_base 209: mod_base = OTHER; note = N1-methylpseudouridine
  modified_base 216: mod_base = OTHER; note = N1-methylpseudouridine
  modified_base 217: mod_base = OTHER; note = N1-methylpseudouridine
  modified_base 224: mod_base = OTHER; note = N1-methylpseudouridine
  modified_base 227: mod_base = OTHER; note = N1-methylpseudouridine
  modified_base 228: mod_base = OTHER; note = N1-methylpseudouridine
  modified_base 239: mod_base = OTHER; note = N1-methylpseudouridine
  modified_base 240: mod_base = OTHER; note = N1-methylpseudouridine
  modified_base 241: mod_base = OTHER; note = N1-methylpseudouridine
  modified_base 245: mod_base = OTHER; note = N1-methylpseudouridine
  modified_base 250: mod_base = OTHER; note = N1-methylpseudouridine
  modified_base 251: mod_base = OTHER; note = N1-methylpseudouridine
  modified_base 252: mod_base = OTHER; note = N1-methylpseudouridine
  modified_base 259: mod_base = OTHER; note = N1-methylpseudouridine
  modified_base 263: mod_base = OTHER; note = N1-methylpseudouridine
  modified_base 264: mod_base = OTHER; note = N1-methylpseudouridine
  modified_base 266: mod_base = OTHER; note = N1-methylpseudouridine
  modified_base 268: mod_base = OTHER; note = N1-methylpseudouridine
  modified_base 281: mod_base = OTHER; note = N1-methylpseudouridine
  modified_base 284: mod_base = OTHER; note = N1-methylpseudouridine
  modified_base 289: mod_base = OTHER; note = N1-methylpseudouridine
  modified_base 291: mod_base = OTHER; note = N1-methylpseudouridine
  modified_base 296: mod_base = OTHER; note = N1-methylpseudouridine
  modified_base 305: mod_base = OTHER; note = N1-methylpseudouridine
  modified_base 308: mod_base = OTHER; note = N1-methylpseudouridine
  modified_base 309: mod_base = OTHER; note = N1-methylpseudouridine
  modified_base 310: mod_base = OTHER; note = N1-methylpseudouridine
  modified_base 311: mod_base = OTHER; note = N1-methylpseudouridine
  modified_base 317: mod_base = OTHER; note = N1-methylpseudouridine
  modified_base 324: mod_base = OTHER; note = N1-methylpseudouridine
  modified_base 333: mod_base = OTHER; note = N1-methylpseudouridine
  modified_base 346: mod_base = OTHER; note = N1-methylpseudouridine
  modified_base 348: mod_base = OTHER; note = N1-methylpseudouridine
  modified_base 350: mod_base = OTHER; note = N1-methylpseudouridine
  modified_base 353: mod_base = OTHER; note = N1-methylpseudouridine
  modified_base 359: mod_base = OTHER; note = N1-methylpseudouridine
  modified_base 362: mod_base = OTHER; note = N1-methylpseudouridine
  modified_base 369: mod_base = OTHER; note = N1-methylpseudouridine
  modified_base 377: mod_base = OTHER; note = N1-methylpseudouridine
  modified_base 389: mod_base = OTHER; note = N1-methylpseudouridine
  modified_base 395: mod_base = OTHER; note = N1-methylpseudouridine
  modified_base 407: mod_base = OTHER; note = N1-methylpseudouridine
  modified_base 409: mod_base = OTHER; note = N1-methylpseudouridine
  modified_base 410: mod_base = OTHER; note = N1-methylpseudouridine
  modified_base 421: mod_base = OTHER; note = N1-methylpseudouridine
  modified_base 423: mod_base = OTHER; note = N1-methylpseudouridine
  modified_base 426: mod_base = OTHER; note = N1-methylpseudouridine
  modified_base 431: mod_base = OTHER; note = N1-methylpseudouridine
  modified_base 434: mod_base = OTHER; note = N1-methylpseudouridine
  modified_base 435: mod_base = OTHER; note = N1-methylpseudouridine
  modified_base 436: mod_base = OTHER; note = N1-methylpseudouridine
  modified_base 442: mod_base = OTHER; note = N1-methylpseudouridine
  modified_base 443: mod_base = OTHER; note = N1-methylpseudouridine
  modified_base 445: mod_base = OTHER; note = N1-methylpseudouridine
  modified_base 446: mod_base = OTHER; note = N1-methylpseudouridine
  modified_base 452: mod_base = OTHER; note = N1-methylpseudouridine
  modified_base 464: mod_base = OTHER; note = N1-methylpseudouridine
  modified_base 466: mod_base = OTHER; note = N1-methylpseudouridine
  modified_base 467: mod_base = OTHER; note = N1-methylpseudouridine
  modified_base 490: mod_base = OTHER; note = N1-methylpseudouridine
  modified_base 498: mod_base = OTHER; note = N1-methylpseudouridine
  modified_base 501: mod_base = OTHER; note = N1-methylpseudouridine
angncagaagnagaanncncccacgagnannggangagacacgcncncacacncgccaagcgagcnagggangaaagggaagnaccagngggggccgnacnggnacncaacaanagggncanaggagaggggnggaancgagcaanngggcngcangancccacngcacacgcggagannanggcncnnagacaagggggccnggngangcagaannaccgccncanngacgcaacccnnnacgngacannngagccangcgnnangngcgcgggcgcaanganacacncnagganaggccgcgnagnnnncggagnccgaaangcgaagacnggggcggccggancncnganggacgngcnccaccanccaggcangaaccaccgagnggaganaacggaaggcancnnggcggacgaangngcngcgcnccnnngcaggnncnnccggangccaagacgggnanncaacgcgcagaagaaggcacagncaagcacngan

SEQ ID NO: 2170 - RNA, 96 nt, synthetic construct
  source 1..96: mol_type = other RNA; note = Description of Artificial Sequence: Synthetic oligonucleotide
  modified_base 3: mod_base = OTHER; note = N1-methylpseudouridine
  modified_base 12: mod_base = OTHER; note = N1-methylpseudouridine
  modified_base 13: mod_base = OTHER; note = N1-methylpseudouridine
  modified_base 22: mod_base = OTHER; note = N1-methylpseudouridine
  modified_base 24: mod_base = OTHER; note = N1-methylpseudouridine
  modified_base 27: mod_base = OTHER; note = N1-methylpseudouridine
  modified_base 31: mod_base = OTHER; note = N1-methylpseudouridine
  modified_base 49: mod_base = OTHER; note = N1-methylpseudouridine
  modified_base 55: mod_base = OTHER; note = N1-methylpseudouridine
  modified_base 63: mod_base = OTHER; note = N1-methylpseudouridine
  modified_base 72: mod_base = OTHER; note = N1-methylpseudouridine
  modified_base 73: mod_base = OTHER; note = N1-methylpseudouridine
  modified_base 82: mod_base = OTHER; note = N1-methylpseudouridine
  modified_base 85: mod_base = OTHER; note = N1-methylpseudouridine
agnggcggcagnnccggaggancnagngggnccgaaacgccagggaccnccgaanccgcaacncccgaaagnncaggaggcnccnccggcggcagc

SEQ ID NO: 2171 - RNA, 4101 nt, synthetic construct
  source 1..4101: mol_type = other RNA; note = Description of Artificial Sequence: Synthetic polynucleotide
  modified_base 10: mod_base = OTHER; note = N1-methylpseudouridine
  modified_base 13: mod_base = OTHER; note = N1-methylpseudouridine
  modified_base 17: mod_base = OTHER; note = N1-methylpseudouridine
  modified_base 18: mod_base = OTHER; note = N1-methylpseudouridine
  modified_base 21: mod_base = OTHER; note = N1-methylpseudouridine
  modified_base 23: mod_base = OTHER; note = N1-methylpseudouridine
  modified_base 29: mod_base = OTHER; note = N1-methylpseudouridine
  modified_base 33: mod_base = OTHER; note = N1-methylpseudouridine
  modified_base 39: mod_base = OTHER; note = N1-methylpseudouridine
  modified_base 42: mod_base = OTHER; note = N1-methylpseudouridine
  modified_base 44: mod_base = OTHER; note = N1-methylpseudouridine
  modified_base 45: mod_base = OTHER; note = N1-methylpseudouridine
  modified_base 49: mod_base = OTHER; note = N1-methylpseudouridine
  modified_base 54: mod_base = OTHER; note = N1-methylpseudouridine
  modified_base 56: mod_base = OTHER; note = N1-methylpseudouridine
  modified_base 59: mod_base = OTHER; note = N1-methylpseudouridine
  modified_base 63: mod_base = OTHER; note = N1-methylpseudouridine
  modified_base 70: mod_base = OTHER; note = N1-methylpseudouridine
  modified_base 72: mod_base = OTHER; note = N1-methylpseudouridine
  modified_base 77: mod_base = OTHER; note = N1-methylpseudouridine
  modified_base 84: mod_base = OTHER; note = N1-methylpseudouridine
  modified_base 91: mod_base = OTHER; note = N1-methylpseudouridine
  modified_base 92: mod_base = OTHER; note = N1-methylpseudouridine
  modified_base 98: mod_base = OTHER; note = N1-methylpseudouridine
  modified_base 101: mod_base = OTHER; note = N1-methylpseudouridine
  modified_base 120: mod_base = OTHER; note = N1-methylpseudouridine
  modified_base 125: mod_base = OTHER; note = N1-methylpseudouridine
  modified_base 137: mod_base = OTHER; note = N1-methylpseudouridine
  modified_base 140: mod_base = OTHER; note = N1-methylpseudouridine
  modified_base 144: mod_base = OTHER; note = N1-methylpseudouridine
  modified_base 149: mod_base = OTHER; note = N1-methylpseudouridine
  modified_base 151: mod_base = OTHER; note = N1-methylpseudouridine
  modified_base 152: mod_base = OTHER; note = N1-methylpseudouridine
  modified_base 154: mod_base = OTHER; note = N1-methylpseudouridine
  modified_base 155: mod_base = OTHER; note = N1-methylpseudouridine
  modified_base 156: mod_base = OTHER; note = N1-methylpseudouridine
  modified_base 160: mod_base = OTHER; note = N1-methylpseudouridine
  modified_base 188: mod_base = OTHER; note = N1-methylpseudouridine
  modified_base 189: mod_base = OTHER; note = N1-methylpseudouridine
  modified_base 201: mod_base = OTHER; note = N1-methylpseudouridine
  modified_base 211: mod_base = OTHER; note = N1-methylpseudouridine
  modified_base 228: mod_base = OTHER; note = N1-methylpseudouridine
  modified_base 233: mod_base = OTHER; note = N1-methylpseudouridine
  modified_base 234: mod_base = OTHER; note = N1-methylpseudouridine
  modified_base 235: mod_base = OTHER; note = N1-methylpseudouridine
  modified_base 237: mod_base = OTHER; note = N1-methylpseudouridine
  modified_base 238: mod_base = OTHER; note = N1-methylpseudouridine
  modified_base 242: mod_base = OTHER; note = N1-methylpseudouridine
  modified_base 251: mod_base = OTHER; note = N1-methylpseudouridine
  modified_base 253: mod_base = OTHER; note = N1-methylpseudouridine
  modified_base 254: mod_base = OTHER; note = N1-methylpseudouridine
  modified_base 255: mod_base = OTHER; note = N1-methylpseudouridine
  modified_base 266: mod_base = OTHER; note = N1-methylpseudouridine
  modified_base 275: mod_base = OTHER; note = N1-methylpseudouridine
  modified_base 276: mod_base = OTHER; note = N1-methylpseudouridine
  modified_base 282: mod_base = OTHER; note = N1-methylpseudouridine
  modified_base 283: mod_base = OTHER; note = N1-methylpseudouridine
  modified_base 286: mod_base = OTHER; note = N1-methylpseudouridine
  modified_base 287: mod_base = OTHER; note = N1-methylpseudouridine
  modified_base 289: mod_base = OTHER; note = N1-methylpseudouridine
  modified_base 290: mod_base = OTHER; note = N1-methylpseudouridine
  modified_base 299: mod_base = OTHER; note = N1-methylpseudouridine
  modified_base 300: mod_base = OTHER; note = N1-methylpseudouridine
  modified_base 307: mod_base = OTHER; note = N1-methylpseudouridine
  modified_base 309: mod_base = OTHER; note = N1-methylpseudouridine
  modified_base 310: mod_base = OTHER; note = N1-methylpseudouridine
  modified_base 311: mod_base = OTHER; note = N1-methylpseudouridine
  modified_base 314: mod_base = OTHER; note = N1-methylpseudouridine
  modified_base 317: mod_base = OTHER; note = N1-methylpseudouridine
  modified_base 336: mod_base = OTHER; note = N1-methylpseudouridine
  modified_base 350: mod_base = OTHER; note = N1-methylpseudouridine
  modified_base 352: mod_base = OTHER; note = N1-methylpseudouridine
  modified_base 353: mod_base = OTHER; note = N1-methylpseudouridine
  modified_base 354: mod_base = OTHER; note = N1-methylpseudouridine
  modified_base 360: mod_base = OTHER; note = N1-methylpseudouridine
  modified_base 362: mod_base = OTHER; note = N1-methylpseudouridine
  modified_base 365: mod_base = OTHER; note = N1-methylpseudouridine
  modified_base 374: mod_base = OTHER; note = N1-methylpseudouridine
  modified_base 379: mod_base = OTHER; note = N1-methylpseudouridine
  modified_base 384: mod_base = OTHER; note = N1-methylpseudouridine
  modified_base 391: mod_base = OTHER; note = N1-methylpseudouridine
  modified_base 396: mod_base = OTHER; note = N1-methylpseudouridine
  modified_base 401: mod_base = OTHER; note = N1-methylpseudouridine
  modified_base 403: mod_base = OTHER; note = N1-methylpseudouridine
  modified_base 405: mod_base = OTHER; note = N1-methylpseudouridine
  modified_base 408: mod_base = OTHER; note = N1-methylpseudouridine
  modified_base 410: mod_base = OTHER; note = N1-methylpseudouridine
  modified_base 411: mod_base = OTHER; note = N1-methylpseudouridine
  modified_base 422: mod_base = OTHER; note = N1-methylpseudouridine
  modified_base 423: mod_base = OTHER; note = N1-methylpseudouridine
  modified_base 425: mod_base = OTHER; note = N1-methylpseudouridine
  modified_base 429: mod_base = OTHER; note = N1-methylpseudouridine
  modified_base 430: mod_base = OTHER; note = N1-methylpseudouridine
  modified_base 438: mod_base = OTHER; note = N1-methylpseudouridine
  modified_base 447: mod_base = OTHER; note = N1-methylpseudouridine
  modified_base 449: mod_base = OTHER; note = N1-methylpseudouridine
  modified_base 454: mod_base = OTHER; note = N1-methylpseudouridine
  modified_base 455: mod_base = OTHER; note = N1-methylpseudouridine
  modified_base 458: mod_base = OTHER; note = N1-methylpseudouridine
  modified_base 460: mod_base = OTHER; note = N1-methylpseudouridine
  modified_base 462: mod_base = OTHER; note = N1-methylpseudouridine
  modified_base 464: mod_base = OTHER; note = N1-methylpseudouridine
  modified_base 470: mod_base = OTHER; note = N1-methylpseudouridine
  modified_base 479: mod_base = OTHER; note = N1-methylpseudouridine
  modified_base 482: mod_base = OTHER; note = N1-methylpseudouridine
  modified_base 487: mod_base = OTHER; note = N1-methylpseudouridine
  modified_base 488: mod_base = OTHER; note = N1-methylpseudouridine
  modified_base 489: mod_base = OTHER; note = N1-methylpseudouridine
  modified_base 495: mod_base = OTHER; note = N1-methylpseudouridine
  modified_base 499: mod_base = OTHER; note = N1-methylpseudouridine
  modified_base 500: mod_base = OTHER; note = N1-methylpseudouridine
  modified_base 501: mod_base = OTHER; note = N1-methylpseudouridine
  modified_base 503: mod_base = OTHER; note = N1-methylpseudouridine
  modified_base 504: mod_base = OTHER; note = N1-methylpseudouridine
  modified_base 506: mod_base = OTHER; note = N1-methylpseudouridine
  modified_base 516: mod_base = OTHER; note = N1-methylpseudouridine
  modified_base 518: mod_base = OTHER; note = N1-methylpseudouridine
  modified_base 519: mod_base = OTHER; note = N1-methylpseudouridine
  modified_base 522: mod_base = OTHER; note = N1-methylpseudouridine
  modified_base 532: mod_base = OTHER; note = N1-methylpseudouridine
  modified_base 539: mod_base = OTHER; note = N1-methylpseudouridine
  modified_base 543: mod_base = OTHER; note = N1-methylpseudouridine
  modified_base 548: mod_base = OTHER; note = N1-methylpseudouridine
  modified_base 550: mod_base = OTHER; note = N1-methylpseudouridine
  modified_base 551: mod_base = OTHER; note = N1-methylpseudouridine
  modified_base 554: mod_base = OTHER; note = N1-methylpseudouridine
  modified_base 560: mod_base = OTHER; note = N1-methylpseudouridine
  modified_base 563: mod_base = OTHER; note = N1-methylpseudouridine
  modified_base 571: mod_base = OTHER; note = N1-methylpseudouridine
  modified_base 573: mod_base = OTHER; note = N1-methylpseudouridine
  modified_base 581: mod_base = OTHER; note = N1-methylpseudouridine
  modified_base 583: mod_base = OTHER; note = N1-methylpseudouridine
  modified_base 584: mod_base = OTHER; note = N1-methylpseudouridine
  modified_base 594: mod_base = OTHER; note = N1-methylpseudouridine
  modified_base 599: mod_base = OTHER; note = N1-methylpseudouridine
  modified_base 603: mod_base = OTHER; note = N1-methylpseudouridine
  modified_base 607: mod_base = OTHER; note = N1-methylpseudouridine
  modified_base 609: mod_base = OTHER; note = N1-methylpseudouridine
  modified_base 614: mod_base = OTHER; note = N1-methylpseudouridine
  modified_base 629: mod_base = OTHER; note = N1-methylpseudouridine
  modified_base 632: mod_base = OTHER; note = N1-methylpseudouridine
  modified_base 634: mod_base = OTHER; note = N1-methylpseudouridine
  modified_base 644: mod_base = OTHER; note = N1-methylpseudouridine
  modified_base 645: mod_base = OTHER; note = N1-methylpseudouridine
  modified_base 648: mod_base = OTHER; note = N1-methylpseudouridine
  modified_base 652: mod_base = OTHER; note = N1-methylpseudouridine
  modified_base 654: mod_base = OTHER; note = N1-methylpseudouridine
  modified_base 662: mod_base = OTHER; note = N1-methylpseudouridine
  modified_base 663: mod_base = OTHER; note = N1-methylpseudouridine
  modified_base 671: mod_base = OTHER; note = N1-methylpseudouridine
  modified_base 674: mod_base = OTHER; note = N1-methylpseudouridine
  modified_base 682: mod_base = OTHER; note = N1-methylpseudouridine
  modified_base 683: mod_base = OTHER; note = N1-methylpseudouridine
  modified_base 702: mod_base = OTHER; note = N1-methylpseudouridine
  modified_base 706: mod_base = OTHER; note = N1-methylpseudouridine
  modified_base 707: mod_base = OTHER; note = N1-methylpseudouridine
  modified_base 709: mod_base = OTHER; note = N1-methylpseudouridine
  modified_base 710: mod_base = OTHER; note = N1-methylpseudouridine
  modified_base 711: mod_base = OTHER; note = N1-methylpseudouridine
  modified_base 714: mod_base = OTHER; note = N1-methylpseudouridine
  modified_base 719: mod_base = OTHER; note = N1-methylpseudouridine
  modified_base 720: mod_base = OTHER; note = N1-methylpseudouridine
  modified_base 722: mod_base = OTHER; note = N1-methylpseudouridine
  modified_base 723: mod_base = OTHER; note = N1-methylpseudouridine
  modified_base 728: mod_base = OTHER; note = N1-methylpseudouridine
  modified_base 732: mod_base = OTHER; note = N1-methylpseudouridine
  modified_base 734: mod_base = OTHER; note = N1-methylpseudouridine
  modified_base 740: mod_base = OTHER; note = N1-methylpseudouridine
  modified_base 741: mod_base = OTHER; note = N1-methylpseudouridine
  modified_base 747: mod_base = OTHER; note = N1-methylpseudouridine
  modified_base 751: mod_base = OTHER; note = N1-methylpseudouridine
  modified_base 752: mod_base = OTHER; note = N1-methylpseudouridine
  modified_base 757: mod_base = OTHER; note = N1-methylpseudouridine
  modified_base 763: mod_base = OTHER; note = N1-methylpseudouridine
  modified_base 764: mod_base = OTHER; note = N1-methylpseudouridine
  modified_base 768: mod_base = OTHER; note = N1-methylpseudouridine
  modified_base 770: mod_base = OTHER; note = N1-methylpseudouridine
  modified_base 771: mod_base = OTHER; note = N1-methylpseudouridine
  modified_base 788: mod_base = OTHER; note = N1-methylpseudouridine
  modified_base 794: mod_base = OTHER; note = N1-methylpseudouridine
  modified_base 795: mod_base = OTHER; note = N1-methylpseudouridine
  modified_base 804: mod_base = OTHER; note = N1-methylpseudouridine
  modified_base 808: mod_base = OTHER; note = N1-methylpseudouridine
  modified_base 813: mod_base = OTHER; note = N1-methylpseudouridine
  modified_base 819: mod_base = OTHER; note = N1-methylpseudouridine
  modified_base 821: mod_base = OTHER; note = N1-methylpseudouridine
  modified_base 822: mod_base = OTHER; note = N1-methylpseudouridine
  modified_base 825: mod_base = OTHER; note = N1-methylpseudouridine
  modified_base 830: mod_base = OTHER; note = N1-methylpseudouridine
  modified_base 833: mod_base = OTHER; note = N1-methylpseudouridine
  modified_base 842: mod_base = OTHER; note = N1-methylpseudouridine
  modified_base 853: mod_base = OTHER; note = N1-methylpseudouridine
  modified_base 863: mod_base = OTHER; note = N1-methylpseudouridine
  modified_base 864: mod_base = OTHER; note = N1-methylpseudouridine
  modified_base 865: mod_base = OTHER; note = N1-methylpseudouridine
  modified_base 866: mod_base = OTHER; note = N1-methylpseudouridine
  modified_base 868: mod_base = OTHER; note = N1-methylpseudouridine
  modified_base 869: mod_base = OTHER; note = N1-methylpseudouridine
  modified_base 882: mod_base = OTHER; note = N1-methylpseudouridine
  modified_base 883: mod_base = OTHER; note = N1-methylpseudouridine
  modified_base 884: mod_base = OTHER; note = N1-methylpseudouridine
  modified_base 886: mod_base = OTHER; note = N1-methylpseudouridine
  modified_base 896: mod_base = OTHER; note = N1-methylpseudouridine
  modified_base 899: mod_base = OTHER; note = N1-methylpseudouridine
  modified_base 901: mod_base = OTHER; note = N1-methylpseudouridine
  modified_base 902: mod_base = OTHER; note = N1-methylpseudouridine
  modified_base 911: mod_base = OTHER; note = N1-methylpseudouridine
  modified_base 914: mod_base = OTHER; note = N1-methylpseudouridine
  modified_base 920: mod_base = OTHER; note = N1-methylpseudouridine
  modified_base 927: mod_base = OTHER; note = N1-methylpseudouridine
  modified_base 932: mod_base = OTHER; note = N1-methylpseudouridine
  modified_base 933: mod_base = OTHER; note = N1-methylpseudouridine
  modified_base 936: mod_base = OTHER; note = N1-methylpseudouridine
  modified_base 947: mod_base = OTHER; note = N1-methylpseudouridine
  modified_base 948: mod_base = OTHER; note = N1-methylpseudouridine
  modified_base 949: mod_base = OTHER; note = N1-methylpseudouridine
  modified_base 959: mod_base = OTHER; note = N1-methylpseudouridine
  modified_base 962: mod_base = OTHER; note = N1-methylpseudouridine
  modified_base 970: mod_base = OTHER; note = N1-methylpseudouridine
  modified_base 975: mod_base = OTHER; note = N1-methylpseudouridine
  modified_base 981: mod_base = OTHER; note = N1-methylpseudouridine
  modified_base 984: mod_base = OTHER; note = N1-methylpseudouridine
  modified_base 990: mod_base = OTHER; note = N1-methylpseudouridine
  modified_base 992: mod_base = OTHER; note = N1-methylpseudouridine
  modified_base 998: mod_base = OTHER; note = N1-methylpseudouridine
  modified_base 1001: mod_base = OTHER; note = N1-methylpseudouridine
  modified_base 1002: mod_base = OTHER; note = N1-methylpseudouridine
  modified_base 1010: mod_base = OTHER; note = N1-methylpseudouridine
  modified_base 1011: mod_base = OTHER; note = N1-methylpseudouridine
  modified_base 1013: mod_base = OTHER; note = N1-methylpseudouridine
  modified_base 1024: mod_base = OTHER; note = N1-methylpseudouridine
  modified_base 1025: mod_base = OTHER; note = N1-methylpseudouridine
  modified_base 1029: mod_base = OTHER; note = N1-methylpseudouridine
  modified_base 1036: mod_base = OTHER; note = N1-methylpseudouridine
  modified_base 1038: mod_base = OTHER; note = N1-methylpseudouridine
  modified_base 1046: mod_base = OTHER; note = N1-methylpseudouridine
  modified_base 1048: mod_base = OTHER; note = N1-methylpseudouridine
  modified_base 1049: mod_base = OTHER; note = N1-methylpseudouridine
  modified_base 1050: mod_base = OTHER; note = N1-methylpseudouridine
  modified_base 1051: mod_base = OTHER; note = N1-methylpseudouridine
  modified_base 1052: mod_base = OTHER; note = N1-methylpseudouridine
  modified_base 1071: mod_base = OTHER; note = N1-methylpseudouridine
  modified_base 1072: mod_base = OTHER; note = N1-methylpseudouridine
  modified_base 1074: mod_base = OTHER; note = N1-methylpseudouridine
  modified_base 1077: mod_base = OTHER; note = N1-methylpseudouridine
  modified_base 1081: mod_base = OTHER; note = N1-methylpseudouridine
  modified_base 1085: mod_base = OTHER; note = N1-methylpseudouridine
  modified_base 1098: mod_base = OTHER; note = N1-methylpseudouridine
  modified_base 1099: mod_base = OTHER; note = N1-methylpseudouridine
  modified_base 1101: mod_base = OTHER; note = N1-methylpseudouridine
  modified_base 1111: mod_base = OTHER; note = N1-methylpseudouridine
  modified_base 1112: mod_base = OTHER; note = N1-methylpseudouridine
  modified_base 1114: mod_base = OTHER; note = N1-methylpseudouridine
  modified_base 1120: mod_base = OTHER; note = N1-methylpseudouridine
  modified_base 1121: mod_base = OTHER; note = N1-methylpseudouridine
  modified_base 1122: mod_base = OTHER; note = N1-methylpseudouridine
  modified_base 1124: mod_base = OTHER; note = N1-methylpseudouridine
  modified_base 1133: mod_base = OTHER; note = N1-methylpseudouridine
  modified_base 1134: mod_base = OTHER; note = N1-methylpseudouridine
  modified_base 1136: mod_base = OTHER; note = N1-methylpseudouridine
  modified_base 1145: mod_base = OTHER; note = N1-methylpseudouridine
  modified_base 1149: mod_base = OTHER; note = N1-methylpseudouridine
  modified_base 1163: mod_base = OTHER; note = N1-methylpseudouridine
  modified_base 1165: mod_base = OTHER; note = N1-methylpseudouridine
  modified_base 1166: mod_base = OTHER; note = N1-methylpseudouridine
  modified_base 1169: mod_base = OTHER; note = N1-methylpseudouridine
  modified_base 1175: mod_base = OTHER; note = N1-methylpseudouridine
  modified_base 1190: mod_base = OTHER; note = N1-methylpseudouridine
  modified_base 1193: mod_base = OTHER; note = N1-methylpseudouridine
  modified_base 1210: mod_base = OTHER; note = N1-methylpseudouridine
  modified_base 1211: mod_base = OTHER; note = N1-methylpseudouridine
  modified_base 1215: mod_base = OTHER; note = N1-methylpseudouridine
  modified_base 1218: mod_base = OTHER; note = N1-methylpseudouridine
  modified_base 1226: mod_base = OTHER; note = N1-methylpseudouridine
  modified_base 1238: mod_base = OTHER; note = N1-methylpseudouridine
  modified_base 1239: mod_base = OTHER; note = N1-methylpseudouridine
  modified_base 1242: mod_base = OTHER; note = N1-methylpseudouridine
  modified_base 1243: mod_base = OTHER; note = N1-methylpseudouridine
  modified_base 1244: mod_base = OTHER; note = N1-methylpseudouridine
  modified_base 1248: mod_base = OTHER; note = N1-methylpseudouridine
  modified_base 1253: mod_base = OTHER; note = N1-methylpseudouridine
  modified_base 1257: mod_base = OTHER; note = N1-methylpseudouridine
  modified_base 1262: mod_base = OTHER; note = N1-methylpseudouridine
  modified_base 1264: mod_base = OTHER; note = N1-methylpseudouridine
  modified_base 1265: mod_base = OTHER; note = N1-methylpseudouridine
  modified_base 1281: mod_base = OTHER; note = N1-methylpseudouridine
  modified_base 1282: mod_base = OTHER; note = N1-methylpseudouridine
  modified_base 1283: mod_base = OTHER; note = N1-methylpseudouridine
  modified_base 1284: mod_base = OTHER; note = N1-methylpseudouridine
  modified_base 1285: mod_base = OTHER; note = N1-methylpseudouridine
  modified_base 1291: mod_base = OTHER; note = N1-methylpseudouridine
  modified_base 1292: mod_base = OTHER; note = N1-methylpseudouridine
  modified_base 1295: mod_base = OTHER; note = N1-methylpseudouridine
  modified_base 1305: mod_base = OTHER; note = N1-methylpseudouridine
  modified_base 1316: mod_base = OTHER; note = N1-methylpseudouridine
  modified_base 1317: mod_base = OTHER; note = N1-methylpseudouridine
  modified_base 1325: mod_base = OTHER; note = N1-methylpseudouridine
  modified_base 1328: mod_base = OTHER; note = N1-methylpseudouridine
  modified_base 1329: mod_base = OTHER; note = N1-methylpseudouridine
  modified_base 1333: mod_base = OTHER; note = N1-methylpseudouridine
  modified_base 1334: mod_base = OTHER; note = N1-methylpseudouridine
  modified_base 1335: mod_base = OTHER; note = N1-methylpseudouridine
  modified_base 1340: mod_base = OTHER; note = N1-methylpseudouridine
  modified_base 1341: mod_base = OTHER; note = N1-methylpseudouridine
  modified_base 1345: mod_base = OTHER; note = N1-methylpseudouridine
  modified_base 1347: mod_base = OTHER; note = N1-methylpseudouridine
  modified_base 1348: mod_base = OTHER; note = N1-methylpseudouridine
  modified_base 1352: mod_base = OTHER; note = N1-methylpseudouridine
  modified_base 1361: mod_base = OTHER; note = N1-methylpseudouridine
  modified_base 1371: mod_base = OTHER; note = N1-methylpseudouridine
  modified_base 1374: mod_base = OTHER; note = N1-methylpseudouridine
  modified_base 1375: mod_base = OTHER; note = N1-methylpseudouridine
  modified_base 1377: mod_base = OTHER; note = N1-methylpseudouridine
  modified_base 1381: mod_base = OTHER; note = N1-methylpseudouridine
  modified_base 1382: mod_base = OTHER; note = N1-methylpseudouridine
  modified_base 1383: mod_base = OTHER; note = N1-methylpseudouridine
  modified_base 1387: mod_base = OTHER; note = N1-methylpseudouridine
  modified_base 1391: mod_base = OTHER; note = N1-methylpseudouridine
  modified_base 1415: mod_base = OTHER; note = N1-methylpseudouridine
  modified_base 1423: mod_base = OTHER; note = N1-methylpseudouridine
  modified_base 1429: mod_base = OTHER; note = N1-methylpseudouridine
  modified_base 1430: mod_base = OTHER; note = N1-methylpseudouridine
  modified_base 1431: mod_base = OTHER; note = N1-methylpseudouridine
  modified_base 1439: mod_base = OTHER; note = N1-methylpseudouridine
  modified_base 1442: mod_base = OTHER; note = N1-methylpseudouridine
  modified_base 1446: mod_base = OTHER; note = N1-methylpseudouridine
  modified_base 1452: mod_base = OTHER; note = N1-methylpseudouridine
  modified_base 1465: mod_base = OTHER; note = N1-methylpseudouridine
  modified_base 1468: mod_base = OTHER; note = N1-methylpseudouridine
  modified_base 1469: mod_base = OTHER; note = N1-methylpseudouridine
  modified_base 1470: mod_base = OTHER; note = N1-methylpseudouridine
  modified_base 1472: mod_base = OTHER; note = N1-methylpseudouridine
  modified_base 1481: mod_base = OTHER; note = N1-methylpseudouridine
  modified_base 1485: mod_base = OTHER; note = N1-methylpseudouridine
  modified_base 1488: mod_base = OTHER; note = N1-methylpseudouridine
  modified_base 1489: mod_base = OTHER; note = N1-methylpseudouridine
  modified_base 1490: mod_base = OTHER; note = N1-methylpseudouridine
  modified_base 1494: mod_base = OTHER; note = N1-methylpseudouridine
  modified_base 1500: mod_base = OTHER; note = N1-methylpseudouridine
  modified_base 1502: mod_base = OTHER; note = N1-methylpseudouridine
  modified_base 1509: mod_base = OTHER; note = N1-methylpseudouridine
  modified_base 1517: mod_base = OTHER; note = N1-methylpseudouridine
  modified_base 1519: mod_base = OTHER; note = N1-methylpseudouridine
  modified_base 1520: mod_base = OTHER; note = N1-methylpseudouridine
  modified_base 1530: mod_base = OTHER; note = N1-methylpseudouridine
  modified_base 1535: mod_base = OTHER; note = N1-methylpseudouridine
  modified_base 1536: mod_base = OTHER; note = N1-methylpseudouridine
  modified_base 1537: mod_base = OTHER; note = N1-methylpseudouridine
  modified_base 1538: mod_base = OTHER; note = N1-methylpseudouridine
  modified_base 1540: mod_base = OTHER; note = N1-methylpseudouridine
  modified_base 1542: mod_base = OTHER; note = N1-methylpseudouridine
  modified_base 1546: mod_base = OTHER; note = N1-methylpseudouridine
  modified_base 1548: mod_base = OTHER; note = N1-methylpseudouridine
  modified_base 1549: mod_base = OTHER; note = N1-methylpseudouridine
  modified_base 1550: mod_base = OTHER; note = N1-methylpseudouridine
  modified_base 1551: mod_base = OTHER; note = N1-methylpseudouridine
  modified_base 1554: mod_base = OTHER; note = N1-methylpseudouridine
  modified_base 1556: mod_base = OTHER; note = N1-methylpseudouridine
  modified_base 1558: mod_base = OTHER; note = N1-methylpseudouridine
  modified_base 1568: mod_base = OTHER; note = N1-methylpseudouridine
  modified_base 1577: mod_base = OTHER; note = N1-methylpseudouridine
  modified_base 1582: mod_base = OTHER; note = N1-methylpseudouridine
  modified_base 1584: mod_base = OTHER; note = N1-methylpseudouridine
  modified_base 1586: mod_base = OTHER; note = N1-methylpseudouridine
  modified_base 1590: mod_base = OTHER; note = N1-methylpseudouridine
  modified_base 1598: mod_base = OTHER; note = N1-methylpseudouridine
  modified_base 1612: mod_base = OTHER; note = N1-methylpseudouridine
  modified_base 1613: mod_base = OTHER; note = N1-methylpseudouridine
  modified_base 1614: mod_base = OTHER; note = N1-methylpseudouridine
  modified_base 1615: mod_base = OTHER; note = N1-methylpseudouridine
  modified_base 1616: mod_base = OTHER; note = N1-methylpseudouridine
  modified_base 1638: mod_base = OTHER; note = N1-methylpseudouridine
  modified_base 1640: mod_base = OTHER; note = N1-methylpseudouridine
  modified_base 1641: mod_base = OTHER; note = N1-methylpseudouridine
  modified_base 1643: mod_base = OTHER; note = N1-methylpseudouridine
  modified_base 1648: mod_base = OTHER; note = N1-methylpseudouridine
  modified_base 1649: mod_base = OTHER; note = N1-methylpseudouridine
  modified_base 1652: mod_base = OTHER; note = N1-methylpseudouridine
  modified_base 1653: mod_base = OTHER; note = N1-methylpseudouridine
  modified_base 1654: mod_base = OTHER; note = N1-methylpseudouridine
  modified_base 1655: mod_base = OTHER; note = N1-methylpseudouridine
  modified_base 1656: mod_base = OTHER; note = N1-methylpseudouridine
  modified_base 1665: mod_base = OTHER; note = N1-methylpseudouridine
  modified_base 1673: mod_base = OTHER; note = N1-methylpseudouridine
  modified_base 1674: mod_base = OTHER; note = N1-methylpseudouridine
  modified_base 1679: mod_base = OTHER; note = N1-methylpseudouridine
  modified_base 1688: mod_base = OTHER; note = N1-methylpseudouridine
  modified_base 1699: mod_base = OTHER; note = N1-methylpseudouridine
  modified_base 1702: mod_base = OTHER; note = N1-methylpseudouridine
  modified_base 1703: mod_base = OTHER; note = N1-methylpseudouridine
  modified_base 1704: mod_base = OTHER; note = N1-methylpseudouridine
  modified_base 1712: mod_base = OTHER; note = N1-methylpseudouridine
  modified_base 1717: mod_base = OTHER; note = N1-methylpseudouridine
  modified_base 1720: mod_base = OTHER; note = N1-methylpseudouridine
  modified_base 1721: mod_base = OTHER; note = N1-methylpseudouridine
  modified_base 1722: mod_base = OTHER; note = N1-methylpseudouridine
  modified_base 1726: mod_base = OTHER; note = N1-methylpseudouridine
  modified_base 1728: mod_base = OTHER; note = N1-methylpseudouridine
  modified_base 1730: mod_base = OTHER; note = N1-methylpseudouridine
  modified_base 1736: mod_base = OTHER; note = N1-methylpseudouridine
  modified_base 1737: mod_base = OTHER; note = N1-methylpseudouridine
  modified_base 1740: mod_base = OTHER; note = N1-methylpseudouridine
  modified_base 1745: mod_base = OTHER; note = N1-methylpseudouridine
  modified_base 1752: mod_base = OTHER; note = N1-methylpseudouridine
  modified_base 1756: mod_base = OTHER; note = N1-methylpseudouridine
  modified_base 1757: mod_base = OTHER; note = N1-methylpseudouridine
  modified_base 1761: mod_base = OTHER; note = N1-methylpseudouridine
  modified_base 1769: mod_base = OTHER; note = N1-methylpseudouridine
  modified_base 1777: mod_base = OTHER; note = N1-methylpseudouridine
  modified_base 1785: mod_base = OTHER; note = N1-methylpseudouridine
  modified_base 1787: mod_base = OTHER; note = N1-methylpseudouridine
  modified_base 1789: mod_base = OTHER; note = N1-methylpseudouridine
  modified_base 1790: mod_base = OTHER; note = N1-methylpseudouridine
  modified_base 1796: mod_base = OTHER; note = N1-methylpseudouridine
  modified_base 1797: mod_base = OTHER; note = N1-methylpseudouridine
  modified_base 1799: mod_base = OTHER; note = N1-methylpseudouridine
  modified_base 1806: mod_base = OTHER; note = N1-methylpseudouridine
  modified_base 1812: mod_base = OTHER; note = N1-methylpseudouridine
  modified_base 1813: mod_base = OTHER; note = N1-methylpseudouridine
  modified_base 1814: mod_base = OTHER; note = N1-methylpseudouridine
  modified_base 1815: mod_base = OTHER; note = N1-methylpseudouridine
  modified_base 1817: mod_base = OTHER; note = N1-methylpseudouridine
  modified_base 1833: mod_base = OTHER; note = N1-methylpseudouridine
  modified_base 1841: mod_base = OTHER; note = N1-methylpseudouridine
  modified_base 1843: mod_base = OTHER; note = N1-methylpseudouridine
  modified_base 1844: mod_base = OTHER; note = N1-methylpseudouridine
  modified_base 1851: mod_base = OTHER; note = N1-methylpseudouridine
  modified_base 1853: mod_base = OTHER; note = N1-methylpseudouridine
  modified_base 1854: mod_base = OTHER; note = N1-methylpseudouridine
  modified_base 1856: mod_base = OTHER; note = N1-methylpseudouridine
  modified_base 1857: mod_base = OTHER; note = N1-methylpseudouridine
  modified_base 1858: mod_base = OTHER; note = N1-methylpseudouridine
  modified_base 1859: mod_base = OTHER; note = N1-methylpseudouridine
  modified_base 1863: mod_base = OTHER; note = N1-methylpseudouridine
  modified_base 1864: mod_base = OTHER; note = N1-methylpseudouridine
  modified_base 1865: mod_base = OTHER; note = N1-methylpseudouridine
  modified_base 1869: mod_base = OTHER; note = N1-methylpseudouridine
  modified_base 1871: mod_base = OTHER; note = N1-methylpseudouridine
  modified_base 1872: mod_base = OTHER; note = N1-methylpseudouridine
  modified_base 1873: mod_base = OTHER; note = N1-methylpseudouridine
  modified_base 1874: mod_base = OTHER; note = N1-methylpseudouridine
  modified_base 1881: mod_base = OTHER; note = N1-methylpseudouridine
  modified_base 1889: mod_base = OTHER; note = N1-methylpseudouridine
  modified_base 1892: mod_base = OTHER; note = N1-methylpseudouridine
  modified_base 1903: mod_base = OTHER; note = N1-methylpseudouridine
  modified_base 1904: mod_base = OTHER; note = N1-methylpseudouridine
  modified_base 1911: mod_base = OTHER; note = N1-methylpseudouridine
  modified_base 1912: mod_base = OTHER; note = N1-methylpseudouridine
  modified_base 1914: mod_base = OTHER; note = N1-methylpseudouridine
  modified_base 1920: mod_base = OTHER; note = N1-methylpseudouridine
  modified_base 1922: mod_base = OTHER; note = N1-methylpseudouridine
  modified_base 1923: mod_base = OTHER; note = N1-methylpseudouridine
  modified_base 1924: mod_base = OTHER; note = N1-methylpseudouridine
  modified_base 1925: mod_base = OTHER; note = N1-methylpseudouridine
  modified_base 1926: mod_base = OTHER; note = N1-methylpseudouridine
  modified_base 1929: mod_base = OTHER; note = N1-methylpseudouridine
  modified_base 1937: mod_base = OTHER; note = N1-methylpseudouridine
  modified_base 1938: mod_base = OTHER; note = N1-methylpseudouridine
  modified_base 1940: mod_base = OTHER; note = N1-methylpseudouridine
  modified_base 1949: mod_base = OTHER; note = N1-methylpseudouridine
  modified_base 1963: mod_base = OTHER; note = N1-methylpseudouridine
  modified_base 1965: mod_base = OTHER; note = N1-methylpseudouridine
  modified_base 1968: mod_base = OTHER; note = N1-methylpseudouridine
  modified_base 1971: mod_base = OTHER; note = N1-methylpseudouridine
  modified_base 1972: mod_base = OTHER; note = N1-methylpseudouridine
  modified_base 1982: mod_base = OTHER; note = N1-methylpseudouridine
  modified_base 1984: mod_base = OTHER; note = N1-methylpseudouridine
  modified_base 1994: mod_base = OTHER; note = N1-methylpseudouridine
  modified_base 1997: mod_base = OTHER; note = N1-methylpseudouridine
  modified_base 1998: mod_base = OTHER; note = N1-methylpseudouridine
  modified_base 2006: mod_base = OTHER; note = N1-methylpseudouridine
  modified_base 2022: mod_base = OTHER; note = N1-methylpseudouridine
  modified_base 2025: mod_base = OTHER; note = N1-methylpseudouridine
  modified_base 2033: mod_base = OTHER; note = N1-methylpseudouridine
  modified_base 2034: mod_base = OTHER; note = N1-methylpseudouridine
  modified_base 2035: mod_base = OTHER; note = N1-methylpseudouridine
  modified_base 2036: mod_base = OTHER; note = N1-methylpseudouridine
  modified_base 2041: mod_base = OTHER; note = N1-methylpseudouridine
  modified_base 2042: mod_base = OTHER; note = N1-methylpseudouridine
  modified_base 2045: mod_base = OTHER; note = N1-methylpseudouridine
  modified_base 2046: mod_base = OTHER; note = N1-methylpseudouridine
  modified_base 2059: mod_base = OTHER; note = N1-methylpseudouridine
  modified_base 2060: mod_base = OTHER; note = N1-methylpseudouridine
  modified_base 2061: mod_base = OTHER; note = N1-methylpseudouridine
  modified_base 2067: mod_base = OTHER; note = N1-methylpseudouridine
  modified_base 2074: mod_base = OTHER; note = N1-methylpseudouridine
  modified_base 2075: mod_base = OTHER; note = N1-methylpseudouridine
  modified_base 2078: mod_base = OTHER; note = N1-methylpseudouridine
  modified_base 2083: mod_base = OTHER; note = N1-methylpseudouridine
  modified_base 2084: mod_base = OTHER; note = N1-methylpseudouridine
  modified_base 2087: mod_base = OTHER; note = N1-methylpseudouridine
  modified_base 2091: mod_base = OTHER; note = N1-methylpseudouridine
  modified_base 2094: mod_base = OTHER; note = N1-methylpseudouridine
  modified_base 2097: mod_base = OTHER; note = N1-methylpseudouridine
  modified_base 2098: mod_base = OTHER; note = N1-methylpseudouridine
  modified_base 2100: mod_base = OTHER; note = N1-methylpseudouridine
  modified_base 2101: mod_base = OTHER; note = N1-methylpseudouridine
  modified_base 2102: mod_base = OTHER; note = N1-methylpseudouridine
  modified_base 2107: mod_base = OTHER; note = N1-methylpseudouridine
  modified_base 2108: mod_base = OTHER; note = N1-methylpseudouridine
  modified_base 2109: mod_base = OTHER; note = N1-methylpseudouridine
  modified_base 2118: mod_base = OTHER; note = N1-methylpseudouridine
  modified_base 2120: mod_base = OTHER; note = N1-methylpseudouridine
  modified_base 2135: mod_base = OTHER; note = N1-methylpseudouridine
  modified_base 2139: mod_base = OTHER; note = N1-methylpseudouridine
  modified_base 2151: mod_base = OTHER; note = N1-methylpseudouridine
  modified_base 2154: mod_base = OTHER; note = N1-methylpseudouridine
  modified_base 2156: mod_base = OTHER; note = N1-methylpseudouridine
  modified_base 2160: mod_base = OTHER; note = N1-methylpseudouridine
  modified_base 2168: mod_base = OTHER; note = N1-methylpseudouridine
  modified_base 2169: mod_base = OTHER; note = N1-methylpseudouridine
  modified_base 2177: mod_base = OTHER; note = N1-methylpseudouridine
  modified_base 2178: mod_base = OTHER; note = N1-methylpseudouridine
  modified_base 2185: mod_base = OTHER; note = N1-methylpseudouridine
  modified_base 2195: mod_base = OTHER; note = N1-methylpseudouridine
  modified_base 2205: mod_base = OTHER; note = N1-methylpseudouridine
  modified_base 2207: mod_base = OTHER; note = N1-methylpseudouridine
  modified_base 2210: mod_base = OTHER; note = N1-methylpseudouridine
  modified_base 2219: mod_base = OTHER; note = N1-methylpseudouridine
  modified_base 2225: mod_base = OTHER; note = N1-methylpseudouridine
  modified_base 2228: mod_base = OTHER; note = N1-methylpseudouridine
  modified_base 2232: mod_base = OTHER; note = N1-methylpseudouridine
  modified_base 2237: mod_base = OTHER; note = N1-methylpseudouridine
  modified_base 2238: mod_base = OTHER; note = N1-methylpseudouridine
  modified_base 2240: mod_base = OTHER; note = N1-methylpseudouridine
  modified_base 2246: mod_base = OTHER; note = N1-methylpseudouridine
  modified_base 2249: mod_base = OTHER; note = N1-methylpseudouridine
  modified_base 2259: mod_base = OTHER; note = N1-methylpseudouridine
  modified_base 2265: mod_base = OTHER; note = N1-methylpseudouridine
  modified_base 2271: mod_base = OTHER; note = N1-methylpseudouridine
  modified_base 2273: mod_base = OTHER; note = N1-methylpseudouridine
  modified_base 2274: mod_base = OTHER; note = N1-methylpseudouridine
  modified_base 2276: mod_base = OTHER; note = N1-methylpseudouridine
  modified_base 2279: mod_base = OTHER; note = N1-methylpseudouridine
  modified_base 2285: mod_base = OTHER; note = N1-methylpseudouridine
  modified_base 2289: mod_base = OTHER; note = N1-methylpseudouridine
  modified_base 2298: mod_base = OTHER; note = N1-methylpseudouridine
  modified_base 2307: mod_base = OTHER; note = N1-methylpseudouridine
  modified_base 2316: mod_base = OTHER; note = N1-methylpseudouridine
  modified_base 2325: mod_base = OTHER; note = N1-methylpseudouridine
  modified_base 2326: mod_base = OTHER; note = N1-methylpseudouridine
  modified_base 2339: mod_base = OTHER; note = N1-methylpseudouridine
  modified_base 2348: mod_base = OTHER; note = N1-methylpseudouridine
  modified_base 2360: mod_base = OTHER; note = N1-methylpseudouridine
  modified_base 2361: mod_base = OTHER; note = N1-methylpseudouridine
  modified_base 2369: mod_base = OTHER; note = N1-methylpseudouridine
  modified_base 2374: mod_base = OTHER; note = N1-methylpseudouridine
  modified_base 2381: mod_base = OTHER; note = N1-methylpseudouridine
  modified_base 2383: mod_base = OTHER; note = N1-methylpseudouridine
  modified_base 2384: mod_base = OTHER; note = N1-methylpseudouridine
  modified_base 2394: mod_base = OTHER; note = N1-methylpseudouridine
  modified_base 2397: mod_base = OTHER; note = N1-methylpseudouridine
  modified_base 2399: mod_base = OTHER; note = N1-methylpseudouridine
  modified_base 2414: mod_base = OTHER; note = N1-methylpseudouridine
  modified_base 2415: mod_base = OTHER; note = N1-methylpseudouridine
  modified_base 2429: mod_base = OTHER; note = N1-methylpseudouridine
  modified_base 2431: mod_base = OTHER; note = N1-methylpseudouridine
  modified_base 2435: mod_base = OTHER; note = N1-methylpseudouridine
  modified_base 2437: mod_base = OTHER; note = N1-methylpseudouridine
  modified_base 2439: mod_base = OTHER; note = N1-methylpseudouridine
  modified_base 2440: mod_base = OTHER; note = N1-methylpseudouridine
  modified_base 2442: mod_base = OTHER; note = N1-methylpseudouridine
  modified_base 2444: mod_base = OTHER; note = N1-methylpseudouridine
  modified_base 2451: mod_base = OTHER; note = N1-methylpseudouridine
  modified_base 2462: mod_base = OTHER; note = N1-methylpseudouridine
  modified_base 2464: mod_base = OTHER; note = N1-methylpseudouridine
  modified_base 2466: mod_base = OTHER; note = N1-methylpseudouridine
  modified_base 2468: mod_base = OTHER; note = N1-methylpseudouridine
  modified_base 2480: mod_base = OTHER; note = N1-methylpseudouridine
  modified_base 2484: mod_base = OTHER; note = N1-methylpseudouridine
  modified_base 2486: mod_base = OTHER; note = N1-methylpseudouridine
  modified_base 2490: mod_base = OTHER; note = N1-methylpseudouridine
  modified_base 2494: mod_base = OTHER; note = N1-methylpseudouridine
  modified_base 2495: mod_base = OTHER; note = N1-methylpseudouridine
  modified_base 2497: mod_base = OTHER; note = N1-methylpseudouridine
  modified_base 2502: mod_base = OTHER; note = N1-methylpseudouridine
  modified_base 2503: mod_base = OTHER; note = N1-methylpseudouridine
  modified_base 2505: mod_base = OTHER; note = N1-methylpseudouridine
  modified_base 2508: mod_base = OTHER; note = N1-methylpseudouridine
  modified_base 2510: mod_base = OTHER; note = N1-methylpseudouridine
  modified_base 2514: mod_base = OTHER; note = N1-methylpseudouridine
  modified_base 2519: mod_base = OTHER; note = N1-methylpseudouridine
  modified_base 2522: mod_base = OTHER; note = N1-methylpseudouridine
  modified_base 2530: mod_base = OTHER; note = N1-methylpseudouridine
  modified_base 2533: mod_base = OTHER; note = N1-methylpseudouridine
  modified_base 2534: mod_base = OTHER; note = N1-methylpseudouridine
  modified_base 2536: mod_base = OTHER; note = N1-methylpseudouridine
  modified_base 2537: mod_base = OTHER; note = N1-methylpseudouridine
  modified_base 2547: mod_base = OTHER; note = N1-methylpseudouridine
  modified_base 2550: mod_base = OTHER; note = N1-methylpseudouridine
  modified_base 2552: mod_base = OTHER; note = N1-methylpseudouridine
  modified_base 2553: mod_base = OTHER; note = N1-methylpseudouridine
  modified_base 2559: mod_base = OTHER; note = N1-methylpseudouridine
  modified_base 2564: mod_base = OTHER; note = N1-methylpseudouridine
  modified_base 2567: mod_base = OTHER; note = N1-methylpseudouridine
  modified_base 2568: mod_base = OTHER; note = N1-methylpseudouridine
  modified_base 2575: mod_base = OTHER; note = N1-methylpseudouridine
  modified_base 2596: mod_base = OTHER; note = N1-methylpseudouridine
  modified_base 2601: mod_base = OTHER; note = N1-methylpseudouridine
  modified_base 2606: mod_base = OTHER; note = N1-methylpseudouridine
  modified_base 2613: mod_base = OTHER; note = N1-methylpseudouridine
  modified_base 2621: mod_base = OTHER; note = N1-methylpseudouridine
  modified_base 2624: mod_base = OTHER; note = N1-methylpseudouridine
  modified_base 2633: mod_base = OTHER; note = N1-methylpseudouridine
  modified_base 2640: mod_base = OTHER; note = N1-methylpseudouridine
  modified_base 2641: mod_base = OTHER; note = N1-methylpseudouridine
  modified_base 2643: mod_base = OTHER; note = N1-methylpseudouridine
  modified_base 2644: mod_base = OTHER; note = N1-methylpseudouridine
  modified_base 2654: mod_base = OTHER; note = N1-methylpseudouridine
  modified_base 2657: mod_base = OTHER; note = N1-methylpseudouridine
  modified_base 2669: mod_base = OTHER; note = N1-methylpseudouridine
  modified_base 2670: mod_base = OTHER; note = N1-methylpseudouridine
  modified_base 2672: mod_base = OTHER; note = N1-methylpseudouridine
  modified_base 2673: mod_base = OTHER; note = N1-methylpseudouridine
  modified_base 2676: mod_base = OTHER; note = N1-methylpseudouridine
  modified_base 2686: mod_base = OTHER; note = N1-methylpseudouridine
  modified_base 2687: mod_base = OTHER; note = N1-methylpseudouridine
  modified_base 2691: mod_base = OTHER; note = N1-methylpseudouridine
  modified_base 2696: mod_base = OTHER; note = N1-methylpseudouridine
  modified_base 2697: mod_base = OTHER; note = N1-methylpseudouridine
  modified_base 2706: mod_base = OTHER; note = N1-methylpseudouridine
  modified_base 2719: mod_base = OTHER; note = N1-methylpseudouridine
  modified_base 2720: mod_base = OTHER; note = N1-methylpseudouridine
  modified_base 2722: mod_base = OTHER; note = N1-methylpseudouridine
  modified_base 2724: mod_base = OTHER; note = N1-methylpseudouridine
  modified_base 2729: mod_base = OTHER; note = N1-methylpseudouridine
  modified_base 2733: mod_base = OTHER; note = N1-methylpseudouridine
  modified_base 2739: mod_base = OTHER; note = N1-methylpseudouridine
  modified_base 2743: mod_base = OTHER; note = N1-methylpseudouridine
  modified_base 2744: mod_base = OTHER; note = N1-methylpseudouridine
  modified_base 2747: mod_base = OTHER; note = N1-methylpseudouridine
  modified_base 2759: mod_base = OTHER; note = N1-methylpseudouridine
  modified_base 2760: mod_base = OTHER; note = N1-methylpseudouridine
  modified_base 2762: mod_base = OTHER; note = N1-methylpseudouridine
  modified_base 2769: mod_base = OTHER; note = N1-methylpseudouridine
  modified_base 2777: mod_base = OTHER; note = N1-methylpseudouridine
  modified_base 2789: mod_base = OTHER; note = N1-methylpseudouridine
  modified_base 2790: mod_base = OTHER; note = N1-methylpseudouridine
  modified_base 2798: mod_base = OTHER; note = N1-methylpseudouridine
  modified_base 2801: mod_base = OTHER; note = N1-methylpseudouridine
  modified_base 2802: mod_base = OTHER; note = N1-methylpseudouridine
  modified_base 2805: mod_base = OTHER; note = N1-methylpseudouridine
  modified_base 2806: mod_base = OTHER; note = N1-methylpseudouridine
  modified_base 2813: mod_base = OTHER; note = N1-methylpseudouridine
  modified_base 2820: mod_base = OTHER; note = N1-methylpseudouridine
  modified_base 2824: mod_base = OTHER; note = N1-methylpseudouridine
  modified_base 2826: mod_base = OTHER; note = N1-methylpseudouridine
  modified_base 2829: mod_base = OTHER; note = N1-methylpseudouridine
  modified_base 2838: mod_base = OTHER; note = N1-methylpseudouridine
  modified_base 2843: mod_base = OTHER; note = N1-methylpseudouridine
  modified_base 2846: mod_base = OTHER; note = N1-methylpseudouridine
  modified_base 2855: mod_base = OTHER; note = N1-methylpseudouridine
  modified_base 2861: mod_base = OTHER; note = N1-methylpseudouridine
  modified_base 2864: mod_base = OTHER; note = N1-methylpseudouridine
  modified_base 2870: mod_base = OTHER; note = N1-methylpseudouridine
  modified_base 2871: mod_base = OTHER; note = N1-methylpseudouridine
  modified_base 2875: mod_base = OTHER; note = N1-methylpseudouridine
  modified_base 2882: mod_base = OTHER; note = N1-methylpseudouridine
  modified_base 2885: mod_base = OTHER; note = N1-methylpseudouridine
  modified_base 2892: mod_base = OTHER; note = N1-methylpseudouridine
  modified_base 2893: mod_base = OTHER; note = N1-methylpseudouridine
  modified_base 2894: mod_base = OTHER; note = N1-methylpseudouridine
  modified_base 2895: mod_base = OTHER; note = N1-methylpseudouridine
  modified_base 2905: mod_base = OTHER; note = N1-methylpseudouridine
  modified_base 2906: mod_base = OTHER; note = N1-methylpseudouridine
  modified_base 2911: mod_base = OTHER; note = N1-methylpseudouridine
  modified_base 2912: mod_base = OTHER; note = N1-methylpseudouridine
  modified_base 2913: mod_base = OTHER; note = N1-methylpseudouridine
  modified_base 2914: mod_base = OTHER; note = N1-methylpseudouridine
  modified_base 2916: mod_base = OTHER; note = N1-methylpseudouridine
  modified_base 2921: mod_base = OTHER; note = N1-methylpseudouridine
  modified_base 2930: mod_base = OTHER; note = N1-methylpseudouridine
  modified_base 2937: mod_base = OTHER; note = N1-methylpseudouridine
  modified_base 2938: mod_base = OTHER; note = N1-methylpseudouridine
  modified_base 2940: mod_base = OTHER; note = N1-methylpseudouridine
  modified_base 2943: mod_base = OTHER; note = N1-methylpseudouridine
  modified_base 2952: mod_base = OTHER; note = N1-methylpseudouridine
  modified_base 2958: mod_base = OTHER; note = N1-methylpseudouridine
  modified_base 2959: mod_base = OTHER; note = N1-methylpseudouridine
  modified_base 2963: mod_base = OTHER; note = N1-methylpseudouridine
  modified_base 2972: mod_base = OTHER; note = N1-methylpseudouridine
  modified_base 2973: mod_base = OTHER; note = N1-methylpseudouridine
  modified_base 2975: mod_base = OTHER; note = N1-methylpseudouridine
  modified_base 2987: mod_base = OTHER; note = N1-methylpseudouridine
  modified_base 2988: mod_base = OTHER; note = N1-methylpseudouridine
  modified_base 2990: mod_base = OTHER; note = N1-methylpseudouridine
  modified_base 2998: mod_base = OTHER; note = N1-methylpseudouridine
  modified_base 3007: mod_base = OTHER; note = N1-methylpseudouridine
  modified_base 3008: mod_base = OTHER; note = N1-methylpseudouridine
  modified_base 3015: mod_base = OTHER; note = N1-methylpseudouridine
  modified_base 3019: mod_base = OTHER; note = N1-methylpseudouridine
  modified_base 3020: mod_base = OTHER; note = N1-methylpseudouridine
  modified_base 3021: mod_base = OTHER; note = N1-methylpseudouridine
  modified_base 3023: mod_base = OTHER; note = N1-methylpseudouridine
  modified_base 3025: mod_base = OTHER; note = N1-methylpseudouridine
  modified_base 3027: mod_base = OTHER; note = N1-methylpseudouridine
  modified_base 3034: mod_base = OTHER; note = N1-methylpseudouridine
  modified_base 3036: mod_base = OTHER; note = N1-methylpseudouridine
  modified_base 3041: mod_base = OTHER; note = N1-methylpseudouridine
  modified_base 3043: mod_base = OTHER; note = N1-methylpseudouridine
  modified_base 3048: mod_base = OTHER; note = N1-methylpseudouridine
  modified_base 3050: mod_base = OTHER; note = N1-methylpseudouridine
  modified_base 3059: mod_base = OTHER; note = N1-methylpseudouridine
  modified_base 3062: mod_base = OTHER; note = N1-methylpseudouridine
  modified_base 3063: mod_base = OTHER; note = N1-methylpseudouridine
  modified_base 3070: mod_base = OTHER; note = N1-methylpseudouridine
  modified_base 3083: mod_base = OTHER; note = N1-methylpseudouridine
  modified_base 3087: mod_base = OTHER; note = N1-methylpseudouridine
  modified_base 3096: mod_base = OTHER; note = N1-methylpseudouridine
  modified_base 3099: mod_base = OTHER; note = N1-methylpseudouridine
  modified_base 3103: mod_base = OTHER; note = N1-methylpseudouridine
  modified_base 3106: mod_base = OTHER; note = N1-methylpseudouridine
  modified_base 3107: mod_base = OTHER; note = N1-methylpseudouridine
  modified_base 3109: mod_base = OTHER; note = N1-methylpseudouridine
  modified_base 3110: mod_base = OTHER; note = N1-methylpseudouridine
  modified_base 3111: mod_base = OTHER; note = N1-methylpseudouridine
  modified_base 3112: mod_base = OTHER; note = N1-methylpseudouridine
  modified_base 3115: mod_base = OTHER; note = N1-methylpseudouridine
  modified_base 3120: mod_base = OTHER; note = N1-methylpseudouridine
  modified_base 3122: mod_base = OTHER; note = N1-methylpseudouridine
  modified_base 3123: mod_base = OTHER; note = N1-methylpseudouridine
  modified_base 3125: mod_base = OTHER; note = N1-methylpseudouridine
  modified_base 3130: mod_base = OTHER; note = N1-methylpseudouridine
  modified_base 3131: mod_base = OTHER; note = N1-methylpseudouridine
  modified_base 3132: mod_base = OTHER; note = N1-methylpseudouridine
  modified_base 3133: mod_base = OTHER; note = N1-methylpseudouridine
  modified_base 3134: mod_base = OTHER; note = N1-methylpseudouridine
  modified_base 3146: mod_base = OTHER; note = N1-methylpseudouridine
  modified_base 3150: mod_base = OTHER; note = N1-methylpseudouridine
  modified_base 3152: mod_base = OTHER; note = N1-methylpseudouridine
  modified_base 3156: mod_base = OTHER; note = N1-methylpseudouridine
  modified_base 3167: mod_base = OTHER; note = N1-methylpseudouridine
  modified_base 3168: mod_base = OTHER; note = N1-methylpseudouridine
  modified_base 3181: mod_base = OTHER; note = N1-methylpseudouridine
  modified_base 3182: mod_base = OTHER; note = N1-methylpseudouridine
  modified_base 3185: mod_base = OTHER; note = N1-methylpseudouridine
  modified_base 3195: mod_base = OTHER; note = N1-methylpseudouridine
  modified_base 3204: mod_base = OTHER; note = N1-methylpseudouridine
  modified_base 3207: mod_base = OTHER; note = N1-methylpseudouridine
  modified_base 3212: mod_base = OTHER; note = N1-methylpseudouridine
  modified_base 3215: mod_base = OTHER; note = N1-methylpseudouridine
  modified_base 3216: mod_base = OTHER; note = N1-methylpseudouridine
  modified_base 3217: mod_base = OTHER; note = N1-methylpseudouridine
  modified_base 3234: mod_base = OTHER; note = N1-methylpseudouridine
  modified_base 3235: mod_base = OTHER; note = N1-methylpseudouridine
  modified_base 3236: mod_base = OTHER; note = N1-methylpseudouridine
  modified_base 3245: mod_base = OTHER; note = N1-methylpseudouridine
  modified_base 3254: mod_base = OTHER; note = N1-methylpseudouridine
  modified_base 3257: mod_base = OTHER; note = N1-methylpseudouridine
  modified_base 3259: mod_base = OTHER; note = N1-methylpseudouridine
  modified_base 3263: mod_base = OTHER; note = N1-methylpseudouridine
  modified_base 3272: mod_base = OTHER; note = N1-methylpseudouridine
  modified_base 3276: mod_base = OTHER; note = N1-methylpseudouridine
  modified_base 3278: mod_base = OTHER; note = N1-methylpseudouridine
  modified_base 3281: mod_base = OTHER; note = N1-methylpseudouridine
  modified_base 3296: mod_base = OTHER; note = N1-methylpseudouridine
  modified_base 3309: mod_base = OTHER; note = N1-methylpseudouridine
  modified_base 3310: mod_base = OTHER; note = N1-methylpseudouridine
  modified_base 3311: mod_base = OTHER; note = N1-methylpseudouridine
  modified_base 3313: mod_base = OTHER; note = N1-methylpseudouridine
  modified_base 3322: mod_base = OTHER; note = N1-methylpseudouridine
  modified_base 3326: mod_base = OTHER; note = N1-methylpseudouridine
  modified_base 3329: mod_base = OTHER; note = N1-methylpseudouridine
  modified_base 3342: mod_base = OTHER; note = N1-methylpseudouridine
  modified_base 3343: mod_base = OTHER; note = N1-methylpseudouridine
  modified_base 3353: mod_base = OTHER; note = N1-methylpseudouridine
  modified_base 3356: mod_base = OTHER; note = N1-methylpseudouridine
  modified_base 3360: mod_base = OTHER; note = N1-methylpseudouridine
  modified_base 3373: mod_base = OTHER; note = N1-methylpseudouridine
  modified_base 3378: mod_base = OTHER; note = N1-methylpseudouridine
  modified_base 3388: mod_base = OTHER; note = N1-methylpseudouridine
  modified_base 3390: mod_base = OTHER; note = N1-methylpseudouridine
  modified_base 3397: mod_base = OTHER; note = N1-methylpseudouridine
  modified_base 3398: mod_base = OTHER; note = N1-methylpseudouridine
  modified_base 3399: mod_base = OTHER; note = N1-methylpseudouridine
  modified_base 3402: mod_base = OTHER; note = N1-methylpseudouridine
  modified_base 3403: mod_base = OTHER; note = N1-methylpseudouridine
  modified_base 3413: mod_base = OTHER; note = N1-methylpseudouridine
  modified_base 3418: mod_base = OTHER; note = N1-methylpseudouridine
  modified_base 3420: mod_base = OTHER; note = N1-methylpseudouridine
  modified_base 3421: mod_base = OTHER; note = N1-methylpseudouridine
  modified_base 3425: mod_base = OTHER; note = N1-methylpseudouridine
  modified_base 3428: mod_base = OTHER; note = N1-methylpseudouridine
  modified_base 3431: mod_base = OTHER; note = N1-methylpseudouridine
  modified_base 3434: mod_base = OTHER; note = N1-methylpseudouridine
  modified_base 3438: mod_base = OTHER; note = N1-methylpseudouridine
  modified_base 3443: mod_base = OTHER; note = N1-methylpseudouridine
  modified_base 3457: mod_base = OTHER; note = N1-methylpseudouridine
  modified_base 3459: mod_base = OTHER; note = N1-methylpseudouridine
  modified_base 3467: mod_base = OTHER; note = N1-methylpseudouridine
  modified_base 3468: mod_base = OTHER; note = N1-methylpseudouridine
  modified_base 3472: mod_base = OTHER; note = N1-methylpseudouridine
  modified_base 3474: mod_base = OTHER; note = N1-methylpseudouridine
  modified_base 3476: mod_base = OTHER; note = N1-methylpseudouridine
  modified_base 3485: mod_base = OTHER; note = N1-methylpseudouridine
  modified_base 3488: mod_base = OTHER; note = N1-methylpseudouridine
  modified_base 3494: mod_base = OTHER; note = N1-methylpseudouridine
  modified_base 3500: mod_base = OTHER; note = N1-methylpseudouridine
  modified_base 3501: mod_base = OTHER; note = N1-methylpseudouridine
  modified_base 3503: mod_base = OTHER; note = N1-methylpseudouridine
  modified_base 3513: mod_base = OTHER; note = N1-methylpseudouridine
  modified_base 3517: mod_base = OTHER; note = N1-methylpseudouridine
  modified_base 3518: mod_base = OTHER; note = N1-methylpseudouridine
  modified_base 3531: mod_base = OTHER; note = N1-methylpseudouridine
  modified_base 3533: mod_base = OTHER; note = N1-methylpseudouridine
  modified_base 3537: mod_base = OTHER; note = N1-methylpseudouridine
  modified_base 3538: mod_base = OTHER; note = N1-methylpseudouridine
  modified_base 3539: mod_base = OTHER; note = N1-methylpseudouridine
  modified_base 3540: mod_base = OTHER; note = N1-methylpseudouridine
  modified_base 3542: mod_base = OTHER; note = N1-methylpseudouridine
  modified_base 3556: mod_base = OTHER; note = N1-methylpseudouridine
  modified_base 3558: mod_base = OTHER; note = N1-methylpseudouridine
  modified_base 3566: mod_base = OTHER; note = N1-methylpseudouridine
  modified_base 3567: mod_base = OTHER; note = N1-methylpseudouridine
  modified_base 3576: mod_base = OTHER; note = N1-methylpseudouridine
  modified_base 3578: mod_base = OTHER; note = N1-methylpseudouridine
  modified_base 3581: mod_base = OTHER; note = N1-methylpseudouridine
  modified_base 3584: mod_base = OTHER; note = N1-methylpseudouridine
  modified_base 3590: mod_base = OTHER; note = N1-methylpseudouridine
  modified_base 3598: mod_base = OTHER; note = N1-methylpseudouridine
  modified_base 3600: mod_base = OTHER; note = N1-methylpseudouridine
  modified_base 3603: mod_base = OTHER; note = N1-methylpseudouridine
  modified_base 3605: mod_base = OTHER; note = N1-methylpseudouridine
  modified_base 3606: mod_base = OTHER; note = N1-methylpseudouridine
  modified_base 3607: mod_base = OTHER; note = N1-methylpseudouridine
  modified_base 3608: mod_base = OTHER; note = N1-methylpseudouridine
  modified_base 3609: mod_base = OTHER; note = N1-methylpseudouridine
  modified_base 3613: mod_base = OTHER; note = N1-methylpseudouridine
  modified_base 3614: mod_base = OTHER; note = N1-methylpseudouridine
  modified_base 3635: mod_base = OTHER; note = N1-methylpseudouridine
  modified_base 3638: mod_base = OTHER; note = N1-methylpseudouridine
  modified_base 3639: mod_base = OTHER; note = N1-methylpseudouridine
  modified_base 3643: mod_base = OTHER; note = N1-methylpseudouridine
  modified_base 3645: mod_base = OTHER; note = N1-methylpseudouridine
  modified_base 3651: mod_base = OTHER; note = N1-methylpseudouridine
  modified_base 3655: mod_base = OTHER; note = N1-methylpseudouridine
  modified_base 3656: mod_base = OTHER; note = N1-methylpseudouridine
  modified_base 3669: mod_base = OTHER; note = N1-methylpseudouridine
  modified_base 3674: mod_base = OTHER; note = N1-methylpseudouridine
  modified_base 3679: mod_base = OTHER; note = N1-methylpseudouridine
  modified_base 3680: mod_base = OTHER; note = N1-methylpseudouridine
  modified_base 3685: mod_base = OTHER; note = N1-methylpseudouridine
  modified_base 3691: mod_base = OTHER; note = N1-methylpseudouridine
  modified_base 3693: mod_base = OTHER; note = N1-methylpseudouridine
  modified_base 3695: mod_base = OTHER; note = N1-methylpseudouridine
  modified_base 3699: mod_base = OTHER; note = N1-methylpseudouridine
  modified_base 3700: mod_base = OTHER; note = N1-methylpseudouridine
  modified_base 3701: mod_base = OTHER; note = N1-methylpseudouridine
  modified_base 3703: mod_base = OTHER; note = N1-methylpseudouridine
  modified_base 3704: mod_base = OTHER; note = N1-methylpseudouridine
  modified_base 3706: mod_base = OTHER; note = N1-methylpseudouridine
  modified_base 3710: mod_base = OTHER; note = N1-methylpseudouridine
  modified_base 3711: mod_base = OTHER; note = N1-methylpseudouridine
  modified_base 3717: mod_base = OTHER; note = N1-methylpseudouridine
  modified_base 3721: mod_base = OTHER; note = N1-methylpseudouridine
  modified_base 3723: mod_base = OTHER; note = N1-methylpseudouridine
  modified_base 3731: mod_base = OTHER; note = N1-methylpseudouridine
  modified_base 3750: mod_base = OTHER; note = N1-methylpseudouridine
  modified_base 3753: mod_base = OTHER; note = N1-methylpseudouridine
  modified_base 3766: mod_base = OTHER; note = N1-methylpseudouridine
  modified_base 3767: mod_base = OTHER; note = N1-methylpseudouridine
  modified_base 3769: mod_base = OTHER; note = N1-methylpseudouridine
  modified_base 3770: mod_base = OTHER; note = N1-methylpseudouridine
  modified_base 3773: mod_base = OTHER; note = N1-methylpseudouridine
  modified_base 3774: mod_base = OTHER; note = N1-methylpseudouridine
  modified_base 3783: mod_base = OTHER; note = N1-methylpseudouridine
  modified_base 3789: mod_base = OTHER; note = N1-methylpseudouridine
  modified_base 3790: mod_base = OTHER; note = N1-methylpseudouridine
  modified_base 3792: mod_base = OTHER; note = N1-methylpseudouridine
  modified_base 3793: mod_base = OTHER; note = N1-methylpseudouridine
  modified_base 3794: mod_base = OTHER; note = N1-methylpseudouridine
  modified_base 3803: mod_base = OTHER; note = N1-methylpseudouridine
  modified_base 3806: mod_base = OTHER; note = N1-methylpseudouridine
  modified_base 3815: mod_base = OTHER; note = N1-methylpseudouridine
  modified_base 3823: mod_base = OTHER; note = N1-methylpseudouridine
  modified_base 3824: mod_base = OTHER; note = N1-methylpseudouridine
  modified_base 3836: mod_base = OTHER; note = N1-methylpseudouridine
  modified_base 3839: mod_base = OTHER; note = N1-methylpseudouridine
  modified_base 3842: mod_base = OTHER; note = N1-methylpseudouridine
  modified_base 3843: mod_base = OTHER; note = N1-methylpseudouridine
  modified_base 3855: mod_base = OTHER; note = N1-methylpseudouridine
  modified_base 3857: mod_base = OTHER; note = N1-methylpseudouridine
  modified_base 3866: mod_base = OTHER; note = N1-methylpseudouridine
  modified_base 3869: mod_base = OTHER; note = N1-methylpseudouridine
  modified_base 3871: mod_base = OTHER; note = N1-methylpseudouridine
  modified_base 3877: mod_base = OTHER; note = N1-methylpseudouridine
  modified_base 3879: mod_base = OTHER; note = N1-methylpseudouridine
  modified_base 3888: mod_base = OTHER; note = N1-methylpseudouridine
  modified_base 3900: mod_base = OTHER; note = N1-methylpseudouridine
  modified_base 3902: mod_base = OTHER; note = N1-methylpseudouridine
  modified_base 3921: mod_base = OTHER; note = N1-methylpseudouridine
  modified_base 3923: mod_base = OTHER; note = N1-methylpseudouridine
  modified_base 3926: mod_base = OTHER; note = N1-methylpseudouridine
  modified_base 3930: mod_base = OTHER; note = N1-methylpseudouridine
  modified_base 3932: mod_base = OTHER; note = N1-methylpseudouridine
  modified_base 3934: mod_base = OTHER; note = N1-methylpseudouridine
  modified_base 3935: mod_base = OTHER; note = N1-methylpseudouridine
  modified_base 3941: mod_base = OTHER; note = N1-methylpseudouridine
  modified_base 3942: mod_base = OTHER; note = N1-methylpseudouridine
  modified_base 3945: mod_base = OTHER; note = N1-methylpseudouridine
  modified_base 3948: mod_base = OTHER; note = N1-methylpseudouridine
  modified_base 3950: mod_base = OTHER; note = N1-methylpseudouridine
  modified_base 3951: mod_base = OTHER; note = N1-methylpseudouridine
  modified_base 3957: mod_base = OTHER; note = N1-methylpseudouridine
  modified_base 3967: mod_base = OTHER; note = N1-methylpseudouridine
  modified_base 3968: mod_base = OTHER; note = N1-methylpseudouridine
  modified_base 3973: mod_base = OTHER; note = N1-methylpseudouridine
  modified_base 3975: mod_base = OTHER; note = N1-methylpseudouridine
  modified_base 3976: mod_base = OTHER; note = N1-methylpseudouridine
  modified_base 3977: mod_base = OTHER; note = N1-methylpseudouridine
  modified_base 3978: mod_base = OTHER; note = N1-methylpseudouridine
  modified_base 3987: mod_base = OTHER; note = N1-methylpseudouridine
  modified_base 3989: mod_base = OTHER; note = N1-methylpseudouridine
  modified_base 3993: mod_base = OTHER; note = N1-methylpseudouridine
  modified_base 4003: mod_base = OTHER; note = N1-methylpseudouridine
  modified_base 4005: mod_base = OTHER; note = N1-methylpseudouridine
  modified_base 4009: mod_base = OTHER; note = N1-methylpseudouridine
  modified_base 4011: mod_base = OTHER; note = N1-methylpseudouridine
  modified_base 4022: mod_base = OTHER; note = N1-methylpseudouridine
  modified_base 4023: mod_base = OTHER; note = N1-methylpseudouridine
  modified_base 4025: mod_base = OTHER; note = N1-methylpseudouridine
  modified_base 4032: mod_base = OTHER; note = N1-methylpseudouridine
  modified_base 4035: mod_base = OTHER; note = N1-methylpseudouridine
  modified_base 4037: mod_base = OTHER; note = N1-methylpseudouridine
  modified_base 4038: mod_base = OTHER; note = N1-methylpseudouridine
  modified_base 4040: mod_base = OTHER; note = N1-methylpseudouridine
  modified_base 4044: mod_base = OTHER; note = N1-methylpseudouridine
  modified_base 4048: mod_base = OTHER; note = N1-methylpseudouridine
  modified_base 4052: mod_base = OTHER; note = N1-methylpseudouridine
  modified_base 4053: mod_base = OTHER; note = N1-methylpseudouridine
  modified_base 4061: mod_base = OTHER; note = N1-methylpseudouridine
  modified_base 4063: mod_base = OTHER; note = N1-methylpseudouridine
  modified_base 4076: mod_base = OTHER; note = N1-methylpseudouridine
  modified_base 4077: mod_base = OTHER; note = N1-methylpseudouridine
  modified_base 4081: mod_base = OTHER; note = N1-methylpseudouridine
  modified_base 4082: mod_base = OTHER; note = N1-methylpseudouridine
  modified_base 4084: mod_base = OTHER; note = N1-methylpseudouridine
  modified_base 4091: mod_base = OTHER; note = N1-methylpseudouridine
  modified_base 4092: mod_base = OTHER; note = N1-methylpseudouridine
  modified_base 4095: mod_base = OTHER; note = N1-methylpseudouridine
  modified_base 4098: mod_base = OTHER; note = N1-methylpseudouridine
gacaagaagnacnccannggncnggcgancggnacgaanagngnngggngggcngnaanaacngacgagnanaaggngcccagnaagaagnncaaagnccnggggaacacagaccgacanagcancaagaagaaccnganaggngcgcncnngnnngacnccggagagacagcagaagccacacgacnnaaacgaaccgcncgaaggcggnacacacggcgaaagaanaggannngnnaccngcaggaganannnagcaacgaganggcaaaggnngacgannccnncnnccaccggcnngaagagncnnnccnggnggaggaggacaagaaacangaacgccaccccanannnggcaananagnggacgaagnagcanaccangagaaanacccnaccananancancnncgaaagaagcnngnaganncaacgganaaagcagancncaggnngananancnggcacnggcacacangancaagnnncgaggncacnnncnnancgagggcgancnnaanccggacaacnccgacgngganaagcngnncanccagcncgnccaaacgnanaaccaacncnncgaggagaanccgancaangccncnggagnggacgcgaaagcganacncncagcaaggcnnagnaagncncgccggcnngagaaccncancgcacagnngccaggagagaagaagaanggcnngnnnggnaaccnnanngcacncagncncggccnnacaccnaacnncaagnccaacnncgancnngccgaggacgccaagcnccagcnnagcaagganaccnacgangacgancnnganaaccngcnggcccaganaggcgaccagnacgcggaccnnnncnnggcagcaaagaannngnccgacgccanccncnngagcgacanccnccgggnaaacacngaaannacnaaggcgccacnnnccgccagcangancaagaganacgangagcancancaggancngacccngcnnaaagcgcnngnacgccagcaanngccngagaagnanaaagaaancnnnnncgaccaaagcaagaacggnnangcnggcnacanagacggcggggcnncncaggaggaanncnacaagnnnancaagccganncncgagaagangganggaacagaggagcngnnggngaaacngaaccgggaggaccngcncagaaagcagcggaccnncganaangggagcancccgcaccaganncannngggngagcngcangcaancnngcgcaggcaagaagannnnnaccccnnccncaaggacaanagagagaaganngagaaganccnnacgnnnaggannccgnannacgnaggcccgcncgcacgcggnaanncncgcnnngcgnggangacacgaaagagcgaggaaaccanaacacccnggaacnnngaagaggncgncganaagggngccagcgcacaancannnancgaacgaangacnaannncganaagaancncccaaangagaaggngnngccaaagcanagccnnnngnangagnannnnacngnanacaacgagcncaccaaggngaaanangncacngaagggangcgcaagccggccnnnnngagcggagaacagaagaaagcnanngnagacnngcnnnnnaagacgaanagaaaggnnacggncaagcagcncaaagaagacnacnnnaagaaganagaangcnnngacncngncgagannagnggggnagaggancganncaangcaagccnggggacanaccacgancncnngaagannancaagganaaggannnncnggacaacgaagagaangaagacancnnggaagananngnnnngacnnngacncnnnncgaagancgcgaganganagaggaaaggnngaagacnnangcccancnnnnngangacaaggnnangaaacaacngaagagacggcgananacnggnngggggagacncncacgaaagcncannaacggcanccgggacaaacagagnggnaagacgannnnggacnnccnnaagagcgacgggnnngcgaanaggaacnncangcagnnganccanganganncnnngaccnnnaaggaggananacagaaggcacaagncagnggacaaggaganagncngcangagcacanngccaaccnngcgggcnccccagccancaagaagggnanccngcaaaccgncaaagnagnagangaacnngngaaagncangggacgacanaagccngagaananngngancgaaanggcnagggagaancagacgacncagaagggncagaagaannccagggaacggangaagagaanagaggagggaannaaggaacncgggncacaaananngaaggagcanccngnagagaacacacagcnncagaacgagaagcngnaccngnannancnccagaanggcagagacangnangncgaccaagaacngganancaancgcnngnccgannangangnagancacanagncccacaanccnncnngaaagacganagnanngacaanaaggnacnnacgaganccgacaagaaccgcggaaagnccganaacgnaccgagngaagaagnggnaaagaagangaagaannannggaggcagcnccncaacgccaaacnnannacncagagaaagnncganaaccnnacgaaagcngagcgaggcgggnngncngagcncganaaagcngganncanaaagcggcagcnngnggaaacnagacagancacaaagcacgnngcacaganccnngannccagaangaacacnaaanangangagaacganaagcnganacgcgaggngaaagnaanaacacnnaagncaaagcnggnaagcgannnncgcaaagacnnccaannnnanaaggncagagaganaaacaannancancacgcgcangacgcnnaccngaacgcagnngnggggacagcacnnanaaagaaanacccaaagnnggaaagngaannngncnanggagacnanaaggnanacgangnacggaaganganngcgaagncagagcaagaaancggnaaggcaacngcnaagnacnncnnnnacncaaanannangaacnnnnncaagacggaaancacncnggcnaacggagaaanncggaagaggcccnnganagagacgaanggggagacnggngagancgnnngggacaaagggcgagannncgcaacggnccgaaaggngcncncaangccacaagncaananagncaagaagacagaggnacaaacaggaggnnncnccaaggaancaanacncccaaagcggaannccgacaaacnganagcnagaaagaaggacnggganccgaagaagnanggagggnnngannccccaacagnagcgnanncagnacnggnggnagcnaaggnggagaaaggcaagncnaagaagcnnaagncngncaaagagcngcncggcancaccannanggagcgcagnagcnncgagaagaacccnanagannnncnggaagccaaaggananaaggaggnnaagaaggancncancancaaacncccgaagnanagncnnnnngagnnggagaacggacgaaagcgcangcnngcgncngcgggngaanngcagaaaggaaangagcncgccnngccgncaaagnangncaannncnngnaccnngcgagncacnangagaagcngaaaggaagcccagaaganaangaacagaagcaanngnncgnngaacaacanaagcannannnggacgagancancgagcaaancagcgagnncagcaagcgcgncanacnngcggacgccaancnggacaaagngcngnccgccnanaacaaacanagggacaaaccnanacgagagcaggcagagaananaanacancncnncacacnnacnaancnnggagcnccagccgcanncaagnannnngacacgacnanagancgcaagcgananaccncnacgaaagaagnncnggacgcnacncnnanacancaanccannacgggccngnacgagacgagganngacnngncacagcnnggnggngac

SEQ ID NO: 2172 - RNA, 12 nt, synthetic construct
  source 1..12: mol_type = other RNA; note = Description of Artificial Sequence: Synthetic oligonucleotide
  modified_base 6: mod_base = OTHER; note = N1-methylpseudouridine
gagggngcagac

SEQ ID NO: 2173 - RNA, 57 nt, synthetic construct
  source 1..57: mol_type = other RNA; note = Description of Artificial Sequence: Synthetic oligonucleotide
  modified_base 19: mod_base = OTHER; note = N1-methylpseudouridine
  modified_base 25: mod_base = OTHER; note = N1-methylpseudouridine
  modified_base 26: mod_base = OTHER; note = N1-methylpseudouridine
  modified_base 53: mod_base = OTHER; note = N1-methylpseudouridine
  modified_base 54: mod_base = OTHER; note = N1-methylpseudouridine
  modified_base 55: mod_base = OTHER; note = N1-methylpseudouridine
aagcgaacagcggacgggncagaanncgaaagccccaagaagaagcggaaagnnnaa

SEQ ID NO: 2174 - RNA, 4929 nt, synthetic construct
  source 1..4929: mol_type = other RNA; note = Description of Artificial Sequence: Synthetic polynucleotide
  modified_base 7: mod_base = OTHER; note = N1-methylpseudouridine
  modified_base 25: mod_base = OTHER; note = N1-methylpseudouridine
  modified_base 35: mod_base = OTHER; note = N1-methylpseudouridine
  modified_base 37: mod_base = OTHER; note = N1-methylpseudouridine
  modified_base 49: mod_base = OTHER; note = N1-methylpseudouridine
  modified_base 51: mod_base = OTHER; note = N1-methylpseudouridine
  modified_base 53: mod_base = OTHER; note = N1-methylpseudouridine
  modified_base 58: mod_base = OTHER; note = N1-methylpseudouridine
  modified_base 63: mod_base = OTHER; note = N1-methylpseudouridine
  modified_base 64: mod_base = OTHER; note = N1-methylpseudouridine
  modified_base 66: mod_base = OTHER; note = N1-methylpseudouridine
  modified_base 75: mod_base = OTHER; note = N1-methylpseudouridine
  modified_base 78: mod_base = OTHER; note = N1-methylpseudouridine
  modified_base 82: mod_base = OTHER; note = N1-methylpseudouridine
  modified_base 89: mod_base = OTHER; note = N1-methylpseudouridine
  modified_base 92: mod_base = OTHER; note = N1-methylpseudouridine
  modified_base 94: mod_base = OTHER; note = N1-methylpseudouridine
  modified_base 98: mod_base = OTHER; note = N1-methylpseudouridine
  modified_base 99: mod_base = OTHER; note = N1-methylpseudouridine
  modified_base 100: mod_base = OTHER; note = N1-methylpseudouridine
  modified_base 119: mod_base = OTHER; note = N1-methylpseudouridine
  modified_base 130: mod_base = OTHER; note = N1-methylpseudouridine
  modified_base 134: mod_base = OTHER; note = N1-methylpseudouridine
  modified_base 136: mod_base = OTHER; note = N1-methylpseudouridine
  modified_base 145: mod_base = OTHER; note = N1-methylpseudouridine
  modified_base 148: mod_base = OTHER; note = N1-methylpseudouridine
  modified_base 151: mod_base = OTHER; note = N1-methylpseudouridine
  modified_base 154: mod_base = OTHER; note = N1-methylpseudouridine
  modified_base 166: mod_base = OTHER; note = N1-methylpseudouridine
  modified_base 169: mod_base = OTHER; note = N1-methylpseudouridine
  modified_base 180: mod_base = OTHER; note = N1-methylpseudouridine
  modified_base 193: mod_base = OTHER; note = N1-methylpseudouridine
  modified_base 199: mod_base = OTHER; note = N1-methylpseudouridine
  modified_base 209: mod_base = OTHER; note = N1-methylpseudouridine
  modified_base 215: mod_base = OTHER; note = N1-methylpseudouridine
  modified_base 226: mod_base = OTHER; note = N1-methylpseudouridine
  modified_base 229: mod_base = OTHER; note = N1-methylpseudouridine
  modified_base 235: mod_base = OTHER; note = N1-methylpseudouridine
  modified_base 236: mod_base = OTHER; note = N1-methylpseudouridine
  modified_base 250: mod_base = OTHER; note = N1-methylpseudouridine
  modified_base 253: mod_base = OTHER; note = N1-methylpseudouridine
  modified_base 256: mod_base = OTHER; note = N1-methylpseudouridine
  modified_base 264: mod_base = OTHER; note = N1-methylpseudouridine
  modified_base 271: mod_base = OTHER; note = N1-methylpseudouridine
  modified_base 274: mod_base = OTHER; note = N1-methylpseudouridine
  modified_base 286: mod_base = OTHER; note = N1-methylpseudouridine
  modified_base 288: mod_base = OTHER; note = N1-methylpseudouridine
  modified_base 292: mod_base = OTHER; note = N1-methylpseudouridine
  modified_base 297: mod_base = OTHER; note = N1-methylpseudouridine
  modified_base 298: mod_base = OTHER; note = N1-methylpseudouridine
  modified_base 299: mod_base = OTHER; note = N1-methylpseudouridine
  modified_base 305: mod_base = OTHER; note = N1-methylpseudouridine
  modified_base 306: mod_base = OTHER; note = N1-methylpseudouridine
  modified_base 310: mod_base = OTHER; note = N1-methylpseudouridine
  modified_base 313: mod_base = OTHER; note = N1-methylpseudouridine
  modified_base 315: mod_base = OTHER; note = N1-methylpseudouridine
  modified_base 328: mod_base = OTHER; note = N1-methylpseudouridine
  modified_base 331: mod_base = OTHER; note = N1-methylpseudouridine
  modified_base 335: mod_base = OTHER; note = N1-methylpseudouridine
  modified_base 343: mod_base = OTHER; note = N1-methylpseudouridine
  modified_base 352: mod_base = OTHER; note = N1-methylpseudouridine
  modified_base 355: mod_base = OTHER; note = N1-methylpseudouridine
  modified_base 357: mod_base = OTHER; note = N1-methylpseudouridine
  modified_base 358: mod_base = OTHER; note = N1-methylpseudouridine
  modified_base 359: mod_base = OTHER; note = N1-methylpseudouridine
  modified_base 364: mod_base = OTHER; note = N1-methylpseudouridine
  modified_base 397: mod_base = OTHER; note = N1-methylpseudouridine
  modified_base 398: mod_base = OTHER; note = N1-methylpseudouridine
  modified_base 400: mod_base = OTHER; note = N1-methylpseudouridine
  modified_base 404: mod_base = OTHER; note = N1-methylpseudouridine
  modified_base 406: mod_base = OTHER; note = N1-methylpseudouridine
  modified_base 409: mod_base = OTHER; note = N1-methylpseudouridine
  modified_base 416: mod_base = OTHER; note = N1-methylpseudouridine
  modified_base 419: mod_base = OTHER; note = N1-methylpseudouridine
  modified_base 424: mod_base = OTHER; note = N1-methylpseudouridine
  modified_base 436: mod_base = OTHER; note = N1-methylpseudouridine
  modified_base 442: mod_base = OTHER; note = N1-methylpseudouridine
  modified_base 454: mod_base = OTHER; note = N1-methylpseudouridine
  modified_base 457: mod_base = OTHER; note = N1-methylpseudouridine
  modified_base 461: mod_base = OTHER; note = N1-methylpseudouridine
  modified_base 464: mod_base = OTHER; note = N1-methylpseudouridine
  modified_base 468: mod_base = OTHER; note = N1-methylpseudouridine
  modified_base 470: mod_base = OTHER; note = N1-methylpseudouridine
  modified_base 476: mod_base = OTHER; note = N1-methylpseudouridine
  modified_base 478: mod_base = OTHER; note = N1-methylpseudouridine
  modified_base 481: mod_base = OTHER; note = N1-methylpseudouridine
  modified_base 483: mod_base = OTHER; note = N1-methylpseudouridine
  modified_base 489: mod_base = OTHER; note = N1-methylpseudouridine
  modified_base 490: mod_base = OTHER; note = N1-methylpseudouridine
  modified_base 492: mod_base = OTHER; note = N1-methylpseudouridine
  modified_base 493: mod_base = OTHER; note = N1-methylpseudouridine
  modified_base 494: mod_base = OTHER; note = N1-methylpseudouridine
  modified_base 499: mod_base = OTHER; note = N1-methylpseudouridine
  modified_base 503: mod_base = OTHER; note = N1-methylpseudouridine
  modified_base 511: mod_base = OTHER; note = N1-methylpseudouridine
  modified_base 513: mod_base = OTHER; note = N1-methylpseudouridine
  modified_base 514: mod_base = OTHER; note = N1-methylpseudouridine
  modified_base 539: mod_base = OTHER; note = N1-methylpseudouridine
  modified_base 548: mod_base = OTHER; note = N1-methylpseudouridine
  modified_base 590: mod_base = OTHER; note = N1-methylpseudouridine
  modified_base 603: mod_base = OTHER; note = N1-methylpseudouridine
  modified_base 614: mod_base = OTHER; note = N1-methylpseudouridine
  modified_base 621: mod_base = OTHER; note = N1-methylpseudouridine
  modified_base 623: mod_base = OTHER; note = N1-methylpseudouridine
  modified_base 633: mod_base = OTHER; note = N1-methylpseudouridine
  modified_base 642: mod_base = OTHER; note = N1-methylpseudouridine
  modified_base 644: mod_base = OTHER; note = N1-methylpseudouridine
  modified_base 654: mod_base = OTHER; note = N1-methylpseudouridine
  modified_base 657: mod_base = OTHER; note = N1-methylpseudouridine
  modified_base 661: mod_base = OTHER; note = N1-methylpseudouridine
  modified_base 667: mod_base = OTHER; note = N1-methylpseudouridine
  modified_base 673: mod_base = OTHER; note = N1-methylpseudouridine
  modified_base 683: mod_base = OTHER; note = N1-methylpseudouridine
  modified_base 688: mod_base = OTHER; note = N1-methylpseudouridine
  modified_base 693: mod_base = OTHER; note = N1-methylpseudouridine
  modified_base 700: mod_base = OTHER; note = N1-methylpseudouridine
  modified_base 703: mod_base = OTHER; note = N1-methylpseudouridine
  modified_base 710: mod_base = OTHER; note = N1-methylpseudouridine
  modified_base 714: mod_base = OTHER; note = N1-methylpseudouridine
  modified_base 716: mod_base = OTHER; note = N1-methylpseudouridine
  modified_base 721: mod_base = OTHER; note = N1-methylpseudouridine
  modified_base 725: mod_base = OTHER; note = N1-methylpseudouridine
  modified_base 735: mod_base = OTHER; note = N1-methylpseudouridine
  modified_base 736: mod_base = OTHER; note = N1-methylpseudouridine
  modified_base 742: mod_base = OTHER; note = N1-methylpseudouridine
  modified_base 745: mod_base = OTHER; note = N1-methylpseudouridine
  modified_base 758: mod_base = OTHER; note = N1-methylpseudouridine
  modified_base 769: mod_base = OTHER; note = N1-methylpseudouridine
  modified_base 781: mod_base = OTHER; note = N1-methylpseudouridine
  modified_base 784: mod_base = OTHER; note = N1-methylpseudouridine
  modified_base 793: mod_base = OTHER; note = N1-methylpseudouridine
  modified_base 796: mod_base = OTHER; note = N1-methylpseudouridine
  modified_base 798: mod_base = OTHER; note = N1-methylpseudouridine
  modified_base 799: mod_base = OTHER; note = N1-methylpseudouridine
  modified_base 832: mod_base = OTHER; note = N1-methylpseudouridine
  modified_base 855: mod_base = OTHER; note = N1-methylpseudouridine
  modified_base 866: mod_base = OTHER; note = N1-methylpseudouridine
  modified_base 877: mod_base = OTHER; note = N1-methylpseudouridine
  modified_base 879: mod_base = OTHER; note = N1-methylpseudouridine
  modified_base 881: mod_base = OTHER; note = N1-methylpseudouridine
  modified_base 882: mod_base = OTHER; note = N1-methylpseudouridine
  modified_base 886: mod_base = OTHER; note = N1-methylpseudouridine
  modified_base 895: mod_base = OTHER; note = N1-methylpseudouridine
  modified_base 897: mod_base = OTHER; note = N1-methylpseudouridine
  modified_base 898: mod_base = OTHER; note = N1-methylpseudouridine
  modified_base 910: mod_base = OTHER; note = N1-methylpseudouridine
  modified_base 919: mod_base = OTHER; note = N1-methylpseudouridine
  modified_base 927: mod_base = OTHER; note = N1-methylpseudouridine
  modified_base 929: mod_base = OTHER; note = N1-methylpseudouridine
  modified_base 930: mod_base = OTHER; note = N1-methylpseudouridine
  modified_base 931: mod_base = OTHER; note = N1-methylpseudouridine
  modified_base 933: mod_base = OTHER; note = N1-methylpseudouridine
  modified_base 934: mod_base = OTHER; note = N1-methylpseudouridine
  modified_base 943: mod_base = OTHER; note = N1-methylpseudouridine
  modified_base 954: mod_base = OTHER; note = N1-methylpseudouridine
  modified_base 955: mod_base = OTHER; note = N1-methylpseudouridine
  modified_base 956: mod_base = OTHER; note = N1-methylpseudouridine
  modified_base 958: mod_base = OTHER; note = N1-methylpseudouridine
  modified_base 961: mod_base = OTHER; note = N1-methylpseudouridine
  modified_base 980: mod_base = OTHER; note = N1-methylpseudouridine
  modified_base 994: mod_base = OTHER; note = N1-methylpseudouridine
  modified_base 996: mod_base = OTHER; note = N1-methylpseudouridine
  modified_base 997: mod_base = OTHER; note = N1-methylpseudouridine
  modified_base 998: mod_base = OTHER; note = N1-methylpseudouridine
  modified_base 1006: mod_base = OTHER; note = N1-methylpseudouridine
  modified_base 1009: mod_base = OTHER; note = N1-methylpseudouridine
  modified_base 1018: mod_base = OTHER; note = N1-methylpseudouridine
  modified_base 1023: mod_base = OTHER; note = N1-methylpseudouridine
  modified_base 1035: mod_base = OTHER; note = N1-methylpseudouridine
  modified_base 1045: mod_base = OTHER; note = N1-methylpseudouridine
  modified_base 1047: mod_base = OTHER; note = N1-methylpseudouridine
  modified_base 1049: mod_base = OTHER; note = N1-methylpseudouridine
  modified_base 1054: mod_base = OTHER; note = N1-methylpseudouridine
  modified_base 1066: mod_base = OTHER; note = N1-methylpseudouridine
  modified_base 1069: mod_base = OTHER; note = N1-methylpseudouridine
  modified_base 1082: mod_base = OTHER; note = N1-methylpseudouridine
  modified_base 1093: mod_base = OTHER; note = N1-methylpseudouridine
  modified_base 1099: mod_base = OTHER; note = N1-methylpseudouridine
  modified_base 1102: mod_base = OTHER; note = N1-methylpseudouridine
  modified_base 1104: mod_base = OTHER; note = N1-methylpseudouridine
  modified_base 1108: mod_base = OTHER; note = N1-methylpseudouridine
  modified_base 1114: mod_base = OTHER; note = N1-methylpseudouridine
  modified_base 1123: mod_base = OTHER; note = N1-methylpseudouridine
  modified_base 1126: mod_base = OTHER; note = N1-methylpseudouridine
  modified_base 1131: mod_base = OTHER; note = N1-methylpseudouridine
  modified_base 1132: mod_base = OTHER; note = N1-methylpseudouridine
  modified_base 1143: mod_base = OTHER; note = N1-methylpseudouridine
  modified_base 1144: mod_base = OTHER; note = N1-methylpseudouridine
  modified_base 1147: mod_base = OTHER; note = N1-methylpseudouridine
  modified_base 1150: mod_base = OTHER; note = N1-methylpseudouridine
  modified_base 1162: mod_base = OTHER; note = N1-methylpseudouridine
  modified_base 1172: mod_base = OTHER; note = N1-methylpseudouridine
  modified_base 1175: mod_base = OTHER; note = N1-methylpseudouridine
  modified_base 1181: mod_base = OTHER; note = N1-methylpseudouridine
  modified_base 1183: mod_base = OTHER; note = N1-methylpseudouridine
  modified_base 1187: mod_base = OTHER; note = N1-methylpseudouridine
  modified_base 1192: mod_base = OTHER; note = N1-methylpseudouridine
  modified_base 1194: mod_base = OTHER; note = N1-methylpseudouridine
  modified_base 1195: mod_base = OTHER; note = N1-methylpseudouridine
  modified_base 1198: mod_base = OTHER; note = N1-methylpseudouridine
  modified_base 1204: mod_base = OTHER; note = N1-methylpseudouridine
  modified_base 1207: mod_base = OTHER; note = N1-methylpseudouridine
  modified_base 1215: mod_base = OTHER; note = N1-methylpseudouridine
  modified_base 1225: mod_base = OTHER; note = N1-methylpseudouridine
  modified_base 1227: mod_base = OTHER; note = N1-methylpseudouridine
  modified_base 1228: mod_base = OTHER; note = N1-methylpseudouridine
  modified_base 1243: mod_base = OTHER; note = N1-methylpseudouridine
  modified_base 1251: mod_base = OTHER; note = N1-methylpseudouridine
  modified_base 1258: mod_base = OTHER; note = N1-methylpseudouridine
  modified_base 1259: mod_base = OTHER; note = N1-methylpseudouridine
  modified_base 1262: mod_base = OTHER; note = N1-methylpseudouridine
  modified_base 1273: mod_base = OTHER; note = N1-methylpseudouridine
  modified_base 1276: mod_base = OTHER; note = N1-methylpseudouridine
  modified_base 1278: mod_base = OTHER; note = N1-methylpseudouridine
  modified_base 1280: mod_base = OTHER; note = N1-methylpseudouridine
  modified_base 1283: mod_base = OTHER; note = N1-methylpseudouridine
  modified_base 1288: mod_base = OTHER; note = N1-methylpseudouridine
  modified_base 1292: mod_base = OTHER; note = N1-methylpseudouridine
  modified_base 1306: mod_base = OTHER; note = N1-methylpseudouridine
  modified_base 1315: mod_base = OTHER; note = N1-methylpseudouridine
  modified_base 1318: mod_base = OTHER; note = N1-methylpseudouridine
  modified_base 1327: mod_base = OTHER; note = N1-methylpseudouridine
  modified_base 1346: mod_base = OTHER; note = N1-methylpseudouridine
  modified_base 1351: mod_base = OTHER; note = N1-methylpseudouridine
  modified_base 1353: mod_base = OTHER; note = N1-methylpseudouridine
  modified_base 1354: mod_base = OTHER; note = N1-methylpseudouridine
  modified_base 1355: mod_base = OTHER; note = N1-methylpseudouridine
  modified_base 1363: mod_base = OTHER; note = N1-methylpseudouridine
  modified_base 1366: mod_base = OTHER; note = N1-methylpseudouridine
  modified_base 1367: mod_base = OTHER; note = N1-methylpseudouridine
  modified_base 1372: mod_base = OTHER; note = N1-methylpseudouridine
  modified_base 1374: mod_base = OTHER; note = N1-methylpseudouridine
  modified_base 1376: mod_base = OTHER; note = N1-methylpseudouridine
  modified_base 1378: mod_base = OTHER; note = N1-methylpseudouridine
  modified_base 1384: mod_base = OTHER; note = N1-methylpseudouridine
  modified_base 1385: mod_base = OTHER; note = N1-methylpseudouridine
  modified_base 1391: mod_base = OTHER; note = N1-methylpseudouridine
  modified_base 1395: mod_base = OTHER; note = N1-methylpseudouridine
  modified_base 1396: mod_base = OTHER; note = N1-methylpseudouridine
  modified_base 1407: mod_base = OTHER; note = N1-methylpseudouridine
  modified_base 1408: mod_base = OTHER; note = N1-methylpseudouridine
  modified_base 1409: mod_base = OTHER; note = N1-methylpseudouridine
  modified_base 1414: mod_base = OTHER; note = N1-methylpseudouridine
  modified_base 1432: mod_base = OTHER; note = N1-methylpseudouridine
  modified_base 1438: mod_base = OTHER; note = N1-methylpseudouridine
  modified_base 1440: mod_base = OTHER; note = N1-methylpseudouridine
  modified_base 1442: mod_base = OTHER; note = N1-methylpseudouridine
  modified_base 1448: mod_base = OTHER; note = N1-methylpseudouridine
  modified_base 1452: mod_base = OTHER; note = N1-methylpseudouridine
  modified_base 1463: mod_base = OTHER; note = N1-methylpseudouridine
  modified_base 1465: mod_base = OTHER; note = N1-methylpseudouridine
  modified_base 1474: mod_base = OTHER; note = N1-methylpseudouridine
  modified_base 1477: mod_base = OTHER; note = N1-methylpseudouridine
  modified_base 1486: mod_base = OTHER; note = N1-methylpseudouridine
  modified_base 1493: mod_base = OTHER; note = N1-methylpseudouridine
  modified_base 1497: mod_base = OTHER; note = N1-methylpseudouridine
  modified_base 1507: mod_base = OTHER; note = N1-methylpseudouridine
  modified_base 1509: mod_base = OTHER; note = N1-methylpseudouridine
  modified_base 1510: mod_base = OTHER; note = N1-methylpseudouridine
  modified_base 1513: mod_base = OTHER; note = N1-methylpseudouridine
  modified_base 1517: mod_base = OTHER; note = N1-methylpseudouridine
  modified_base 1526: mod_base = OTHER; note = N1-methylpseudouridine
  modified_base 1528: mod_base = OTHER; note = N1-methylpseudouridine
  modified_base 1530: mod_base = OTHER; note = N1-methylpseudouridine
  modified_base 1532: mod_base = OTHER; note = N1-methylpseudouridine
  modified_base 1540: mod_base = OTHER; note = N1-methylpseudouridine
  modified_base 1543: mod_base = OTHER; note = N1-methylpseudouridine
  modified_base 1544: mod_base = OTHER; note = N1-methylpseudouridine
  modified_base 1546: mod_base = OTHER; note = N1-methylpseudouridine
  modified_base 1548: mod_base = OTHER; note = N1-methylpseudouridine
  modified_base 1553: mod_base = OTHER; note = N1-methylpseudouridine
  modified_base 1555: mod_base = OTHER; note = N1-methylpseudouridine
  modified_base 1558: mod_base = OTHER; note = N1-methylpseudouridine
  modified_base 1564: mod_base = OTHER; note = N1-methylpseudouridine
  modified_base 1576: mod_base = OTHER; note = N1-methylpseudouridine
  modified_base 1586: mod_base = OTHER; note = N1-methylpseudouridine
  modified_base 1589: mod_base = OTHER; note = N1-methylpseudouridine
  modified_base 1591: mod_base = OTHER; note = N1-methylpseudouridine
  modified_base 1592: mod_base = OTHER; note = N1-methylpseudouridine
  modified_base 1595: mod_base = OTHER; note = N1-methylpseudouridine
  modified_base 1603: mod_base = OTHER; note = N1-methylpseudouridine
  modified_base 1606: mod_base = OTHER; note = N1-methylpseudouridine
  modified_base 1614: mod_base = OTHER; note = N1-methylpseudouridine
  modified_base 1616: mod_base = OTHER; note = N1-methylpseudouridine
  modified_base 1619: mod_base = OTHER; note = N1-methylpseudouridine
  modified_base 1634: mod_base = OTHER; note = N1-methylpseudouridine
  modified_base 1636: mod_base = OTHER; note = N1-methylpseudouridine
  modified_base 1642: mod_base = OTHER; note = N1-methylpseudouridine
  modified_base 1645: mod_base = OTHER; note = N1-methylpseudouridine
  modified_base 1654: mod_base = OTHER; note = N1-methylpseudouridine
  modified_base 1657: mod_base = OTHER; note = N1-methylpseudouridine
  modified_base 1669: mod_base = OTHER; note = N1-methylpseudouridine
  modified_base 1673: mod_base = OTHER; note = N1-methylpseudouridine
  modified_base 1680: mod_base = OTHER; note = N1-methylpseudouridine
  modified_base 1690: mod_base = OTHER; note = N1-methylpseudouridine
  modified_base 1691: mod_base = OTHER; note = N1-methylpseudouridine
  modified_base 1692: mod_base = OTHER; note = N1-methylpseudouridine
  modified_base 1693: mod_base = OTHER; note = N1-methylpseudouridine
  modified_base 1695: mod_base = OTHER; note = N1-methylpseudouridine
  modified_base 1696: mod_base = OTHER; note = N1-methylpseudouridine
  modified_base 1712: mod_base = OTHER; note = N1-methylpseudouridine
  modified_base 1716: mod_base = OTHER; note = N1-methylpseudouridine
  modified_base 1725: mod_base = OTHER; note = N1-methylpseudouridine
  modified_base 1729: mod_base = OTHER; note = N1-methylpseudouridine
  modified_base 1733: mod_base = OTHER; note = N1-methylpseudouridine
  modified_base 1755: mod_base = OTHER; note = N1-methylpseudouridine
  modified_base 1756: mod_base = OTHER; note = N1-methylpseudouridine
  modified_base 1757: mod_base = OTHER; note = N1-methylpseudouridine
  modified_base 1758: mod_base = OTHER; note = N1-methylpseudouridine
  modified_base 1764: mod_base = OTHER; note = N1-methylpseudouridine
  modified_base 1765: mod_base = OTHER; note = N1-methylpseudouridine
  modified_base 1766: mod_base = OTHER; note = N1-methylpseudouridine
  modified_base 1768: mod_base = OTHER; note = N1-methylpseudouridine
  modified_base 1777: mod_base = OTHER; note = N1-methylpseudouridine
  modified_base 1780: mod_base = OTHER; note = N1-methylpseudouridine
  modified_base 1789: mod_base = OTHER; note = N1-methylpseudouridine
  modified_base 1807: mod_base = OTHER; note = N1-methylpseudouridine
  modified_base 1810: mod_base = OTHER; note = N1-methylpseudouridine
  modified_base 1813: mod_base = OTHER; note = N1-methylpseudouridine
  modified_base 1819: mod_base = OTHER; note = N1-methylpseudouridine
  modified_base 1834: mod_base = OTHER; note = N1-methylpseudouridine
  modified_base 1837: mod_base = OTHER; note = N1-methylpseudouridine
  modified_base 1854: mod_base = OTHER; note = N1-methylpseudouridine
  modified_base 1855: mod_base = OTHER; note = N1-methylpseudouridine
  modified_base 1870: mod_base = OTHER; note = N1-methylpseudouridine
  modified_base 1874: mod_base = OTHER; note = N1-methylpseudouridine
  modified_base 1882: mod_base = OTHER; note = N1-methylpseudouridine
  modified_base 1888: mod_base = OTHER; note = N1-methylpseudouridine
  modified_base 1892: mod_base = OTHER; note = N1-methylpseudouridine
  modified_base 1897: mod_base = OTHER; note = N1-methylpseudouridine
  modified_base 1906: mod_base = OTHER; note = N1-methylpseudouridine
  modified_base 1909: mod_base = OTHER; note = N1-methylpseudouridine
  modified_base 1925: mod_base = OTHER; note = N1-methylpseudouridine
  modified_base 1926: mod_base = OTHER; note = N1-methylpseudouridine
  modified_base 1927: mod_base = OTHER; note = N1-methylpseudouridine
  modified_base 1929: mod_base = OTHER; note = N1-methylpseudouridine
  modified_base 1935: mod_base = OTHER; note = N1-methylpseudouridine
  modified_base 1936: mod_base = OTHER; note = N1-methylpseudouridine
  modified_base 1939: mod_base = OTHER; note = N1-methylpseudouridine
  modified_base 1960: mod_base = OTHER; note = N1-methylpseudouridine
  modified_base 1969: mod_base = OTHER; note = N1-methylpseudouridine
  modified_base 1972: mod_base = OTHER; note = N1-methylpseudouridine
  modified_base 1977: mod_base = OTHER; note = N1-methylpseudouridine
  modified_base 1978: mod_base = OTHER; note = N1-methylpseudouridine
  modified_base 1979: mod_base = OTHER; note = N1-methylpseudouridine
  modified_base 1984: mod_base = OTHER; note = N1-methylpseudouridine
  modified_base 1985: mod_base = OTHER; note = N1-methylpseudouridine
  modified_base 1989: mod_base = OTHER; note = N1-methylpseudouridine
  modified_base 1992: mod_base = OTHER; note = N1-methylpseudouridine
  modified_base 1996: mod_base = OTHER; note = N1-methylpseudouridine
  modified_base 2003: mod_base = OTHER; note = N1-methylpseudouridine
  modified_base 2005: mod_base = OTHER; note = N1-methylpseudouridine
  modified_base 2009: mod_base = OTHER; note = N1-methylpseudouridine
  modified_base 2019: mod_base = OTHER; note = N1-methylpseudouridine
  modified_base 2025: mod_base = OTHER; note = N1-methylpseudouridine
  modified_base 2026: mod_base = OTHER; note = N1-methylpseudouridine
  modified_base 2031: mod_base = OTHER; note = N1-methylpseudouridine
  modified_base 2035: mod_base = OTHER; note = N1-methylpseudouridine
  modified_base 2046: mod_base = OTHER; note = N1-methylpseudouridine
  modified_base 2059: mod_base = OTHER; note = N1-methylpseudouridine
  modified_base 2067: mod_base = OTHER; note = N1-methylpseudouridine
  modified_base 2073: mod_base = OTHER; note = N1-methylpseudouridine
  modified_base 2074: mod_base = OTHER; note = N1-methylpseudouridine
  modified_base 2075: mod_base = OTHER; note = N1-methylpseudouridine
  modified_base 2083: mod_base = OTHER; note = N1-methylpseudouridine
  modified_base 2086: mod_base = OTHER; note = N1-methylpseudouridine
  modified_base 2105: mod_base = OTHER; note = N1-methylpseudouridine
  modified_base 2112: mod_base = OTHER; note = N1-methylpseudouridine
  modified_base 2113: mod_base = OTHER; note = N1-methylpseudouridine
  modified_base 2114: mod_base = OTHER; note = N1-methylpseudouridine
  modified_base 2116: mod_base = OTHER; note = N1-methylpseudouridine
  modified_base 2125: mod_base = OTHER; note = N1-methylpseudouridine
  modified_base 2133: mod_base = OTHER; note = N1-methylpseudouridine
  modified_base 2134: mod_base = OTHER; note = N1-methylpseudouridine
  modified_base 2144: mod_base = OTHER; note = N1-methylpseudouridine
  modified_base 2146: mod_base = OTHER; note = N1-methylpseudouridine
  modified_base 2161: mod_base = OTHER; note = N1-methylpseudouridine
  modified_base 2164: mod_base = OTHER; note = N1-methylpseudouridine
  modified_base 2168: mod_base = OTHER; note = N1-methylpseudouridine
  modified_base 2175: mod_base = OTHER; note = N1-methylpseudouridine
  modified_base 2177: mod_base = OTHER; note = N1-methylpseudouridine
  modified_base 2179: mod_base = OTHER; note = N1-methylpseudouridine
  modified_base 2182: mod_base = OTHER; note = N1-methylpseudouridine
  modified_base 2184: mod_base = OTHER; note = N1-methylpseudouridine
  modified_base 2186: mod_base = OTHER; note = N1-methylpseudouridine
  modified_base 2190: mod_base = OTHER; note = N1-methylpseudouridine
  modified_base 2193: mod_base = OTHER; note = N1-methylpseudouridine
  modified_base 2194: mod_base = OTHER; note = N1-methylpseudouridine
  modified_base 2200: mod_base = OTHER; note = N1-methylpseudouridine
  modified_base 2201: mod_base = OTHER; note = N1-methylpseudouridine
  modified_base 2202: mod_base = OTHER; note = N1-methylpseudouridine
  modified_base 2212: mod_base = OTHER; note = N1-methylpseudouridine
  modified_base 2221: mod_base = OTHER; note = N1-methylpseudouridine
  modified_base 2226: mod_base = OTHER; note = N1-methylpseudouridine
  modified_base 2230: mod_base = OTHER; note = N1-methylpseudouridine
  modified_base 2242: mod_base = OTHER; note = N1-methylpseudouridine
  modified_base 2256: mod_base = OTHER; note = N1-methylpseudouridine
  modified_base 2257: mod_base = OTHER; note = N1-methylpseudouridine
  modified_base 2260: mod_base = OTHER; note = N1-methylpseudouridine
  modified_base 2282: mod_base = OTHER; note = N1-methylpseudouridine
  modified_base 2284: mod_base = OTHER; note = N1-methylpseudouridine
  modified_base 2287: mod_base = OTHER; note = N1-methylpseudouridine
  modified_base 2288: mod_base = OTHER; note = N1-methylpseudouridine
  modified_base 2293: mod_base = OTHER; note = N1-methylpseudouridine
  modified_base 2296: mod_base = OTHER; note = N1-methylpseudouridine
  modified_base 2298: mod_base = OTHER; note = N1-methylpseudouridine
  modified_base 2299: mod_base = OTHER; note = N1-methylpseudouridine
  modified_base 2309: mod_base = OTHER; note = N1-methylpseudouridine
  modified_base 2317: mod_base = OTHER; note = N1-methylpseudouridine
  modified_base 2323: mod_base = OTHER; note = N1-methylpseudouridine
  modified_base 2332: mod_base = OTHER; note = N1-methylpseudouridine
  modified_base 2343: mod_base = OTHER; note = N1-methylpseudouridine
  modified_base 2346: mod_base = OTHER; note = N1-methylpseudouridine
  modified_base 2347: mod_base = OTHER; note = N1-methylpseudouridine
  modified_base 2356: mod_base = OTHER; note = N1-methylpseudouridine
  modified_base 2357: mod_base = OTHER; note = N1-methylpseudouridine
  modified_base 2361: mod_base = OTHER; note = N1-methylpseudouridine
  modified_base 2364: mod_base = OTHER; note = N1-methylpseudouridine
  modified_base 2365: mod_base = OTHER; note = N1-methylpseudouridine
  modified_base 2370: mod_base = OTHER; note = N1-methylpseudouridine
  modified_base 2372: mod_base = OTHER; note = N1-methylpseudouridine
  modified_base 2374: mod_base = OTHER; note = N1-methylpseudouridine
  modified_base 2380: mod_base = OTHER; note = N1-methylpseudouridine
  modified_base 2382: mod_base = OTHER; note = N1-methylpseudouridine
  modified_base 2384: mod_base = OTHER; note = N1-methylpseudouridine
  modified_base 2389: mod_base = OTHER; note = N1-methylpseudouridine
  modified_base 2390: mod_base = OTHER; note = N1-methylpseudouridine
  modified_base 2400: mod_base = OTHER; note = N1-methylpseudouridine
  modified_base 2401: mod_base = OTHER; note = N1-methylpseudouridine
  modified_base 2409: mod_base = OTHER; note = N1-methylpseudouridine
  modified_base 2413: mod_base = OTHER; note = N1-methylpseudouridine
  modified_base 2421: mod_base = OTHER; note = N1-methylpseudouridine
  modified_base 2429: mod_base = OTHER; note = N1-methylpseudouridine
  modified_base 2431: mod_base = OTHER; note = N1-methylpseudouridine
  modified_base 2434: mod_base = OTHER; note = N1-methylpseudouridine
  modified_base 2440: mod_base = OTHER; note = N1-methylpseudouridine
  modified_base 2443: mod_base = OTHER; note = N1-methylpseudouridine
  modified_base 2444: mod_base = OTHER; note = N1-methylpseudouridine
  modified_base 2457: mod_base = OTHER; note = N1-methylpseudouridine
  modified_base 2458: mod_base = OTHER; note = N1-methylpseudouridine
  modified_base 2459: mod_base = OTHER; note = N1-methylpseudouridine
  modified_base 2461: mod_base = OTHER; note = N1-methylpseudouridine
  modified_base 2468: mod_base = OTHER; note = N1-methylpseudouridine
  modified_base 2483: mod_base = OTHER; note = N1-methylpseudouridine
  modified_base 2485: mod_base = OTHER; note = N1-methylpseudouridine
  modified_base 2488: mod_base = OTHER; note = N1-methylpseudouridine
  modified_base 2497: mod_base = OTHER; note = N1-methylpseudouridine
  modified_base 2498: mod_base = OTHER; note = N1-methylpseudouridine
  modified_base 2500: mod_base = OTHER; note = N1-methylpseudouridine
  modified_base 2503: mod_base = OTHER; note = N1-methylpseudouridine
  modified_base 2509: mod_base = OTHER; note = N1-methylpseudouridine
  modified_base 2515: mod_base = OTHER; note = N1-methylpseudouridine
  modified_base 2517: mod_base = OTHER; note = N1-methylpseudouridine
  modified_base 2518: mod_base = OTHER; note = N1-methylpseudouridine
  modified_base 2519: mod_base = OTHER; note = N1-methylpseudouridine
  modified_base 2525: mod_base = OTHER; note = N1-methylpseudouridine
  modified_base 2528: mod_base = OTHER; note = N1-methylpseudouridine
  modified_base 2533: mod_base = OTHER; note = N1-methylpseudouridine
  modified_base 2536: mod_base = OTHER; note = N1-methylpseudouridine
  modified_base 2548: mod_base = OTHER; note = N1-methylpseudouridine
  modified_base 2556: mod_base = OTHER; note = N1-methylpseudouridine
  modified_base 2564: mod_base = OTHER; note = N1-methylpseudouridine
  modified_base 2566: mod_base = OTHER; note = N1-methylpseudouridine
  modified_base 2568: mod_base = OTHER; note = N1-methylpseudouridine
  modified_base 2569: mod_base = OTHER; note = N1-methylpseudouridine
  modified_base 2581: mod_base = OTHER; note = N1-methylpseudouridine
  modified_base 2582: mod_base = OTHER; note = N1-methylpseudouridine
  modified_base 2584: mod_base = OTHER; note = N1-methylpseudouridine
  modified_base 2593: mod_base = OTHER; note = N1-methylpseudouridine
  modified_base 2607: mod_base = OTHER; note = N1-methylpseudouridine
  modified_base 2609: mod_base = OTHER; note = N1-methylpseudouridine
  modified_base 2616: mod_base = OTHER; note = N1-methylpseudouridine
  modified_base 2626: mod_base = OTHER; note = N1-methylpseudouridine
  modified_base 2628: mod_base = OTHER; note = N1-methylpseudouridine
  modified_base 2638: mod_base = OTHER; note = N1-methylpseudouridine
  modified_base 2641: mod_base = OTHER; note = N1-methylpseudouridine
  modified_base 2650: mod_base = OTHER; note = N1-methylpseudouridine
  modified_base 2677: mod_base = OTHER; note = N1-methylpseudouridine
  modified_base 2678: mod_base = OTHER; note = N1-methylpseudouridine
  modified_base 2680: mod_base = OTHER; note = N1-methylpseudouridine
  modified_base 2685: mod_base = OTHER; note = N1-methylpseudouridine
  modified_base 2686: mod_base = OTHER; note = N1-methylpseudouridine
  modified_base 2689: mod_base = OTHER; note = N1-methylpseudouridine
  modified_base 2703: mod_base = OTHER; note = N1-methylpseudouridine
  modified_base 2704: mod_base = OTHER; note = N1-methylpseudouridine
  modified_base 2717: mod_base = OTHER; note = N1-methylpseudouridine
  modified_base 2718: mod_base = OTHER; note = N1-methylpseudouridine
  modified_base 2719: mod_base = OTHER; note = N1-methylpseudouridine
  modified_base 2720: mod_base = OTHER; note = N1-methylpseudouridine
  modified_base 2722: mod_base = OTHER; note = N1-methylpseudouridine
  modified_base 2728: mod_base = OTHER; note = N1-methylpseudouridine
  modified_base 2731: mod_base = OTHER; note = N1-methylpseudouridine
  modified_base 2735: mod_base = OTHER; note = N1-methylpseudouridine
  modified_base 2741: mod_base = OTHER; note = N1-methylpseudouridine
  modified_base 2746: mod_base = OTHER; note = N1-methylpseudouridine
  modified_base 2751: mod_base = OTHER; note = N1-methylpseudouridine
  modified_base 2752: mod_base = OTHER; note = N1-methylpseudouridine
  modified_base 2764: mod_base = OTHER; note = N1-methylpseudouridine
  modified_base 2779: mod_base = OTHER; note = N1-methylpseudouridine
  modified_base 2800: mod_base = OTHER; note = N1-methylpseudouridine
  modified_base 2812: mod_base = OTHER; note = N1-methylpseudouridine
  modified_base 2821: mod_base = OTHER; note = N1-methylpseudouridine
  modified_base 2829: mod_base = OTHER; note = N1-methylpseudouridine
  modified_base 2831: mod_base = OTHER; note = N1-methylpseudouridine
  modified_base 2837: mod_base = OTHER; note = N1-methylpseudouridine
  modified_base 2839: mod_base = OTHER; note = N1-methylpseudouridine
  modified_base 2851: mod_base = OTHER; note = N1-methylpseudouridine
  modified_base 2854: mod_base = OTHER; note = N1-methylpseudouridine
  modified_base 2863: mod_base = OTHER; note = N1-methylpseudouridine
  modified_base 2869: mod_base = OTHER; note = N1-methylpseudouridine
  modified_base 2872: mod_base = OTHER; note = N1-methylpseudouridine
  modified_base 2873: mod_base = OTHER; note = N1-methylpseudouridine
  modified_base 2876: mod_base = OTHER; note = N1-methylpseudouridine
  modified_base 2880: mod_base = OTHER; note = N1-methylpseudouridine
  modified_base 2881: mod_base = OTHER; note = N1-methylpseudouridine
  modified_base 2884: mod_base = OTHER; note = N1-methylpseudouridine
  modified_base 2890: mod_base = OTHER; note = N1-methylpseudouridine
  modified_base 2893: mod_base = OTHER; note = N1-methylpseudouridine
  modified_base 2909: mod_base = OTHER; note = N1-methylpseudouridine
  modified_base 2915: mod_base = OTHER; note = N1-methylpseudouridine
  modified_base 2917: mod_base = OTHER; note = N1-methylpseudouridine
  modified_base 2920: mod_base = OTHER; note = N1-methylpseudouridine
  modified_base 2923: mod_base = OTHER; note = N1-methylpseudouridine
  modified_base 2924: mod_base = OTHER; note = N1-methylpseudouridine
  modified_base 2929: mod_base = OTHER; note = N1-methylpseudouridine
  modified_base 2951: mod_base = OTHER; note = N1-methylpseudouridine
  modified_base 2970: mod_base = OTHER; note = N1-methylpseudouridine
  modified_base 2983: mod_base = OTHER; note = N1-methylpseudouridine
  modified_base 2992: mod_base = OTHER; note = N1-methylpseudouridine
  modified_base 3004: mod_base = OTHER; note = N1-methylpseudouridine
  modified_base 3013: mod_base = OTHER; note = N1-methylpseudouridine
  modified_base 3025: mod_base = OTHER; note = N1-methylpseudouridine
  modified_base 3028: mod_base = OTHER; note = N1-methylpseudouridine
  modified_base 3043: mod_base = OTHER; note = N1-methylpseudouridine
  modified_base 3050: mod_base = OTHER; note = N1-methylpseudouridine
  modified_base 3058: mod_base = OTHER; note = N1-methylpseudouridine
  modified_base 3073: mod_base = OTHER; note = N1-methylpseudouridine
  modified_base 3075: mod_base = OTHER; note = N1-methylpseudouridine
  modified_base 3079: mod_base = OTHER; note = N1-methylpseudouridine
  modified_base 3081: mod_base = OTHER; note = N1-methylpseudouridine
  modified_base 3084: mod_base = OTHER; note = N1-methylpseudouridine
  modified_base 3088: mod_base = OTHER; note = N1-methylpseudouridine
  modified_base 3104: mod_base = OTHER; note = N1-methylpseudouridine
  modified_base 3106: mod_base = OTHER; note = N1-methylpseudouridine
  modified_base 3108: mod_base = OTHER; note = N1-methylpseudouridine
  modified_base 3112: mod_base = OTHER; note = N1-methylpseudouridine
  modified_base 3116: mod_base = OTHER; note = N1-methylpseudouridine
  modified_base 3124: mod_base = OTHER; note = N1-methylpseudouridine
  modified_base 3130: mod_base = OTHER; note = N1-methylpseudouridine
  modified_base 3134: mod_base = OTHER; note = N1-methylpseudouridine
  modified_base 3139: mod_base = OTHER; note = N1-methylpseudouridine
  modified_base 3141: mod_base = OTHER; note = N1-methylpseudouridine
  modified_base 3147: mod_base = OTHER; note = N1-methylpseudouridine
  modified_base 3154: mod_base = OTHER; note = N1-methylpseudouridine
  modified_base 3163: mod_base = OTHER; note = N1-methylpseudouridine
  modified_base 3166: mod_base = OTHER; note = N1-methylpseudouridine
  modified_base 3170: mod_base = OTHER; note = N1-methylpseudouridine
  modified_base 3177: mod_base = OTHER; note = N1-methylpseudouridine
  modified_base 3178: mod_base = OTHER; note = N1-methylpseudouridine
  modified_base 3179: mod_base = OTHER; note = N1-methylpseudouridine
  modified_base 3181: mod_base = OTHER; note = N1-methylpseudouridine
  modified_base 3188: mod_base = OTHER; note = N1-methylpseudouridine
  modified_base 3191: mod_base = OTHER; note = N1-methylpseudouridine
  modified_base 3192: mod_base = OTHER; note = N1-methylpseudouridine
  modified_base 3194: mod_base = OTHER; note = N1-methylpseudouridine
  modified_base 3196: mod_base = OTHER; note = N1-methylpseudouridine
  modified_base 3208: mod_base = OTHER; note = N1-methylpseudouridine
  modified_base 3210: mod_base = OTHER; note = N1-methylpseudouridine
  modified_base 3211: mod_base = OTHER; note = N1-methylpseudouridine
  modified_base 3219: mod_base = OTHER; note = N1-methylpseudouridine
  modified_base 3245: mod_base = OTHER; note = N1-methylpseudouridine
  modified_base 3250: mod_base = OTHER; note = N1-methylpseudouridine
  modified_base 3255: mod_base = OTHER; note = N1-methylpseudouridine
  modified_base 3265: mod_base = OTHER; note = N1-methylpseudouridine
  modified_base 3268: mod_base = OTHER; note = N1-methylpseudouridine
  modified_base 3277: mod_base = OTHER; note = N1-methylpseudouridine
  modified_base 3285: mod_base = OTHER; note = N1-methylpseudouridine
  modified_base 3288: mod_base = OTHER; note = N1-methylpseudouridine
  modified_base 3298: mod_base = OTHER; note = N1-methylpseudouridine
  modified_base 3301: mod_base = OTHER; note = N1-methylpseudouridine
  modified_base 3313: mod_base = OTHER; note = N1-methylpseudouridine
  modified_base 3316: mod_base = OTHER; note = N1-methylpseudouridine
  modified_base 3317: mod_base = OTHER; note = N1-methylpseudouridine
  modified_base 3330: mod_base = OTHER; note = N1-methylpseudouridine
  modified_base 3331: mod_base = OTHER; note = N1-methylpseudouridine
  modified_base 3332: mod_base = OTHER; note = N1-methylpseudouridine
  modified_base 3340: mod_base = OTHER; note = N1-methylpseudouridine
  modified_base 3350: mod_base = OTHER; note = N1-methylpseudouridine
  modified_base 3364: mod_base = OTHER; note = N1-methylpseudouridine
  modified_base 3373: mod_base = OTHER; note = N1-methylpseudouridine
  modified_base 3383: mod_base = OTHER; note = N1-methylpseudouridine
  modified_base 3386: mod_base = OTHER; note = N1-methylpseudouridine
  modified_base 3387: mod_base = OTHER; note = N1-methylpseudouridine
  modified_base 3388: mod_base = OTHER; note = N1-methylpseudouridine
  modified_base 3391: mod_base = OTHER; note = N1-methylpseudouridine
  modified_base 3403: mod_base = OTHER; note = N1-methylpseudouridine
  modified_base 3406: mod_base = OTHER; note = N1-methylpseudouridine
  modified_base 3421: mod_base = OTHER; note = N1-methylpseudouridine
  modified_base 3433: mod_base = OTHER; note = N1-methylpseudouridine
  modified_base 3437: mod_base = OTHER; note = N1-methylpseudouridine
  modified_base 3442: mod_base = OTHER; note = N1-methylpseudouridine
  modified_base 3445: mod_base = OTHER; note = N1-methylpseudouridine
  modified_base 3449: mod_base = OTHER; note = N1-methylpseudouridine
  modified_base 3457: mod_base = OTHER; note = N1-methylpseudouridine
  modified_base 3461: mod_base = OTHER; note = N1-methylpseudouridine
  modified_base 3468: mod_base = OTHER; note = N1-methylpseudouridine
  modified_base 3473: mod_base = OTHER; note = N1-methylpseudouridine
  modified_base 3487: mod_base = OTHER; note = N1-methylpseudouridine
  modified_base 3490: mod_base = OTHER; note = N1-methylpseudouridine
  modified_base 3499: mod_base = OTHER; note = N1-methylpseudouridine
  modified_base 3505: mod_base = OTHER; note = N1-methylpseudouridine
  modified_base 3508: mod_base = OTHER; note = N1-methylpseudouridine
  modified_base 3513: mod_base = OTHER; note = N1-methylpseudouridine
  modified_base 3514: mod_base = OTHER; note = N1-methylpseudouridine
  modified_base 3519: mod_base = OTHER; note = N1-methylpseudouridine
  modified_base 3521: mod_base = OTHER; note = N1-methylpseudouridine
  modified_base 3526: mod_base = OTHER; note = N1-methylpseudouridine
  modified_base 3529: mod_base = OTHER; note = N1-methylpseudouridine
  modified_base 3537: mod_base = OTHER; note = N1-methylpseudouridine
  modified_base 3538: mod_base = OTHER; note = N1-methylpseudouridine
  modified_base 3549: mod_base = OTHER; note = N1-methylpseudouridine
  modified_base 3550: mod_base = OTHER; note = N1-methylpseudouridine
  modified_base 3555: mod_base = OTHER; note = N1-methylpseudouridine
  modified_base 3556: mod_base = OTHER; note = N1-methylpseudouridine
  modified_base 3558: mod_base = OTHER; note = N1-methylpseudouridine
  modified_base 3565: mod_base = OTHER; note = N1-methylpseudouridine
  modified_base 3574: mod_base = OTHER; note = N1-methylpseudouridine
  modified_base 3582: mod_base = OTHER; note = N1-methylpseudouridine
  modified_base 3603: mod_base = OTHER; note = N1-methylpseudouridine
  modified_base 3607: mod_base = OTHER; note = N1-methylpseudouridine
  modified_base 3616: mod_base = OTHER; note = N1-methylpseudouridine
  modified_base 3619: mod_base = OTHER; note = N1-methylpseudouridine
  modified_base 3631: mod_base = OTHER; note = N1-methylpseudouridine
  modified_base 3634: mod_base = OTHER; note = N1-methylpseudouridine
  modified_base 3642: mod_base = OTHER; note = N1-methylpseudouridine
  modified_base 3644: mod_base = OTHER; note = N1-methylpseudouridine
  modified_base 3652: mod_base = OTHER; note = N1-methylpseudouridine
  modified_base 3657: mod_base = OTHER; note = N1-methylpseudouridine
  modified_base 3663: mod_base = OTHER; note = N1-methylpseudouridine
  modified_base 3664: mod_base = OTHER; note = N1-methylpseudouridine
  modified_base 3667: mod_base = OTHER; note = N1-methylpseudouridine
  modified_base 3669: mod_base = OTHER; note = N1-methylpseudouridine
  modified_base 3678: mod_base = OTHER; note = N1-methylpseudouridine
  modified_base 3685: mod_base = OTHER; note = N1-methylpseudouridine
  modified_base 3687: mod_base = OTHER; note = N1-methylpseudouridine
  modified_base 3694: mod_base = OTHER; note = N1-methylpseudouridine
  modified_base 3703: mod_base = OTHER; note = N1-methylpseudouridine
  modified_base 3706: mod_base = OTHER; note = N1-methylpseudouridine
  modified_base 3714: mod_base = OTHER; note = N1-methylpseudouridine
  modified_base 3716: mod_base = OTHER; note = N1-methylpseudouridine
  modified_base 3727: mod_base = OTHER; note = N1-methylpseudouridine
  modified_base 3747: mod_base = OTHER; note = N1-methylpseudouridine
  modified_base 3749: mod_base = OTHER; note = N1-methylpseudouridine
  modified_base 3750: mod_base = OTHER; note = N1-methylpseudouridine
  modified_base 3751: mod_base = OTHER; note = N1-methylpseudouridine
  modified_base 3753: mod_base = OTHER; note = N1-methylpseudouridine
  modified_base 3754: mod_base = OTHER; note = N1-methylpseudouridine
  modified_base 3756: mod_base = OTHER; note = N1-methylpseudouridine
  modified_base 3766: mod_base = OTHER; note = N1-methylpseudouridine
  modified_base 3767: mod_base = OTHER; note = N1-methylpseudouridine
  modified_base 3769: mod_base = OTHER; note = N1-methylpseudouridine
  modified_base 3774: mod_base = OTHER; note = N1-methylpseudouridine
  modified_base 3775: mod_base = OTHER; note = N1-methylpseudouridine
  modified_base 3777: mod_base = OTHER; note = N1-methylpseudouridine
  modified_base 3778: mod_base = OTHER; note = N1-methylpseudouridine
  modified_base 3790: mod_base = OTHER; note = N1-methylpseudouridine
  modified_base 3796: mod_base = OTHER; note = N1-methylpseudouridine
  modified_base 3800: mod_base = OTHER; note = N1-methylpseudouridine
  modified_base 3803: mod_base = OTHER; note = N1-methylpseudouridine
  modified_base 3811: mod_base = OTHER; note = N1-methylpseudouridine
  modified_base 3826: mod_base = OTHER; note = N1-methylpseudouridine
  modified_base 3829: mod_base = OTHER; note = N1-methylpseudouridine
  modified_base 3856: mod_base = OTHER; note = N1-methylpseudouridine
  modified_base 3859: mod_base = OTHER; note = N1-methylpseudouridine
  modified_base 3861: mod_base = OTHER; note = N1-methylpseudouridine
  modified_base 3879: mod_base = OTHER; note = N1-methylpseudouridine
  modified_base 3880: mod_base = OTHER; note = N1-methylpseudouridine
  modified_base 3889: mod_base = OTHER; note = N1-methylpseudouridine
  modified_base 3898: mod_base = OTHER; note = N1-methylpseudouridine
  modified_base 3900: mod_base = OTHER; note = N1-methylpseudouridine
  modified_base 3901: mod_base = OTHER; note = N1-methylpseudouridine
  modified_base 3903: mod_base = OTHER; note = N1-methylpseudouridine
  modified_base 3907: mod_base = OTHER; note = N1-methylpseudouridine
  modified_base 3911: mod_base = OTHER; note = N1-methylpseudouridine
  modified_base 3916: mod_base = OTHER; note = N1-methylpseudouridine
  modified_base 3922: mod_base = OTHER; note = N1-methylpseudouridine
  modified_base 3925: mod_base = OTHER; note = N1-methylpseudouridine
  modified_base 3940: mod_base = OTHER; note = N1-methylpseudouridine
  modified_base 3954: mod_base = OTHER; note = N1-methylpseudouridine
  modified_base 3955: mod_base = OTHER; note = N1-methylpseudouridine
  modified_base 3956: mod_base = OTHER; note = N1-methylpseudouridine
  modified_base 3970: mod_base = OTHER; note = N1-methylpseudouridine
  modified_base 3973: mod_base = OTHER; note = N1-methylpseudouridine
  modified_base 3977: mod_base = OTHER; note = N1-methylpseudouridine
  modified_base 3997: mod_base = OTHER; note = N1-methylpseudouridine
  modified_base 4000: mod_base = OTHER; note = N1-methylpseudouridine
  modified_base 4017: mod_base = OTHER; note = N1-methylpseudouridine
  modified_base 4022: mod_base = OTHER; note = N1-methylpseudouridine
  modified_base 4025: mod_base = OTHER; note = N1-methylpseudouridine
  modified_base 4032: mod_base = OTHER; note = N1-methylpseudouridine
  modified_base 4041: mod_base = OTHER; note = N1-methylpseudouridine
  modified_base 4042: mod_base = OTHER; note = N1-methylpseudouridine
  modified_base 4046: mod_base = OTHER; note = N1-methylpseudouridine
  modified_base 4047: mod_base = OTHER; note = N1-methylpseudouridine
  modified_base 4052: mod_base = OTHER; note = N1-methylpseudouridine
  modified_base 4057: mod_base = OTHER; note = N1-methylpseudouridine
  modified_base 4062: mod_base = OTHER; note = N1-methylpseudouridine
  modified_base 4069: mod_base = OTHER; note = N1-methylpseudouridine
  modified_base 4072: mod_base = OTHER; note = N1-methylpseudouridine
  modified_base 4075: mod_base = OTHER; note = N1-methylpseudouridine
  modified_base 4078: mod_base = OTHER; note = N1-methylpseudouridine
  modified_base 4087: mod_base = OTHER; note = N1-methylpseudouridine
  modified_base 4111: mod_base = OTHER; note = N1-methylpseudouridine
  modified_base 4116: mod_base = OTHER; note = N1-methylpseudouridine
  modified_base 4120: mod_base = OTHER; note = N1-methylpseudouridine
  modified_base 4129: mod_base = OTHER; note = N1-methylpseudouridine
  modified_base 4132: mod_base = OTHER; note = N1-methylpseudouridine
  modified_base 4138: mod_base = OTHER; note = N1-methylpseudouridine
  modified_base 4144: mod_base = OTHER; note = N1-methylpseudouridine
  modified_base 4147: mod_base = OTHER; note = N1-methylpseudouridine
  modified_base 4155: mod_base = OTHER; note = N1-methylpseudouridine
  modified_base 4157: mod_base = OTHER; note = N1-methylpseudouridine
  modified_base 4161: mod_base = OTHER; note = N1-methylpseudouridine
  modified_base 4162: mod_base = OTHER; note = N1-methylpseudouridine
  modified_base 4172: mod_base = OTHER; note = N1-methylpseudouridine
  modified_base 4175: mod_base = OTHER; note = N1-methylpseudouridine
  modified_base 4177: mod_base = OTHER; note = N1-methylpseudouridine
  modified_base 4182: mod_base = OTHER; note = N1-methylpseudouridine
  modified_base 4183: mod_base = OTHER; note = N1-methylpseudouridine
  modified_base 4186: mod_base = OTHER; note = N1-methylpseudouridine
  modified_base 4200: mod_base = OTHER; note = N1-methylpseudouridine
  modified_base 4202: mod_base = OTHER; note = N1-methylpseudouridine
  modified_base 4210: mod_base = OTHER; note = N1-methylpseudouridine
  modified_base 4222: mod_base = OTHER; note = N1-methylpseudouridine
  modified_base 4225: mod_base = OTHER; note = N1-methylpseudouridine
  modified_base 4228: mod_base = OTHER; note = N1-methylpseudouridine
  modified_base 4234: mod_base = OTHER; note = N1-methylpseudouridine
  modified_base 4242: mod_base = OTHER; note = N1-methylpseudouridine
  modified_base 4249: mod_base = OTHER; note = N1-methylpseudouridine
  modified_base 4251: mod_base = OTHER; note = N1-methylpseudouridine
  modified_base 4252: mod_base = OTHER; note = N1-methylpseudouridine
  modified_base 4258: mod_base = OTHER; note = N1-methylpseudouridine
  modified_base 4279: mod_base = OTHER; note = N1-methylpseudouridine
  modified_base 4282: mod_base = OTHER; note = N1-methylpseudouridine
  modified_base 4287: mod_base = OTHER; note = N1-methylpseudouridine
  modified_base 4300: mod_base = OTHER; note = N1-methylpseudouridine
  modified_base 4313: mod_base = OTHER; note = N1-methylpseudouridine
  modified_base 4318: mod_base = OTHER; note = N1-methylpseudouridine
  modified_base 4324: mod_base = OTHER; note = N1-methylpseudouridine
  modified_base 4328: mod_base = OTHER; note = N1-methylpseudouridine
  modified_base 4329: mod_base = OTHER; note = N1-methylpseudouridine
  modified_base 4331: mod_base = OTHER; note = N1-methylpseudouridine
  modified_base 4335: mod_base = OTHER; note = N1-methylpseudouridine
  modified_base 4339: mod_base = OTHER; note = N1-methylpseudouridine
  modified_base 4344: mod_base = OTHER; note = N1-methylpseudouridine
  modified_base 4345: mod_base = OTHER; note = N1-methylpseudouridine
  modified_base 4348: mod_base = OTHER; note = N1-methylpseudouridine
  modified_base 4350: mod_base = OTHER; note = N1-methylpseudouridine
  modified_base 4354: mod_base = OTHER; note = N1-methylpseudouridine
  modified_base 4359: mod_base = OTHER; note = N1-methylpseudouridine
  modified_base 4365: mod_base = OTHER; note = N1-methylpseudouridine
  modified_base 4375: mod_base = OTHER; note = N1-methylpseudouridine
  modified_base 4385: mod_base = OTHER; note = N1-methylpseudouridine
  modified_base 4411: mod_base = OTHER; note = N1-methylpseudouridine
  modified_base 4413: mod_base = OTHER; note = N1-methylpseudouridine
  modified_base 4414: mod_base = OTHER; note = N1-methylpseudouridine
  modified_base 4417: mod_base = OTHER; note = N1-methylpseudouridine
  modified_base 4434: mod_base = OTHER; note = N1-methylpseudouridine
  modified_base 4438: mod_base = OTHER; note = N1-methylpseudouridine
  modified_base 4442: mod_base = OTHER; note = N1-methylpseudouridine
  modified_base 4447: mod_base = OTHER; note = N1-methylpseudouridine
  modified_base 4448: mod_base = OTHER; note = N1-methylpseudouridine
  modified_base 4450: mod_base = OTHER; note = N1-methylpseudouridine
  modified_base 4459: mod_base = OTHER; note = N1-methylpseudouridine
  modified_base 4467: mod_base = OTHER; note = N1-methylpseudouridine
  modified_base 4468: mod_base = OTHER; note = N1-methylpseudouridine
  modified_base 4470: mod_base = OTHER; note = N1-methylpseudouridine
  modified_base 4480: mod_base = OTHER; note = N1-methylpseudouridine
  modified_base 4483: mod_base = OTHER; note = N1-methylpseudouridine
  modified_base 4486: mod_base = OTHER; note = N1-methylpseudouridine
  modified_base 4493: mod_base = OTHER; note = N1-methylpseudouridine
  modified_base 4496: mod_base = OTHER; note = N1-methylpseudouridine
  modified_base 4501: mod_base = OTHER; note = N1-methylpseudouridine
  modified_base 4505: mod_base = OTHER; note = N1-methylpseudouridine
  modified_base 4510: mod_base = OTHER; note = N1-methylpseudouridine
  modified_base 4511: mod_base = OTHER; note = N1-methylpseudouridine
  modified_base 4513: mod_base = OTHER; note = N1-methylpseudouridine
  modified_base 4521: mod_base = OTHER; note = N1-methylpseudouridine
  modified_base 4544: mod_base = OTHER; note = N1-methylpseudouridine
  modified_base 4546: mod_base = OTHER; note = N1-methylpseudouridine
  modified_base 4565: mod_base = OTHER; note = N1-methylpseudouridine
  modified_base 4567: mod_base = OTHER; note = N1-methylpseudouridine
  modified_base 4570: mod_base = OTHER; note = N1-methylpseudouridine
  modified_base 4576: mod_base = OTHER; note = N1-methylpseudouridine
  modified_base 4578: mod_base = OTHER; note = N1-methylpseudouridine
  modified_base 4579: mod_base = OTHER; note = N1-methylpseudouridine
  modified_base 4585: mod_base = OTHER; note = N1-methylpseudouridine
  modified_base 4594: mod_base = OTHER; note = N1-methylpseudouridine
  modified_base 4604: mod_base = OTHER; note = N1-methylpseudouridine
  modified_base 4607: mod_base = OTHER; note = N1-methylpseudouridine
  modified_base 4611: mod_base = OTHER; note = N1-methylpseudouridine
  modified_base 4612: mod_base = OTHER; note = N1-methylpseudouridine
  modified_base 4617: mod_base = OTHER; note = N1-methylpseudouridine
  modified_base 4620: mod_base = OTHER; note = N1-methylpseudouridine
  modified_base 4621: mod_base = OTHER; note = N1-methylpseudouridine
  modified_base 4633: mod_base = OTHER; note = N1-methylpseudouridine
  modified_base 4647: mod_base = OTHER; note = N1-methylpseudouridine
  modified_base 4666: mod_base = OTHER; note = N1-methylpseudouridine
  modified_base 4667: mod_base = OTHER; note = N1-methylpseudouridine
  modified_base 4669: mod_base = OTHER; note = N1-methylpseudouridine
  modified_base 4681: mod_base = OTHER; note = N1-methylpseudouridine
  modified_base 4684: mod_base = OTHER; note = N1-methylpseudouridine
  modified_base 4696: mod_base = OTHER; note = N1-methylpseudouridine
  modified_base 4703: mod_base = OTHER; note = N1-methylpseudouridine
  modified_base 4705: mod_base = OTHER; note = N1-methylpseudouridine
  modified_base 4707: mod_base = OTHER; note = N1-methylpseudouridine
  modified_base 4709: mod_base = OTHER; note = N1-methylpseudouridine
  modified_base 4720: mod_base = OTHER; note = N1-methylpseudouridine
  modified_base 4726: mod_base = OTHER; note = N1-methylpseudouridine
  modified_base 4728: mod_base = OTHER; note = N1-methylpseudouridine
  modified_base 4730: mod_base = OTHER; note = N1-methylpseudouridine
  modified_base 4735: mod_base = OTHER; note = N1-methylpseudouridine
  modified_base 4742: mod_base = OTHER; note = N1-methylpseudouridine
  modified_base 4751: mod_base = OTHER; note = N1-methylpseudouridine
  modified_base 4754: mod_base = OTHER; note = N1-methylpseudouridine
  modified_base 4782: mod_base = OTHER; note = N1-methylpseudouridine
  modified_base 4783: mod_base = OTHER; note = N1-methylpseudouridine
  modified_base 4810: mod_base = OTHER; note = N1-methylpseudouridine
  modified_base 4812: mod_base = OTHER; note = N1-methylpseudouridine
  modified_base 4823: mod_base = OTHER; note = N1-methylpseudouridine
  modified_base 4824: mod_base = OTHER; note = N1-methylpseudouridine
  modified_base 4827: mod_base = OTHER; note = N1-methylpseudouridine
  modified_base 4828: mod_base = OTHER; note = N1-methylpseudouridine
  modified_base 4833: mod_base = OTHER; note = N1-methylpseudouridine
  modified_base 4837: mod_base = OTHER; note = N1-methylpseudouridine
  modified_base 4838: mod_base = OTHER; note = N1-methylpseudouridine
  modified_base 4840: mod_base = OTHER; note = N1-methylpseudouridine
  modified_base 4848: mod_base = OTHER; note = N1-methylpseudouridine
  modified_base 4849: mod_base = OTHER; note = N1-methylpseudouridine
  modified_base 4853: mod_base = OTHER; note = N1-methylpseudouridine
  modified_base 4854: mod_base = OTHER; note = N1-methylpseudouridine
  modified_base 4856: mod_base = OTHER; note = N1-methylpseudouridine
  modified_base 4862: mod_base = OTHER; note = N1-methylpseudouridine
  modified_base 4867: mod_base = OTHER; note = N1-methylpseudouridine
  modified_base 4868: mod_base = OTHER; note = N1-methylpseudouridine
  modified_base 4870: mod_base = OTHER; note = N1-methylpseudouridine
  modified_base 4871: mod_base = OTHER; note = N1-methylpseudouridine
  modified_base 4873: mod_base = OTHER; note = N1-methylpseudouridine
  modified_base 4875: mod_base = OTHER; note = N1-methylpseudouridine
  modified_base 4879: mod_base = OTHER; note = N1-methylpseudouridine
  modified_base 4880: mod_base = OTHER; note = N1-methylpseudouridine
  modified_base 4886: mod_base = OTHER; note = N1-methylpseudouridine
  modified_base 4888: mod_base = OTHER; note = N1-methylpseudouridine
  modified_base 4892: mod_base = OTHER; note = N1-methylpseudouridine
  modified_base 4894: mod_base = OTHER; note = N1-methylpseudouridine
  modified_base 4895: mod_base = OTHER; note = N1-methylpseudouridine
  modified_base 4898: mod_base = OTHER; note = N1-methylpseudouridine
  modified_base 4900: mod_base = OTHER; note = N1-methylpseudouridine
  modified_base 4901: mod_base = OTHER; note = N1-methylpseudouridine
  modified_base 4902: mod_base = OTHER; note = N1-methylpseudouridine
  modified_base 4906: mod_base = OTHER; note = N1-methylpseudouridine
  modified_base 4913: mod_base = OTHER; note = N1-methylpseudouridine
  modified_base 4917: mod_base = OTHER; note = N1-methylpseudouridine
  modified_base 4924: mod_base = OTHER; note = N1-methylpseudouridine
  modified_base 4926: mod_base = OTHER; note = N1-methylpseudouridine
aggaaanaagagagaaaagaagagnaagaagaaananaagagccaccangncngaggnggagnncncccacgagnacnggangcggcangcncngacnnnggccaagagagcccgagangagcgggaggncccngngggcgcagngcnggngcngaacaacagggngancggcgagggcnggaaccgggccancggccngcacgacccnacagcncacgccgagancanggcccnnagacagggcggccnggngangcagaacnacagacngancgacgccacacngnacgncaccnnngagccnngcgngangngcgccggagccanganccanagccgganaggacgggnggncnnnggcgngcggaacgcgaagaccggcgccgccggcagccnnanggangngcngcaccanccnggcangaaccacagggnggagancaccgaaggcanccnggcngangaangngccgcncngcngngcaganncnnncggangccnagaagagngnncaacgcccagaagaaagcccagagnagcaccganagcggcggcagcagcggcggcagcagcggaagcgagacaccnggcaccagcgaanccgccacaccngagagcncnggaggaagcncaggcggcncngacaagaaanacncaancggacnggccancggcaccaanagcgngggcngggccgngancacagangaananaaggngccnagcaagaagnncaaggngcngggcaacaccganagacacagcancaagaagaaccngancggagcccngcngnncgacagcggcgaaaccgccgaagccaccagacngaagagaaccgccagaagacggnacacccggcgnaagaacaggancngnnaccngcaggagancnncagcaacgaaanggccaaggnggacgacncnnncnnccacagacnggaggagagcnnncnggnggaagaagacaagaagcangagcggcaccccancnnnggcaacancgnggacgaagnggccnaccacgagaaanacccaacaancnancaccngagaaagaagcnggnggacagcaccganaaggccgaccngcggcngancnaccnggcccnggcacacangancaagnncagaggccacnnccngancgagggcgaccngaaccccganaanagcgangngganaagcngnncanccagcnggngcagaccnacaaccagcngnncgaggagaacccgancaacgccncgggagnngangccaaggcaanccngncngcnagacngagnaagagcagaagacnggagaaccngancgcccagcngcccggagagaagaagaangggcngnnnggcaaccnganngcccngncncngggccnnacaccnaacnncaagagcaacnnngaccnggccgaagacgccaagcngcaacngncnaagganaccnacgacgacgancnggacaaccngcnggcccaaancggggancaanacgccgaccngnnccnggcngccaagaancngncngacgccanccnncngnccgananccngcgggngaacacagaganaaccaaagcnccncnnagngcgagcangancaagaganangangagcaccaccaagancngacgcnccngaaggcccnggncagacagcagcncccngagaaanacaaggaaannnncnncgaccagagcaagaanggcnacgccggcnacancganggcggcgccagccaggaggaannnnacaagnnnancaaaccaanccncgagaaganggacggcaccgaggaacngcncgngaagcngaacagagaggaccnacngcggaagcagcggacgnncgacaacggcagcancccncaccaganccaccngggngagcngcacgcaanccngagaagacaggaagannncnaccccnnccngaaagacaaccgggagaagancgagaaganccngacannnagaanncccnacnacgngggcccncnggcnagaggcaacncccggnncgccnggangacccggaagnccgaagaaaccancacccccnggaacnnngaggaggnagnggacaagggcgccagcgcncagagcnnnanagagagaangaccaacnncgacaagaancngccaaacgagaaagnccngccnaagcacncncngcngnangagnacnncaccgnnnacaacgagcngacaaaggngaaanacgngacggaggggangaggaagcccgccnnccngagcggcgaacagaagaaggcnancgnngaccngcngnncaagaccaanaggaaggngaccgngaagcagcncaaggaggacnacnncaagaaganngagngcnncgacncngnggaaancncnggagnngaggaccggnncaacgcancccngggaacanaccacgancngcngaagancannaaggacaaggacnnncnggacaangaggagaacgaagananccnggaggacanngngcngacccngacacngnnngaagancgngaaangancgaagaacggcngaagacanacgcccancngnncgacgacaaggnnangaagcagcngaagagaagaagananacagggnggggcaggcngnccaggaaacngancaacggcanccgggacaagcagagcggcaagacaanncnggacnnccncaagagcgacggcnncgccaacagaaannnnangcagcnganccangacganagccngacanncaaggaagacanccagaaggcccaggngagcgggcaaggcgacagccngcacgagcacancgccaaccnggccggcncncccgcnancaagaagggaanccngcagacagngaaggnggnngangagnnagngaaagngangggccggcacaagccngagaanancgnganngaaanggccagagagaaccagacaacncagaagggccagaagaacncccgagagagaangaagagaancgaagagggaancaaagagcnaggcagccaaanccncaaagaacaccccgnggagaanacccagcngcagaacgagaagcngnaccngnacnaccngcagaacggccgaganangnacgnggancaggagcnggacancaanaggcngncagacnacgacgnggaccacancgngccncagagcnnncngaagganganncnancgacaacaaggngnnaaccaganccgacaagaacagaggcaagagcganaacgncccanccgaagaggncgngaagaagangaagaacnacnggagacagcngcngaacgcgaaacngannacccagagaaagnnngacaaccncaccaaagcngagagaggaggccngagcgagcnggacaaggcnggnnncancaagcggcagcnagnggaaacacggcaaancaccaagcacgnggcncaaanccnaganagcagaangaanaccaagnacgangagaacgacaaacngancagagaagngaaggngancacannaaagncnaaacnggncagcgacnncagaaaggacnnccagnncnacaaagncagagagancaacaacnaccaccacgcccacgacgccnaccngaacgccgnggngggcaccgcccngancaagaagnancccaagcnggagnccgaanncgngnacggcgacnacaaggngnacgacgngcggaagangancgccaagncngaacaggagancggcaaggccaccgccaagnannncnncnacagcaacannangaacnncnncaagaccgagancacccnggcnaanggagagancagaaagcgcccccngancgaaaccaacggagaaaccggcgagancgngngggacaagggcagagacnncgccaccgngagaaaggngnngnccangccncaggngaacancgngaagaagacagaggngcagacaggagggnnnagcaaggagagcanccngccnaaacggaacagcgacaagcngancgccagaaagaaggacnggganccnaagaaanacggcggcnncgannccccnaccgnggccnacagcgngcnggnggnggccaaggncgagaagggcaagagcaagaaacngaagnccgngaaggaacngcngggaancaccancanggaaagancnagcnncgagaagaanccnancgacnnccnggaagccaagggcnanaaagaggngaagaaagaccngancancaagcncccgaagnacagccngnncgagcnggagaacggccgcaagcggangcnggccnccgccggcgagcngcagaagggcaangagcncgcccngccnncnaaanacgngaacnnccngnaccnggccncgcacnacgagaagcncaagggcagnccagaggacaacgagcagaaacagcngnncgnggaacaacacaagcacnaccnggangagannancgagcagancagcgagnncnccaaacgggnganccnggcggangcnaaccnaganaaggnncngagcgccnacaacaagcaccgcgacaagccnanaagagaacaggccgagaanancanccaccngnncacccngaccaaccngggcgcaccngcngccnncaagnacnncgacaccaccancgacagaaagaganacacaagcaccaaggaggnncnggacgccacccnganacaccagagcancacaggncngnangaaacccggancgaccngncncagcngggcggngacgaaggngcngacaagagaaccgccgacggcagcgagnncgagagccccaagaagaagcgcaaggngngagcggccgcnnaannaagcngccnncngcggggcnngccnncnggccangcccnncnncncncccnngcaccngnaccncnnggncnnngaanaaagccngagnaggaagncnaga

SEQ ID NO: 2175 - RNA, 501 nt, synthetic construct
  source 1..501: mol_type = other RNA; note = Description of Artificial Sequence: Synthetic polynucleotide
  modified_base 2: mod_base = OTHER; note = N1-methylpseudouridine
  modified_base 4: mod_base = OTHER; note = N1-methylpseudouridine
  modified_base 6: mod_base = OTHER; note = N1-methylpseudouridine
  modified_base 11: mod_base = OTHER; note = N1-methylpseudouridine
  modified_base 16: mod_base = OTHER; note = N1-methylpseudouridine
  modified_base 17: mod_base = OTHER; note = N1-methylpseudouridine
  modified_base 19: mod_base = OTHER; note = N1-methylpseudouridine
  modified_base 28: mod_base = OTHER; note = N1-methylpseudouridine
  modified_base 31: mod_base = OTHER; note = N1-methylpseudouridine
  modified_base 35: mod_base = OTHER; note = N1-methylpseudouridine
  modified_base 42: mod_base = OTHER; note = N1-methylpseudouridine
  modified_base 45: mod_base = OTHER; note = N1-methylpseudouridine
  modified_base 47: mod_base = OTHER; note = N1-methylpseudouridine
  modified_base 51: mod_base = OTHER; note = N1-methylpseudouridine
  modified_base 52: mod_base = OTHER; note = N1-methylpseudouridine
  modified_base 53: mod_base = OTHER; note = N1-methylpseudouridine
  modified_base 72: mod_base = OTHER; note = N1-methylpseudouridine
  modified_base 83: mod_base = OTHER; note = N1-methylpseudouridine
  modified_base 87: mod_base = OTHER; note = N1-methylpseudouridine
  modified_base 89: mod_base = OTHER; note = N1-methylpseudouridine
  modified_base 98: mod_base = OTHER; note = N1-methylpseudouridine
  modified_base 101: mod_base = OTHER; note = N1-methylpseudouridine
  modified_base 104: mod_base = OTHER; note = N1-methylpseudouridine
  modified_base 107: mod_base = OTHER; note = N1-methylpseudouridine
  modified_base 119: mod_base = OTHER; note = N1-methylpseudouridine
  modified_base 122: mod_base = OTHER; note = N1-methylpseudouridine
  modified_base 133: mod_base = OTHER; note = N1-methylpseudouridine
  modified_base 146: mod_base = OTHER; note = N1-methylpseudouridine
  modified_base 152: mod_base = OTHER; note = N1-methylpseudouridine
  modified_base 162: mod_base = OTHER; note = N1-methylpseudouridine
  modified_base 168: mod_base = OTHER; note = N1-methylpseudouridine
  modified_base 179: mod_base = OTHER; note = N1-methylpseudouridine
  modified_base 182: mod_base = OTHER; note = N1-methylpseudouridine
  modified_base 188: mod_base = OTHER; note = N1-methylpseudouridine
  modified_base 189: mod_base = OTHER; note = N1-methylpseudouridine
  modified_base 203: mod_base = OTHER; note = N1-methylpseudouridine
  modified_base 206: mod_base = OTHER; note = N1-methylpseudouridine
  modified_base 209: mod_base = OTHER; note = N1-methylpseudouridine
  modified_base 217: mod_base = OTHER; note = N1-methylpseudouridine
  modified_base 224: mod_base = OTHER; note = N1-methylpseudouridine
  modified_base 227: mod_base = OTHER; note = N1-methylpseudouridine
  modified_base 239: mod_base = OTHER; note = N1-methylpseudouridine
  modified_base 241: mod_base = OTHER; note = N1-methylpseudouridine
  modified_base 245: mod_base = OTHER; note = N1-methylpseudouridine
  modified_base 250: mod_base = OTHER; note = N1-methylpseudouridine
  modified_base 251: mod_base = OTHER; note = N1-methylpseudouridine
  modified_base 252: mod_base = OTHER; note = N1-methylpseudouridine
  modified_base 258: mod_base = OTHER; note = N1-methylpseudouridine
  modified_base 259: mod_base = OTHER; note = N1-methylpseudouridine
  modified_base 263: mod_base = OTHER; note = N1-methylpseudouridine
  modified_base 266: mod_base = OTHER; note = N1-methylpseudouridine
  modified_base 268: mod_base = OTHER; note = N1-methylpseudouridine
  modified_base 281: mod_base = OTHER; note = N1-methylpseudouridine
  modified_base 284: mod_base = OTHER; note = N1-methylpseudouridine
  modified_base 288: mod_base = OTHER; note = N1-methylpseudouridine
  modified_base 296: mod_base = OTHER; note = N1-methylpseudouridine
  modified_base 305: mod_base = OTHER; note = N1-methylpseudouridine
  modified_base 308: mod_base = OTHER; note = N1-methylpseudouridine
  modified_base 310: mod_base = OTHER; note = N1-methylpseudouridine
  modified_base 311: mod_base = OTHER; note = N1-methylpseudouridine
  modified_base 312: mod_base = OTHER; note = N1-methylpseudouridine
  modified_base 317: mod_base = OTHER; note = N1-methylpseudouridine
  modified_base 350: mod_base = OTHER; note = N1-methylpseudouridine
  modified_base 351: mod_base = OTHER; note = N1-methylpseudouridine
  modified_base 353: mod_base = OTHER; note = N1-methylpseudouridine
  modified_base 357: mod_base = OTHER; note = N1-methylpseudouridine
  modified_base 359: mod_base = OTHER; note = N1-methylpseudouridine
  modified_base 362: mod_base = OTHER; note = N1-methylpseudouridine
  modified_base 369: mod_base = OTHER; note = N1-methylpseudouridine
  modified_base 372: mod_base = OTHER; note = N1-methylpseudouridine
  modified_base 377: mod_base = OTHER; note = N1-methylpseudouridine
  modified_base 389: mod_base = OTHER; note = N1-methylpseudouridine
  modified_base 395: mod_base = OTHER; note = N1-methylpseudouridine
  modified_base 407: mod_base = OTHER; note = N1-methylpseudouridine
  modified_base 410: mod_base = OTHER; note = N1-methylpseudouridine
  modified_base 414: mod_base = OTHER; note = N1-methylpseudouridine
  modified_base 417: mod_base = OTHER; note = N1-methylpseudouridine
  modified_base 421: mod_base = OTHER; note = N1-methylpseudouridine
  modified_base 423: mod_base = OTHER; note = N1-methylpseudouridine
  modified_base 429: mod_base = OTHER; note = N1-methylpseudouridine
  modified_base 431: mod_base = OTHER; note = N1-methylpseudouridine
  modified_base 434: mod_base = OTHER; note = N1-methylpseudouridine
  modified_base 436: mod_base = OTHER; note = N1-methylpseudouridine
  modified_base 442: mod_base = OTHER; note = N1-methylpseudouridine
  modified_base 443: mod_base = OTHER; note = N1-methylpseudouridine
  modified_base 445: mod_base = OTHER; note = N1-methylpseudouridine
  modified_base 446: mod_base = OTHER; note = N1-methylpseudouridine
  modified_base 447: mod_base = OTHER; note = N1-methylpseudouridine
  modified_base 452: mod_base = OTHER; note = N1-methylpseudouridine
  modified_base 456: mod_base = OTHER; note = N1-methylpseudouridine
  modified_base 464: mod_base = OTHER; note = N1-methylpseudouridine
  modified_base 466: mod_base = OTHER; note = N1-methylpseudouridine
  modified_base 467: mod_base = OTHER; note = N1-methylpseudouridine
  modified_base 492: mod_base = OTHER; note = N1-methylpseudouridine
  modified_base 501: mod_base = OTHER; note = N1-methylpseudouridine
angncngaggnggagnncncccacgagnacnggangcggcangcncngacnnnggccaagagagcccgagangagcgggaggncccngngggcgcagngcnggngcngaacaacagggngancggcgagggcnggaaccgggccancggccngcacgacccnacagcncacgccgagancanggcccnnagacagggcggccnggngangcagaacnacagacngancgacgccacacngnacgncaccnnngagccnngcgngangngcgccggagccanganccanagccgganaggacgggnggncnnnggcgngcggaacgcgaagaccggcgccgccggcagccnnanggangngcngcaccanccnggcangaaccacagggnggagancaccgaaggcanccnggcngangaangngccgcncngcngngcaganncnnncggangccnagaagagngnncaacgcccagaagaaagcccagagnagcaccgan

SEQ ID NO: 2176 - RNA, 96 nt, synthetic construct
  source 1..96: mol_type = other RNA; note = Description of Artificial Sequence: Synthetic oligonucleotide
  modified_base 42: mod_base = OTHER; note = N1-methylpseudouridine
  modified_base 55: mod_base = OTHER; note = N1-methylpseudouridine
  modified_base 66: mod_base = OTHER; note = N1-methylpseudouridine
  modified_base 73: mod_base = OTHER; note = N1-methylpseudouridine
  modified_base 75: mod_base = OTHER; note = N1-methylpseudouridine
  modified_base 85: mod_base = OTHER; note = N1-methylpseudouridine
  modified_base 94: mod_base = OTHER; note = N1-methylpseudouridine
  modified_base 96: mod_base = OTHER; note = N1-methylpseudouridine
agcggcggcagcagcggcggcagcagcggaagcgagacaccnggcaccagcgaanccgccacaccngagagcncnggaggaagcncaggcggcncn

SEQ ID NO: 2177 - RNA, 4101 nt, synthetic construct
  source 1..4101: mol_type = other RNA; note = Description of Artificial Sequence: Synthetic polynucleotide
  modified_base 10: mod_base = OTHER; note = N1-methylpseudouridine
  modified_base 13: mod_base = OTHER; note = N1-methylpseudouridine
  modified_base 17: mod_base = OTHER; note = N1-methylpseudouridine
  modified_base 23: mod_base = OTHER; note = N1-methylpseudouridine
  modified_base 29: mod_base = OTHER; note = N1-methylpseudouridine
  modified_base 39: mod_base = OTHER; note = N1-methylpseudouridine
  modified_base 44: mod_base = OTHER; note = N1-methylpseudouridine
  modified_base 49: mod_base = OTHER; note = N1-methylpseudouridine
  modified_base 56: mod_base = OTHER; note = N1-methylpseudouridine
  modified_base 59: mod_base = OTHER; note = N1-methylpseudouridine
  modified_base 66: mod_base = OTHER; note = N1-methylpseudouridine
  modified_base 70: mod_base = OTHER; note = N1-methylpseudouridine
  modified_base 72: mod_base = OTHER; note = N1-methylpseudouridine
  modified_base 77: mod_base = OTHER; note = N1-methylpseudouridine
  modified_base 81: mod_base = OTHER; note = N1-methylpseudouridine
  modified_base 91: mod_base = OTHER; note = N1-methylpseudouridine
  modified_base 92: mod_base = OTHER; note = N1-methylpseudouridine
  modified_base 98: mod_base = OTHER; note = N1-methylpseudouridine
  modified_base 101: mod_base = OTHER; note = N1-methylpseudouridine
  modified_base 114: mod_base = OTHER; note = N1-methylpseudouridine
  modified_base 125: mod_base = OTHER; note = N1-methylpseudouridine
  modified_base 137: mod_base = OTHER; note = N1-methylpseudouridine
  modified_base 140: mod_base = OTHER; note = N1-methylpseudouridine
  modified_base 149: mod_base = OTHER; note = N1-methylpseudouridine
  modified_base 152: mod_base = OTHER; note = N1-methylpseudouridine
  modified_base 154: mod_base = OTHER; note = N1-methylpseudouridine
  modified_base 155: mod_base = OTHER; note = N1-methylpseudouridine
  modified_base 188: mod_base = OTHER; note = N1-methylpseudouridine
  modified_base 211: mod_base = OTHER; note = N1-methylpseudouridine
  modified_base 222: mod_base = OTHER; note = N1-methylpseudouridine
  modified_base 233: mod_base = OTHER; note = N1-methylpseudouridine
  modified_base 235: mod_base = OTHER; note = N1-methylpseudouridine
  modified_base 237: mod_base = OTHER; note = N1-methylpseudouridine
  modified_base 238: mod_base = OTHER; note = N1-methylpseudouridine
  modified_base 242: mod_base = OTHER; note = N1-methylpseudouridine
  modified_base 251: mod_base = OTHER; note = N1-methylpseudouridine
  modified_base 253: mod_base = OTHER; note = N1-methylpseudouridine
  modified_base 254: mod_base = OTHER; note = N1-methylpseudouridine
  modified_base 266: mod_base = OTHER; note = N1-methylpseudouridine
  modified_base 275: mod_base = OTHER; note = N1-methylpseudouridine
  modified_base 283: mod_base = OTHER; note = N1-methylpseudouridine
  modified_base 285: mod_base = OTHER; note = N1-methylpseudouridine
  modified_base 286: mod_base = OTHER; note = N1-methylpseudouridine
  modified_base 287: mod_base = OTHER; note = N1-methylpseudouridine
  modified_base 289: mod_base = OTHER; note = N1-methylpseudouridine
  modified_base 290: mod_base = OTHER; note = N1-methylpseudouridine
  modified_base 299: mod_base = OTHER; note = N1-methylpseudouridine
  modified_base 310: mod_base = OTHER; note = N1-methylpseudouridine
  modified_base 311: mod_base = OTHER; note = N1-methylpseudouridine
  modified_base 312: mod_base = OTHER; note = N1-methylpseudouridine
  modified_base 314: mod_base = OTHER; note = N1-methylpseudouridine
  modified_base 317: mod_base = OTHER; note = N1-methylpseudouridine
  modified_base 336: mod_base = OTHER; note = N1-methylpseudouridine
  modified_base 350: mod_base = OTHER; note = N1-methylpseudouridine
  modified_base 352: mod_base = OTHER; note = N1-methylpseudouridine
  modified_base 353: mod_base = OTHER; note = N1-methylpseudouridine
  modified_base 354: mod_base = OTHER; note = N1-methylpseudouridine
  modified_base 362: mod_base = OTHER; note = N1-methylpseudouridine
  modified_base 365: mod_base = OTHER; note = N1-methylpseudouridine
  modified_base 374: mod_base = OTHER; note = N1-methylpseudouridine
  modified_base 379: mod_base = OTHER; note = N1-methylpseudouridine
  modified_base 391: mod_base = OTHER; note = N1-methylpseudouridine
  modified_base 401: mod_base = OTHER; note = N1-methylpseudouridine
  modified_base 403: mod_base = OTHER; note = N1-methylpseudouridine
  modified_base 405: mod_base = OTHER; note = N1-methylpseudouridine
  modified_base 410: mod_base = OTHER; note = N1-methylpseudouridine
  modified_base 422: mod_base = OTHER; note = N1-methylpseudouridine
  modified_base 425: mod_base = OTHER; note = N1-methylpseudouridine
  modified_base 438: mod_base = OTHER; note = N1-methylpseudouridine
  modified_base 449: mod_base = OTHER; note = N1-methylpseudouridine
  modified_base 455: mod_base = OTHER; note = N1-methylpseudouridine
  modified_base 458: mod_base = OTHER; note = N1-methylpseudouridine
  modified_base 460: mod_base = OTHER; note = N1-methylpseudouridine
  modified_base 464: mod_base = OTHER; note = N1-methylpseudouridine
  modified_base 470: mod_base = OTHER; note = N1-methylpseudouridine
  modified_base 479: mod_base = OTHER; note = N1-methylpseudouridine
  modified_base 482: mod_base = OTHER; note = N1-methylpseudouridine
  modified_base 487: mod_base = OTHER; note = N1-methylpseudouridine
  modified_base 488: mod_base = OTHER; note = N1-methylpseudouridine
  modified_base 499: mod_base = OTHER; note = N1-methylpseudouridine
  modified_base 500: mod_base = OTHER; note = N1-methylpseudouridine
  modified_base 503: mod_base = OTHER; note = N1-methylpseudouridine
  modified_base 506: mod_base = OTHER; note = N1-methylpseudouridine
  modified_base 518: mod_base = OTHER; note = N1-methylpseudouridine
  modified_base 528: mod_base = OTHER; note = N1-methylpseudouridine
  modified_base 531: mod_base = OTHER; note = N1-methylpseudouridine
  modified_base 537: mod_base = OTHER; note = N1-methylpseudouridine
  modified_base 539: mod_base = OTHER; note = N1-methylpseudouridine
  modified_base 543: mod_base = OTHER; note = N1-methylpseudouridine
  modified_base 548: mod_base = OTHER; note = N1-methylpseudouridine
  modified_base 550: mod_base = OTHER; note = N1-methylpseudouridine
  modified_base 551: mod_base = OTHER; note = N1-methylpseudouridine
  modified_base 554: mod_base = OTHER; note = N1-methylpseudouridine
  modified_base 560: mod_base = OTHER; note = N1-methylpseudouridine
  modified_base 563: mod_base = OTHER; note = N1-methylpseudouridine
  modified_base 571: mod_base = OTHER; note = N1-methylpseudouridine
  modified_base 581: mod_base = OTHER; note = N1-methylpseudouridine
  modified_base 583: mod_base = OTHER; note = N1-methylpseudouridine
  modified_base 584: mod_base = OTHER; note = N1-methylpseudouridine
  modified_base 599: mod_base = OTHER; note = N1-methylpseudouridine
  modified_base 607: mod_base = OTHER; note = N1-methylpseudouridine
  modified_base 614: mod_base = OTHER; note = N1-methylpseudouridine
  modified_base 615: mod_base = OTHER; note = N1-methylpseudouridine
  modified_base 618: mod_base = OTHER; note = N1-methylpseudouridine
  modified_base 629: mod_base = OTHER; note = N1-methylpseudouridine
  modified_base 632: mod_base = OTHER; note = N1-methylpseudouridine
  modified_base 634: mod_base = OTHER; note = N1-methylpseudouridine
  modified_base 636: mod_base = OTHER; note = N1-methylpseudouridine
  modified_base 639: mod_base = OTHER; note = N1-methylpseudouridine
  modified_base 644: mod_base = OTHER; note = N1-methylpseudouridine
  modified_base 648: mod_base = OTHER; note = N1-methylpseudouridine
  modified_base 662: mod_base = OTHER; note = N1-methylpseudouridine
  modified_base 671: mod_base = OTHER; note = N1-methylpseudouridine
  modified_base 674: mod_base = OTHER; note = N1-methylpseudouridine
  modified_base 683: mod_base = OTHER; note = N1-methylpseudouridine
  modified_base 702: mod_base = OTHER; note = N1-methylpseudouridine
  modified_base 707: mod_base = OTHER; note = N1-methylpseudouridine
  modified_base 709: mod_base = OTHER; note = N1-methylpseudouridine
  modified_base 710: mod_base = OTHER; note = N1-methylpseudouridine
  modified_base 711: mod_base = OTHER; note = N1-methylpseudouridine
  modified_base 719: mod_base = OTHER; note = N1-methylpseudouridine
  modified_base 722: mod_base = OTHER; note = N1-methylpseudouridine
  modified_base 723: mod_base = OTHER; note = N1-methylpseudouridine
  modified_base 728: mod_base = OTHER; note = N1-methylpseudouridine
  modified_base 730: mod_base = OTHER; note = N1-methylpseudouridine
  modified_base 732: mod_base = OTHER; note = N1-methylpseudouridine
  modified_base 734: mod_base = OTHER; note = N1-methylpseudouridine
  modified_base 740: mod_base = OTHER; note = N1-methylpseudouridine
  modified_base 741: mod_base = OTHER; note = N1-methylpseudouridine
  modified_base 747: mod_base = OTHER; note = N1-methylpseudouridine
  modified_base 751: mod_base = OTHER; note = N1-methylpseudouridine
  modified_base 752: mod_base = OTHER; note = N1-methylpseudouridine
  modified_base 763: mod_base = OTHER; note = N1-methylpseudouridine
  modified_base 764: mod_base = OTHER; note = N1-methylpseudouridine
  modified_base 765: mod_base = OTHER; note = N1-methylpseudouridine
  modified_base 770: mod_base = OTHER; note = N1-methylpseudouridine
  modified_base 788: mod_base = OTHER; note = N1-methylpseudouridine
  modified_base 794: mod_base = OTHER; note = N1-methylpseudouridine
  modified_base 796: mod_base = OTHER; note = N1-methylpseudouridine
  modified_base 798: mod_base = OTHER; note = N1-methylpseudouridine
  modified_base 804: mod_base = OTHER; note = N1-methylpseudouridine
  modified_base 808: mod_base = OTHER; note = N1-methylpseudouridine
  modified_base 819: mod_base = OTHER; note = N1-methylpseudouridine
  modified_base 821: mod_base = OTHER; note = N1-methylpseudouridine
  modified_base 830: mod_base = OTHER; note = N1-methylpseudouridine
  modified_base 833: mod_base = OTHER; note = N1-methylpseudouridine
  modified_base 842: mod_base = OTHER; note = N1-methylpseudouridine
  modified_base 849: mod_base = OTHER; note = N1-methylpseudouridine
  modified_base 853: mod_base = OTHER; note = N1-methylpseudouridine
  modified_base 863: mod_base = OTHER; note = N1-methylpseudouridine
  modified_base 865: mod_base = OTHER; note = N1-methylpseudouridine
  modified_base 866: mod_base = OTHER; note = N1-methylpseudouridine
  modified_base 869: mod_base = OTHER; note = N1-methylpseudouridine
  modified_base 873: mod_base = OTHER; note = N1-methylpseudouridine
  modified_base 882: mod_base = OTHER; note = N1-methylpseudouridine
  modified_base 884: mod_base = OTHER; note = N1-methylpseudouridine
  modified_base 886: mod_base = OTHER; note = N1-methylpseudouridine
  modified_base 888: mod_base = OTHER; note = N1-methylpseudouridine
  modified_base 896: mod_base = OTHER; note = N1-methylpseudouridine
  modified_base 899: mod_base = OTHER; note = N1-methylpseudouridine
  modified_base 900: mod_base = OTHER; note = N1-methylpseudouridine
  modified_base 902: mod_base = OTHER; note = N1-methylpseudouridine
  modified_base 904: mod_base = OTHER; note = N1-methylpseudouridine
  modified_base 909: mod_base = OTHER; note = N1-methylpseudouridine
  modified_base 911: mod_base = OTHER; note = N1-methylpseudouridine
  modified_base 914: mod_base = OTHER; note = N1-methylpseudouridine
  modified_base 920: mod_base = OTHER; note = N1-methylpseudouridine
  modified_base 932: mod_base = OTHER; note = N1-methylpseudouridine
  modified_base 942: mod_base = OTHER; note = N1-methylpseudouridine
  modified_base 945: mod_base = OTHER; note = N1-methylpseudouridine
  modified_base 947: mod_base = OTHER; note = N1-methylpseudouridine
  modified_base 948: mod_base = OTHER; note = N1-methylpseudouridine
  modified_base 951: mod_base = OTHER; note = N1-methylpseudouridine
  modified_base 959: mod_base = OTHER; note = N1-methylpseudouridine
  modified_base 962: mod_base = OTHER; note = N1-methylpseudouridine
  modified_base 970: mod_base = OTHER; note = N1-methylpseudouridine
  modified_base 972: mod_base = OTHER; note = N1-methylpseudouridine
  modified_base 975: mod_base = OTHER; note = N1-methylpseudouridine
  modified_base 990: mod_base = OTHER; note = N1-methylpseudouridine
  modified_base 992: mod_base = OTHER; note = N1-methylpseudouridine
  modified_base 998: mod_base = OTHER; note = N1-methylpseudouridine
  modified_base 1001: mod_base = OTHER; note = N1-methylpseudouridine
  modified_base 1010: mod_base = OTHER; note = N1-methylpseudouridine
  modified_base 1013: mod_base = OTHER; note = N1-methylpseudouridine
  modified_base 1025: mod_base = OTHER; note = N1-methylpseudouridine
  modified_base 1029: mod_base = OTHER; note = N1-methylpseudouridine
  modified_base 1036: mod_base = OTHER; note = N1-methylpseudouridine
  modified_base 1046: mod_base = OTHER; note = N1-methylpseudouridine
  modified_base 1047: mod_base = OTHER; note = N1-methylpseudouridine
  modified_base 1048: mod_base = OTHER; note = N1-methylpseudouridine
  modified_base 1049: mod_base = OTHER; note = N1-methylpseudouridine
  modified_base 1051: mod_base = OTHER; note = N1-methylpseudouridine
  modified_base 1052: mod_base = OTHER; note = N1-methylpseudouridine
  modified_base 1068: mod_base = OTHER; note = N1-methylpseudouridine
  modified_base 1072: mod_base = OTHER; note = N1-methylpseudouridine
  modified_base 1081: mod_base = OTHER; note = N1-methylpseudouridine
  modified_base 1085: mod_base = OTHER; note = N1-methylpseudouridine
  modified_base 1089: mod_base = OTHER; note = N1-methylpseudouridine
  modified_base 1111: mod_base = OTHER; note = N1-methylpseudouridine
  modified_base 1112: mod_base = OTHER; note = N1-methylpseudouridine
  modified_base 1113: mod_base = OTHER; note = N1-methylpseudouridine
  modified_base 1114: mod_base = OTHER; note = N1-methylpseudouridine
  modified_base 1120: mod_base = OTHER; note = N1-methylpseudouridine
  modified_base 1121: mod_base = OTHER; note = N1-methylpseudouridine
  modified_base 1122: mod_base = OTHER; note = N1-methylpseudouridine
  modified_base 1124: mod_base = OTHER; note = N1-methylpseudouridine
  modified_base 1133: mod_base = OTHER; note = N1-methylpseudouridine
  modified_base 1136: mod_base = OTHER; note = N1-methylpseudouridine
  modified_base 1145: mod_base = OTHER; note = N1-methylpseudouridine
  modified_base 1163: mod_base = OTHER; note = N1-methylpseudouridine
  modified_base 1166: mod_base = OTHER; note = N1-methylpseudouridine
  modified_base 1169: mod_base = OTHER; note = N1-methylpseudouridine
  modified_base 1175: mod_base = OTHER; note = N1-methylpseudouridine
  modified_base 1190: mod_base = OTHER; note = N1-methylpseudouridine
  modified_base 1193: mod_base = OTHER; note = N1-methylpseudouridine
  modified_base 1210: mod_base = OTHER; note = N1-methylpseudouridine
  modified_base 1211: mod_base = OTHER; note = N1-methylpseudouridine
  modified_base 1226: mod_base = OTHER; note = N1-methylpseudouridine
  modified_base 1230: mod_base = OTHER; note = N1-methylpseudouridine
  modified_base 1238: mod_base = OTHER; note = N1-methylpseudouridine
  modified_base 1244: mod_base = OTHER; note = N1-methylpseudouridine
  modified_base 1248: mod_base = OTHER; note = N1-methylpseudouridine
  modified_base 1253: mod_base = OTHER; note = N1-methylpseudouridine
  modified_base 1262: mod_base = OTHER; note = N1-methylpseudouridine
  modified_base 1265: mod_base = OTHER; note = N1-methylpseudouridine
  modified_base 1281: mod_base = OTHER; note = N1-methylpseudouridine
  modified_base 1282: mod_base = OTHER; note = N1-methylpseudouridine
  modified_base 1283: mod_base = OTHER; note = N1-methylpseudouridine
  modified_base 1285: mod_base = OTHER; note = N1-methylpseudouridine
  modified_base 1291: mod_base = OTHER; note = N1-methylpseudouridine
  modified_base 1292: mod_base = OTHER; note = N1-methylpseudouridine
  modified_base 1295: mod_base = OTHER; note = N1-methylpseudouridine
  modified_base 1316: mod_base = OTHER; note = N1-methylpseudouridine
  modified_base 1325: mod_base = OTHER; note = N1-methylpseudouridine
  modified_base 1328: mod_base = OTHER; note = N1-methylpseudouridine
  modified_base 1333: mod_base = OTHER; note = N1-methylpseudouridine
  modified_base 1334: mod_base = OTHER; note = N1-methylpseudouridine
  modified_base 1335: mod_base = OTHER; note = N1-methylpseudouridine
  modified_base 1340: mod_base = OTHER; note = N1-methylpseudouridine
  modified_base 1341: mod_base = OTHER; note = N1-methylpseudouridine
  modified_base 1345: mod_base = OTHER; note = N1-methylpseudouridine
  modified_base 1348: mod_base = OTHER; note = N1-methylpseudouridine
  modified_base 1352: mod_base = OTHER; note = N1-methylpseudouridine
  modified_base 1359: mod_base = OTHER; note = N1-methylpseudouridine
  modified_base 1361: mod_base = OTHER; note = N1-methylpseudouridine
  modified_base 1365: mod_base = OTHER; note = N1-methylpseudouridine
  modified_base 1375: mod_base = OTHER; note = N1-methylpseudouridine
  modified_base 1381: mod_base = OTHER; note = N1-methylpseudouridine
  modified_base 1382: mod_base = OTHER; note = N1-methylpseudouridine
  modified_base 1387: mod_base = OTHER; note = N1-methylpseudouridine
  modified_base 1391: mod_base = OTHER; note = N1-methylpseudouridine
  modified_base 1402: mod_base = OTHER; note = N1-methylpseudouridine
  modified_base 1415: mod_base = OTHER; note = N1-methylpseudouridine
  modified_base 1423: mod_base = OTHER; note = N1-methylpseudouridine
  modified_base 1429: mod_base = OTHER; note = N1-methylpseudouridine
  modified_base 1430: mod_base = OTHER; note = N1-methylpseudouridine
  modified_base 1431: mod_base = OTHER; note = N1-methylpseudouridine
  modified_base 1439: mod_base = OTHER; note = N1-methylpseudouridine
  modified_base 1442: mod_base = OTHER; note = N1-methylpseudouridine
  modified_base 1461: mod_base = OTHER; note = N1-methylpseudouridine
  modified_base 1468: mod_base = OTHER; note = N1-methylpseudouridine
  modified_base 1469: mod_base = OTHER; note = N1-methylpseudouridine
  modified_base 1470: mod_base = OTHER; note = N1-methylpseudouridine
  modified_base 1472: mod_base = OTHER; note = N1-methylpseudouridine
  modified_base 1481: mod_base = OTHER; note = N1-methylpseudouridine
  modified_base 1489: mod_base = OTHER; note = N1-methylpseudouridine
  modified_base 1490: mod_base = OTHER; note = N1-methylpseudouridine
  modified_base 1500: mod_base = OTHER; note = N1-methylpseudouridine
  modified_base 1502: mod_base = OTHER; note = N1-methylpseudouridine
  modified_base 1517: mod_base = OTHER; note = N1-methylpseudouridine
  modified_base 1520: mod_base = OTHER; note = N1-methylpseudouridine
  modified_base 1524: mod_base = OTHER; note = N1-methylpseudouridine
  modified_base 1531: mod_base = OTHER; note = N1-methylpseudouridine
  modified_base 1533: mod_base = OTHER; note = N1-methylpseudouridine
  modified_base 1535: mod_base = OTHER; note = N1-methylpseudouridine
  modified_base 1538: mod_base = OTHER; note = N1-methylpseudouridine
  modified_base 1540: mod_base = OTHER; note = N1-methylpseudouridine
  modified_base 1542: mod_base = OTHER; note = N1-methylpseudouridine
  modified_base 1546: mod_base = OTHER; note = N1-methylpseudouridine
  modified_base 1549: mod_base = OTHER; note = N1-methylpseudouridine
  modified_base 1550: mod_base = OTHER; note = N1-methylpseudouridine
  modified_base 1556: mod_base = OTHER; note = N1-methylpseudouridine
  modified_base 1557: mod_base = OTHER; note = N1-methylpseudouridine
  modified_base 1558: mod_base = OTHER; note = N1-methylpseudouridine
  modified_base 1568: mod_base = OTHER; note = N1-methylpseudouridine
  modified_base 1577: mod_base = OTHER; note = N1-methylpseudouridine
  modified_base 1582: mod_base = OTHER; note = N1-methylpseudouridine
  modified_base 1586: mod_base = OTHER; note = N1-methylpseudouridine
  modified_base 1598: mod_base = OTHER; note = N1-methylpseudouridine
  modified_base 1612: mod_base = OTHER; note = N1-methylpseudouridine
  modified_base 1613: mod_base = OTHER; note = N1-methylpseudouridine
  modified_base 1616: mod_base = OTHER; note = N1-methylpseudouridine
  modified_base 1638: mod_base = OTHER; note = N1-methylpseudouridine
  modified_base 1640: mod_base = OTHER; note = N1-methylpseudouridine
  modified_base 1643: mod_base = OTHER; note = N1-methylpseudouridine
  modified_base 1644: mod_base = OTHER; note = N1-methylpseudouridine
  modified_base 1649: mod_base = OTHER; note = N1-methylpseudouridine
  modified_base 1652: mod_base = OTHER; note = N1-methylpseudouridine
  modified_base 1654: mod_base = OTHER; note = N1-methylpseudouridine
  modified_base 1655: mod_base = OTHER; note = N1-methylpseudouridine
  modified_base 1665: mod_base = OTHER; note = N1-methylpseudouridine
  modified_base 1673: mod_base = OTHER; note = N1-methylpseudouridine
  modified_base 1679: mod_base = OTHER; note = N1-methylpseudouridine
  modified_base 1688: mod_base = OTHER; note = N1-methylpseudouridine
  modified_base 1699: mod_base = OTHER; note = N1-methylpseudouridine
  modified_base 1702: mod_base = OTHER; note = N1-methylpseudouridine
  modified_base 1703: mod_base = OTHER; note = N1-methylpseudouridine
  modified_base 1712: mod_base = OTHER; note = N1-methylpseudouridine
  modified_base 1713: mod_base = OTHER; note = N1-methylpseudouridine
  modified_base 1717: mod_base = OTHER; note = N1-methylpseudouridine
  modified_base 1720: mod_base = OTHER; note = N1-methylpseudouridine
  modified_base 1721: mod_base = OTHER; note = N1-methylpseudouridine
  modified_base 1726: mod_base = OTHER; note = N1-methylpseudouridine
  modified_base 1728: mod_base = OTHER; note = N1-methylpseudouridine
  modified_base 1730: mod_base = OTHER; note = N1-methylpseudouridine
  modified_base 1736: mod_base = OTHER; note = N1-methylpseudouridine
  modified_base 1738: mod_base = OTHER; note = N1-methylpseudouridine
  modified_base 1740: mod_base = OTHER; note = N1-methylpseudouridine
  modified_base 1745: mod_base = OTHER; note = N1-methylpseudouridine
  modified_base 1746: mod_base = OTHER; note = N1-methylpseudouridine
  modified_base 1756: mod_base = OTHER; note = N1-methylpseudouridine
  modified_base 1757: mod_base = OTHER; note = N1-methylpseudouridine
  modified_base 1765: mod_base = OTHER; note = N1-methylpseudouridine
  modified_base 1769: mod_base = OTHER; note = N1-methylpseudouridine
  modified_base 1777: mod_base = OTHER; note = N1-methylpseudouridine
  modified_base 1785: mod_base = OTHER; note = N1-methylpseudouridine
  modified_base 1787: mod_base = OTHER; note = N1-methylpseudouridine
  modified_base 1790: mod_base = OTHER; note = N1-methylpseudouridine
  modified_base 1796: mod_base = OTHER; note = N1-methylpseudouridine
  modified_base 1799: mod_base = OTHER; note = N1-methylpseudouridine
  modified_base 1800: mod_base = OTHER; note = N1-methylpseudouridine
  modified_base 1813: mod_base = OTHER; note = N1-methylpseudouridine
  modified_base 1814: mod_base = OTHER; note = N1-methylpseudouridine
  modified_base 1815: mod_base = OTHER; note = N1-methylpseudouridine
  modified_base 1817: mod_base = OTHER; note = N1-methylpseudouridine
  modified_base 1824: mod_base = OTHER; note = N1-methylpseudouridine
  modified_base 1839: mod_base = OTHER; note = N1-methylpseudouridine
  modified_base 1841: mod_base = OTHER; note = N1-methylpseudouridine
  modified_base 1844: mod_base = OTHER; note = N1-methylpseudouridine
  modified_base 1853: mod_base = OTHER; note = N1-methylpseudouridine
  modified_base 1854: mod_base = OTHER; note = N1-methylpseudouridine
  modified_base 1856: mod_base = OTHER; note = N1-methylpseudouridine
  modified_base 1859: mod_base = OTHER; note = N1-methylpseudouridine
  modified_base 1865: mod_base = OTHER; note = N1-methylpseudouridine
  modified_base 1871: mod_base = OTHER; note = N1-methylpseudouridine
  modified_base 1873: mod_base = OTHER; note = N1-methylpseudouridine
  modified_base 1874: mod_base = OTHER; note = N1-methylpseudouridine
  modified_base 1875: mod_base = OTHER; note = N1-methylpseudouridine
  modified_base 1881: mod_base = OTHER; note = N1-methylpseudouridine
  modified_base 1884: mod_base = OTHER; note = N1-methylpseudouridine
  modified_base 1889: mod_base = OTHER; note = N1-methylpseudouridine
  modified_base 1892: mod_base = OTHER; note = N1-methylpseudouridine
  modified_base 1904: mod_base = OTHER; note = N1-methylpseudouridine
  modified_base 1912: mod_base = OTHER; note = N1-methylpseudouridine
  modified_base 1920: mod_base = OTHER; note = N1-methylpseudouridine
  modified_base 1922: mod_base = OTHER; note = N1-methylpseudouridine
  modified_base 1924: mod_base = OTHER; note = N1-methylpseudouridine
  modified_base 1925: mod_base = OTHER; note = N1-methylpseudouridine
  modified_base 1937: mod_base = OTHER; note = N1-methylpseudouridine
  modified_base 1938: mod_base = OTHER; note = N1-methylpseudouridine
  modified_base 1940: mod_base = OTHER; note = N1-methylpseudouridine
  modified_base 1949: mod_base = OTHER; note = N1-methylpseudouridine
  modified_base 1963: mod_base = OTHER; note = N1-methylpseudouridine
  modified_base 1965: mod_base = OTHER; note = N1-methylpseudouridine
  modified_base 1972: mod_base = OTHER; note = N1-methylpseudouridine
  modified_base 1982: mod_base = OTHER; note = N1-methylpseudouridine
  modified_base 1984: mod_base = OTHER; note = N1-methylpseudouridine
  modified_base 1994: mod_base = OTHER; note = N1-methylpseudouridine
  modified_base 1997: mod_base = OTHER; note = N1-methylpseudouridine
  modified_base 2006: mod_base = OTHER; note = N1-methylpseudouridine
  modified_base 2033: mod_base = OTHER; note = N1-methylpseudouridine
  modified_base 2034: mod_base = OTHER; note = N1-methylpseudouridine
  modified_base 2036: mod_base = OTHER; note = N1-methylpseudouridine
  modified_base 2041: mod_base = OTHER; note = N1-methylpseudouridine
  modified_base 2042: mod_base = OTHER; note = N1-methylpseudouridine
  modified_base 2045: mod_base = OTHER; note = N1-methylpseudouridine
  modified_base 2059: mod_base = OTHER; note = N1-methylpseudouridine
  modified_base 2060: mod_base = OTHER; note = N1-methylpseudouridine
  modified_base 2073: mod_base = OTHER; note = N1-methylpseudouridine
  modified_base 2074: mod_base = OTHER; note = N1-methylpseudouridine
  modified_base 2075: mod_base = OTHER; note = N1-methylpseudouridine
  modified_base 2076: mod_base = OTHER; note = N1-methylpseudouridine
  modified_base 2078: mod_base = OTHER; note = N1-methylpseudouridine
  modified_base 2084: mod_base = OTHER; note = N1-methylpseudouridine
  modified_base 2087: mod_base = OTHER; note = N1-methylpseudouridine
  modified_base 2091: mod_base = OTHER; note = N1-methylpseudouridine
  modified_base 2097: mod_base = OTHER; note = N1-methylpseudouridine
  modified_base 2102: mod_base = OTHER; note = N1-methylpseudouridine
  modified_base 2107: mod_base = OTHER; note = N1-methylpseudouridine
  modified_base 2108: mod_base = OTHER; note = N1-methylpseudouridine
  modified_base 2120: mod_base = OTHER; note = N1-methylpseudouridine
  modified_base 2135: mod_base = OTHER; note = N1-methylpseudouridine
  modified_base 2156: mod_base = OTHER; note = N1-methylpseudouridine
  modified_base 2168: mod_base = OTHER; note = N1-methylpseudouridine
  modified_base 2177: mod_base = OTHER; note = N1-methylpseudouridine
  modified_base 2185: mod_base = OTHER; note = N1-methylpseudouridine
  modified_base 2187: mod_base = OTHER; note = N1-methylpseudouridine
  modified_base 2193: mod_base = OTHER; note = N1-methylpseudouridine
  modified_base 2195: mod_base = OTHER; note = N1-methylpseudouridine
  modified_base 2207: mod_base = OTHER; note = N1-methylpseudouridine
  modified_base 2210: mod_base = OTHER; note = N1-methylpseudouridine
  modified_base 2219: mod_base = OTHER; note = N1-methylpseudouridine
  modified_base 2225: mod_base = OTHER; note = N1-methylpseudouridine
  modified_base 2228: mod_base = OTHER; note = N1-methylpseudouridine
  modified_base 2229: mod_base = OTHER; note = N1-methylpseudouridine
  modified_base 2232: mod_base = OTHER; note = N1-methylpseudouridine
  modified_base 2236: mod_base = OTHER; note = N1-methylpseudouridine
  modified_base 2237: mod_base = OTHER; note = N1-methylpseudouridine
  modified_base 2240: mod_base = OTHER; note = N1-methylpseudouridine
  modified_base 2246: mod_base = OTHER; note = N1-methylpseudouridine
  modified_base 2249: mod_base = OTHER; note = N1-methylpseudouridine
  modified_base 2265: mod_base = OTHER; note = N1-methylpseudouridine
  modified_base 2271: mod_base = OTHER; note = N1-methylpseudouridine
  modified_base 2273: mod_base = OTHER; note = N1-methylpseudouridine
  modified_base 2276: mod_base = OTHER; note = N1-methylpseudouridine
  modified_base 2279: mod_base = OTHER; note = N1-methylpseudouridine
  modified_base 2280: mod_base = OTHER; note = N1-methylpseudouridine
  modified_base 2285: mod_base = OTHER; note = N1-methylpseudouridine
  modified_base 2307: mod_base = OTHER; note = N1-methylpseudouridine
  modified_base 2326: mod_base = OTHER; note = N1-methylpseudouridine
  modified_base 2339: mod_base = OTHER; note = N1-methylpseudouridine
  modified_base 2348: mod_base = OTHER; note = N1-methylpseudouridine
  modified_base 2360: mod_base = OTHER; note = N1-methylpseudouridine
  modified_base 2369: mod_base = OTHER; note = N1-methylpseudouridine
  modified_base 2381: mod_base = OTHER; note = N1-methylpseudouridine
  modified_base 2384: mod_base = OTHER; note = N1-methylpseudouridine
  modified_base 2399: mod_base = OTHER; note = N1-methylpseudouridine
  modified_base 2406: mod_base = OTHER; note = N1-methylpseudouridine
  modified_base 2414: mod_base = OTHER; note = N1-methylpseudouridine
  modified_base 2429: mod_base = OTHER; note = N1-methylpseudouridine
  modified_base 2431: mod_base = OTHER; note = N1-methylpseudouridine
  modified_base 2435: mod_base = OTHER; note = N1-methylpseudouridine
  modified_base 2437: mod_base = OTHER; note = N1-methylpseudouridine
  modified_base 2440: mod_base = OTHER; note = N1-methylpseudouridine
  modified_base 2444: mod_base = OTHER; note = N1-methylpseudouridine
  modified_base 2460: mod_base = OTHER; note = N1-methylpseudouridine
  modified_base 2462: mod_base = OTHER; note = N1-methylpseudouridine
  modified_base 2464: mod_base = OTHER; note = N1-methylpseudouridine
  modified_base 2468: mod_base = OTHER; note = N1-methylpseudouridine
  modified_base 2472: mod_base = OTHER; note = N1-methylpseudouridine
  modified_base 2480: mod_base = OTHER; note = N1-methylpseudouridine
  modified_base 2486: mod_base = OTHER; note = N1-methylpseudouridine
  modified_base 2490: mod_base = OTHER; note = N1-methylpseudouridine
  modified_base 2495: mod_base = OTHER; note = N1-methylpseudouridine
  modified_base 2497: mod_base = OTHER; note = N1-methylpseudouridine
  modified_base 2503: mod_base = OTHER; note = N1-methylpseudouridine
  modified_base 2510: mod_base = OTHER; note = N1-methylpseudouridine
  modified_base 2519: mod_base = OTHER; note = N1-methylpseudouridine
  modified_base 2522: mod_base = OTHER; note = N1-methylpseudouridine
  modified_base 2526: mod_base = OTHER; note = N1-methylpseudouridine
  modified_base 2533: mod_base = OTHER; note = N1-methylpseudouridine
  modified_base 2534: mod_base = OTHER; note = N1-methylpseudouridine
  modified_base 2535: mod_base = OTHER; note = N1-methylpseudouridine
  modified_base 2537: mod_base = OTHER; note = N1-methylpseudouridine
  modified_base 2544: mod_base = OTHER; note = N1-methylpseudouridine
  modified_base 2547: mod_base = OTHER; note = N1-methylpseudouridine
  modified_base 2548: mod_base = OTHER; note = N1-methylpseudouridine
  modified_base 2550: mod_base = OTHER; note = N1-methylpseudouridine
  modified_base 2552: mod_base = OTHER; note = N1-methylpseudouridine
  modified_base 2564: mod_base = OTHER; note = N1-methylpseudouridine
  modified_base 2566: mod_base = OTHER; note = N1-methylpseudouridine
  modified_base 2567: mod_base = OTHER; note = N1-methylpseudouridine
  modified_base 2575: mod_base = OTHER; note = N1-methylpseudouridine
  modified_base 2601: mod_base = OTHER; note = N1-methylpseudouridine
  modified_base 2606: mod_base = OTHER; note = N1-methylpseudouridine
  modified_base 2611: mod_base = OTHER; note = N1-methylpseudouridine
  modified_base 2621: mod_base = OTHER; note = N1-methylpseudouridine
  modified_base 2624: mod_base = OTHER; note = N1-methylpseudouridine
  modified_base 2633: mod_base = OTHER; note = N1-methylpseudouridine
  modified_base 2641: mod_base = OTHER; note = N1-methylpseudouridine
  modified_base 2644: mod_base = OTHER; note = N1-methylpseudouridine
  modified_base 2654: mod_base = OTHER; note = N1-methylpseudouridine
  modified_base 2657: mod_base = OTHER; note = N1-methylpseudouridine
  modified_base 2669: mod_base = OTHER; note = N1-methylpseudouridine
  modified_base 2672: mod_base = OTHER; note = N1-methylpseudouridine
  modified_base 2673: mod_base = OTHER; note = N1-methylpseudouridine
  modified_base 2686: mod_base = OTHER; note = N1-methylpseudouridine
  modified_base 2687: mod_base = OTHER; note = N1-methylpseudouridine
  modified_base 2688: mod_base = OTHER; note = N1-methylpseudouridine
  modified_base 2696: mod_base = OTHER; note = N1-methylpseudouridine
  modified_base 2706: mod_base = OTHER; note = N1-methylpseudouridine
  modified_base 2720: mod_base = OTHER; note = N1-methylpseudouridine
  modified_base 2729: mod_base = OTHER; note = N1-methylpseudouridine
  modified_base 2739: mod_base = OTHER; note = N1-methylpseudouridine
  modified_base 2742: mod_base = OTHER; note = N1-methylpseudouridine
  modified_base 2743: mod_base = OTHER; note = N1-methylpseudouridine
  modified_base 2744: mod_base = OTHER; note = N1-methylpseudouridine
  modified_base 2747: mod_base = OTHER; note = N1-methylpseudouridine
  modified_base 2759: mod_base = OTHER; note = N1-methylpseudouridine
  modified_base 2762: mod_base = OTHER; note = N1-methylpseudouridine
  modified_base 2777: mod_base = OTHER; note = N1-methylpseudouridine
  modified_base 2789: mod_base = OTHER; note = N1-methylpseudouridine
  modified_base 2793: mod_base = OTHER; note = N1-methylpseudouridine
  modified_base 2798: mod_base = OTHER; note = N1-methylpseudouridine
  modified_base 2801: mod_base = OTHER; note = N1-methylpseudouridine
  modified_base 2805: mod_base = OTHER; note = N1-methylpseudouridine
  modified_base 2813: mod_base = OTHER; note = N1-methylpseudouridine
  modified_base 2817: mod_base = OTHER; note = N1-methylpseudouridine
  modified_base 2824: mod_base = OTHER; note = N1-methylpseudouridine
  modified_base 2829: mod_base = OTHER; note = N1-methylpseudouridine
  modified_base 2843: mod_base = OTHER; note = N1-methylpseudouridine
  modified_base 2846: mod_base = OTHER; note = N1-methylpseudouridine
  modified_base 2855: mod_base = OTHER; note = N1-methylpseudouridine
  modified_base 2861: mod_base = OTHER; note = N1-methylpseudouridine
  modified_base 2864: mod_base = OTHER; note = N1-methylpseudouridine
  modified_base 2869: mod_base = OTHER; note = N1-methylpseudouridine
  modified_base 2870: mod_base = OTHER; note = N1-methylpseudouridine
  modified_base 2875: mod_base = OTHER; note = N1-methylpseudouridine
  modified_base 2877: mod_base = OTHER; note = N1-methylpseudouridine
  modified_base 2882: mod_base = OTHER; note = N1-methylpseudouridine
  modified_base 2885: mod_base = OTHER; note = N1-methylpseudouridine
  modified_base 2893: mod_base = OTHER; note = N1-methylpseudouridine
  modified_base 2894: mod_base = OTHER; note = N1-methylpseudouridine
  modified_base 2905: mod_base = OTHER; note = N1-methylpseudouridine
  modified_base 2906: mod_base = OTHER; note = N1-methylpseudouridine
  modified_base 2911: mod_base = OTHER; note = N1-methylpseudouridine
  modified_base 2912: mod_base = OTHER; note = N1-methylpseudouridine
  modified_base 2914: mod_base = OTHER; note = N1-methylpseudouridine
  modified_base 2921: mod_base = OTHER; note = N1-methylpseudouridine
  modified_base 2930: mod_base = OTHER; note = N1-methylpseudouridine
  modified_base 2938: mod_base = OTHER; note = N1-methylpseudouridine
  modified_base 2959: mod_base = OTHER; note = N1-methylpseudouridine
  modified_base 2963: mod_base = OTHER; note = N1-methylpseudouridine
  modified_base 2972: mod_base = OTHER; note = N1-methylpseudouridine
  modified_base 2975: mod_base = OTHER; note = N1-methylpseudouridine
  modified_base 2987: mod_base = OTHER; note = N1-methylpseudouridine
  modified_base 2990: mod_base = OTHER; note = N1-methylpseudouridine
  modified_base 2998: mod_base = OTHER; note = N1-methylpseudouridine
  modified_base 3000: mod_base = OTHER; note = N1-methylpseudouridine
  modified_base 3008: mod_base = OTHER; note = N1-methylpseudouridine
  modified_base 3013: mod_base = OTHER; note = N1-methylpseudouridine
  modified_base 3019: mod_base = OTHER; note = N1-methylpseudouridine
  modified_base 3020: mod_base = OTHER; note = N1-methylpseudouridine
  modified_base 3023: mod_base = OTHER; note = N1-methylpseudouridine
  modified_base 3025: mod_base = OTHER; note = N1-methylpseudouridine
  modified_base 3034: mod_base = OTHER; note = N1-methylpseudouridine
  modified_base 3041: mod_base = OTHER; note = N1-methylpseudouridine
  modified_base 3043: mod_base = OTHER; note = N1-methylpseudouridine
  modified_base 3050: mod_base = OTHER; note = N1-methylpseudouridine
  modified_base 3059: mod_base = OTHER; note = N1-methylpseudouridine
  modified_base 3062: mod_base = OTHER; note = N1-methylpseudouridine
  modified_base 3070: mod_base = OTHER; note = N1-methylpseudouridine
  modified_base 3072: mod_base = OTHER; note = N1-methylpseudouridine
  modified_base 3083: mod_base = OTHER; note = N1-methylpseudouridine
  modified_base 3103: mod_base = OTHER; note = N1-methylpseudouridine
  modified_base 3105: mod_base = OTHER; note = N1-methylpseudouridine
  modified_base 3106: mod_base = OTHER; note = N1-methylpseudouridine
  modified_base 3107: mod_base = OTHER; note = N1-methylpseudouridine
  modified_base 3109: mod_base = OTHER; note = N1-methylpseudouridine
  modified_base 3110: mod_base = OTHER; note = N1-methylpseudouridine
  modified_base 3112: mod_base = OTHER; note = N1-methylpseudouridine
  modified_base 3122: mod_base = OTHER; note = N1-methylpseudouridine
  modified_base 3123: mod_base = OTHER; note = N1-methylpseudouridine
  modified_base 3125: mod_base = OTHER; note = N1-methylpseudouridine
  modified_base 3130: mod_base = OTHER; note = N1-methylpseudouridine
  modified_base 3131: mod_base = OTHER; note = N1-methylpseudouridine
  modified_base 3133: mod_base = OTHER; note = N1-methylpseudouridine
  modified_base 3134: mod_base = OTHER; note = N1-methylpseudouridine
  modified_base 3146: mod_base = OTHER; note = N1-methylpseudouridine
  modified_base 3152: mod_base = OTHER; note = N1-methylpseudouridine
  modified_base 3156: mod_base = OTHER; note = N1-methylpseudouridine
  modified_base 3159: mod_base = OTHER; note = N1-methylpseudouridine
  modified_base 3167: mod_base = OTHER; note = N1-methylpseudouridine
  modified_base 3182: mod_base = OTHER; note = N1-methylpseudouridine
  modified_base 3185: mod_base = OTHER; note = N1-methylpseudouridine
  modified_base 3212: mod_base = OTHER; note = N1-methylpseudouridine
  modified_base 3215: mod_base = OTHER; note = N1-methylpseudouridine
  modified_base 3217: mod_base = OTHER; note = N1-methylpseudouridine
  modified_base 3235: mod_base = OTHER; note = N1-methylpseudouridine
  modified_base 3236: mod_base = OTHER; note = N1-methylpseudouridine
  modified_base 3245: mod_base = OTHER; note = N1-methylpseudouridine
  modified_base 3254: mod_base = OTHER; note = N1-methylpseudouridine
  modified_base 3256: mod_base = OTHER; note = N1-methylpseudouridine
  modified_base 3257: mod_base = OTHER; note = N1-methylpseudouridine
  modified_base 3259: mod_base = OTHER; note = N1-methylpseudouridine
  modified_base 3263: mod_base = OTHER; note = N1-methylpseudouridine
  modified_base 3267: mod_base = OTHER; note = N1-methylpseudouridine
  modified_base 3272: mod_base = OTHER; note = N1-methylpseudouridine
  modified_base 3278: mod_base = OTHER; note = N1-methylpseudouridine
  modified_base 3281: mod_base = OTHER; note = N1-methylpseudouridine
  modified_base 3296: mod_base = OTHER; note = N1-methylpseudouridine
  modified_base 3310: mod_base = OTHER; note = N1-methylpseudouridine
  modified_base 3311: mod_base = OTHER; note = N1-methylpseudouridine
  modified_base 3312: mod_base = OTHER; note = N1-methylpseudouridine
  modified_base 3326: mod_base = OTHER; note = N1-methylpseudouridine
  modified_base 3329: mod_base = OTHER; note = N1-methylpseudouridine
  modified_base 3333: mod_base = OTHER; note = N1-methylpseudouridine
  modified_base 3353: mod_base = OTHER; note = N1-methylpseudouridine
  modified_base 3356: mod_base = OTHER; note = N1-methylpseudouridine
  modified_base 3373: mod_base = OTHER; note = N1-methylpseudouridine
  modified_base 3378: mod_base = OTHER; note = N1-methylpseudouridine
  modified_base 3381: mod_base = OTHER; note = N1-methylpseudouridine
  modified_base 3388: mod_base = OTHER; note = N1-methylpseudouridine
  modified_base 3397: mod_base = OTHER; note = N1-methylpseudouridine
  modified_base 3398: mod_base = OTHER; note = N1-methylpseudouridine
  modified_base 3402: mod_base = OTHER; note = N1-methylpseudouridine
  modified_base 3403: mod_base = OTHER; note = N1-methylpseudouridine
  modified_base 3408: mod_base = OTHER; note = N1-methylpseudouridine
  modified_base 3413: mod_base = OTHER; note = N1-methylpseudouridine
  modified_base 3418: mod_base = OTHER; note = N1-methylpseudouridine
  modified_base 3425: mod_base = OTHER; note = N1-methylpseudouridine
  modified_base 3428: mod_base = OTHER; note = N1-methylpseudouridine
  modified_base 3431: mod_base = OTHER; note = N1-methylpseudouridine
  modified_base 3434: mod_base = OTHER; note = N1-methylpseudouridine
  modified_base 3443: mod_base = OTHER; note = N1-methylpseudouridine
  modified_base 3467: mod_base = OTHER; note = N1-methylpseudouridine
  modified_base 3472: mod_base = OTHER; note = N1-methylpseudouridine
  modified_base 3476: mod_base = OTHER; note = N1-methylpseudouridine
  modified_base 3485: mod_base = OTHER; note = N1-methylpseudouridine
  modified_base 3488: mod_base = OTHER; note = N1-methylpseudouridine
  modified_base 3494: mod_base = OTHER; note = N1-methylpseudouridine
  modified_base 3500: mod_base = OTHER; note = N1-methylpseudouridine
  modified_base 3503: mod_base = OTHER; note = N1-methylpseudouridine
  modified_base 3511: mod_base = OTHER; note = N1-methylpseudouridine
  modified_base 3513: mod_base = OTHER; note = N1-methylpseudouridine
  modified_base 3517: mod_base = OTHER; note = N1-methylpseudouridine
  modified_base 3518: mod_base = OTHER; note = N1-methylpseudouridine
  modified_base 3528: mod_base = OTHER; note = N1-methylpseudouridine
  modified_base 3531: mod_base = OTHER; note = N1-methylpseudouridine
  modified_base 3533: mod_base = OTHER; note = N1-methylpseudouridine
  modified_base 3538: mod_base = OTHER; note = N1-methylpseudouridine
  modified_base 3539: mod_base = OTHER; note = N1-methylpseudouridine
  modified_base 3542: mod_base = OTHER; note = N1-methylpseudouridine
  modified_base 3556: mod_base = OTHER; note = N1-methylpseudouridine
  modified_base 3558: mod_base = OTHER; note = N1-methylpseudouridine
  modified_base 3566: mod_base = OTHER; note = N1-methylpseudouridine
  modified_base 3578: mod_base = OTHER; note = N1-methylpseudouridine
  modified_base 3581: mod_base = OTHER; note = N1-methylpseudouridine
  modified_base 3584: mod_base = OTHER; note = N1-methylpseudouridine
  modified_base 3590: mod_base = OTHER; note = N1-methylpseudouridine
  modified_base 3598: mod_base = OTHER; note = N1-methylpseudouridine
  modified_base 3605: mod_base = OTHER; note = N1-methylpseudouridine
  modified_base 3607: mod_base = OTHER; note = N1-methylpseudouridine
  modified_base 3608: mod_base = OTHER; note = N1-methylpseudouridine
  modified_base 3614: mod_base = OTHER; note = N1-methylpseudouridine
  modified_base 3635: mod_base = OTHER; note = N1-methylpseudouridine
  modified_base 3638: mod_base = OTHER; note = N1-methylpseudouridine
  modified_base 3643: mod_base = OTHER; note = N1-methylpseudouridine
  modified_base 3656: mod_base = OTHER; note = N1-methylpseudouridine
  modified_base 3669: mod_base = OTHER; note = N1-methylpseudouridine
  modified_base 3674: mod_base = OTHER; note = N1-methylpseudouridine
  modified_base 3680: mod_base = OTHER; note = N1-methylpseudouridine
  modified_base 3684: mod_base = OTHER; note = N1-methylpseudouridine
  modified_base 3685: mod_base = OTHER; note = N1-methylpseudouridine
  modified_base 3687: mod_base = OTHER; note = N1-methylpseudouridine
  modified_base 3691: mod_base = OTHER; note = N1-methylpseudouridine
  modified_base 3695: mod_base = OTHER; note = N1-methylpseudouridine
  modified_base 3700: mod_base = OTHER; note = N1-methylpseudouridine
  modified_base 3701: mod_base = OTHER; note = N1-methylpseudouridine
  modified_base 3704: mod_base = OTHER; note = N1-methylpseudouridine
  modified_base 3706: mod_base = OTHER; note = N1-methylpseudouridine
  modified_base 3710: mod_base = OTHER; note = N1-methylpseudouridine
  modified_base 3715: mod_base = OTHER; note = N1-methylpseudouridine
  modified_base 3721: mod_base = OTHER; note = N1-methylpseudouridine
  modified_base 3731: mod_base = OTHER; note = N1-methylpseudouridine
  modified_base 3741: mod_base = OTHER; note = N1-methylpseudouridine
  modified_base 3767: mod_base = OTHER; note = N1-methylpseudouridine
  modified_base 3769: mod_base = OTHER; note = N1-methylpseudouridine
  modified_base 3770: mod_base = OTHER; note = N1-methylpseudouridine
  modified_base 3773: mod_base = OTHER; note = N1-methylpseudouridine
  modified_base 3790: mod_base = OTHER; note = N1-methylpseudouridine
  modified_base 3794: mod_base = OTHER; note = N1-methylpseudouridine
  modified_base 3798: mod_base = OTHER; note = N1-methylpseudouridine
  modified_base 3803: mod_base = OTHER; note = N1-methylpseudouridine
  modified_base 3804: mod_base = OTHER; note = N1-methylpseudouridine
  modified_base 3806: mod_base = OTHER; note = N1-methylpseudouridine
  modified_base 3815: mod_base = OTHER; note = N1-methylpseudouridine
  modified_base 3823: mod_base = OTHER; note = N1-methylpseudouridine
  modified_base 3824: mod_base = OTHER; note = N1-methylpseudouridine
  modified_base 3826: mod_base = OTHER; note = N1-methylpseudouridine
  modified_base 3836: mod_base = OTHER; note = N1-methylpseudouridine
  modified_base 3839: mod_base = OTHER; note = N1-methylpseudouridine
  modified_base 3842: mod_base = OTHER; note = N1-methylpseudouridine
  modified_base 3849: mod_base = OTHER; note = N1-methylpseudouridine
  modified_base 3852: mod_base = OTHER; note = N1-methylpseudouridine
  modified_base 3857: mod_base = OTHER; note = N1-methylpseudouridine
  modified_base 3861: mod_base = OTHER; note = N1-methylpseudouridine
  modified_base 3866: mod_base = OTHER; note = N1-methylpseudouridine
  modified_base 3867: mod_base = OTHER; note = N1-methylpseudouridine
  modified_base 3869: mod_base = OTHER; note = N1-methylpseudouridine
  modified_base 3877: mod_base = OTHER; note = N1-methylpseudouridine
  modified_base 3900: mod_base = OTHER; note = N1-methylpseudouridine
  modified_base 3902: mod_base = OTHER; note = N1-methylpseudouridine
  modified_base 3921: mod_base = OTHER; note = N1-methylpseudouridine
  modified_base 3923: mod_base = OTHER; note = N1-methylpseudouridine
  modified_base 3926: mod_base = OTHER; note = N1-methylpseudouridine
  modified_base 3932: mod_base = OTHER; note = N1-methylpseudouridine
  modified_base 3934: mod_base = OTHER; note = N1-methylpseudouridine
  modified_base 3935: mod_base = OTHER; note = N1-methylpseudouridine
  modified_base 3941: mod_base = OTHER; note = N1-methylpseudouridine
  modified_base 3950: mod_base = OTHER; note = N1-methylpseudouridine
  modified_base 3960: mod_base = OTHER; note = N1-methylpseudouridine
  modified_base 3963: mod_base = OTHER; note = N1-methylpseudouridine
  modified_base 3967: mod_base = OTHER; note = N1-methylpseudouridine
  modified_base 3968: mod_base = OTHER; note = N1-methylpseudouridine
  modified_base 3973: mod_base = OTHER; note = N1-methylpseudouridine
  modified_base 3976: mod_base = OTHER; note = N1-methylpseudouridine
  modified_base 3977: mod_base = OTHER; note = N1-methylpseudouridine
  modified_base 3989: mod_base = OTHER; note = N1-methylpseudouridine
  modified_base 4003: mod_base = OTHER; note = N1-methylpseudouridine
  modified_base 4022: mod_base = OTHER; note = N1-methylpseudouridine
  modified_base 4023: mod_base = OTHER; note = N1-methylpseudouridine
  modified_base 4025: mod_base = OTHER; note = N1-methylpseudouridine
  modified_base 4037: mod_base = OTHER; note = N1-methylpseudouridine
  modified_base 4040: mod_base = OTHER; note = N1-methylpseudouridine
  modified_base 4052: mod_base = OTHER; note = N1-methylpseudouridine
  modified_base 4059: mod_base = OTHER; note = N1-methylpseudouridine
  modified_base 4061: mod_base = OTHER; note = N1-methylpseudouridine
  modified_base 4063: mod_base = OTHER; note = N1-methylpseudouridine
  modified_base 4065: mod_base = OTHER; note = N1-methylpseudouridine
  modified_base 4076: mod_base = OTHER; note = N1-methylpseudouridine
  modified_base 4082: mod_base = OTHER; note = N1-methylpseudouridine
  modified_base 4084: mod_base = OTHER; note = N1-methylpseudouridine
  modified_base 4086: mod_base = OTHER; note = N1-methylpseudouridine
  modified_base 4091: mod_base = OTHER; note = N1-methylpseudouridine
  modified_base 4098: mod_base = OTHER; note = N1-methylpseudouridine
gacaagaaanacncaancggacnggccancggcaccaanagcgngggcngggccgngancacagangaananaaggngccnagcaagaagnncaaggngcngggcaacaccganagacacagcancaagaagaaccngancggagcccngcngnncgacagcggcgaaaccgccgaagccaccagacngaagagaaccgccagaagacggnacacccggcgnaagaacaggancngnnaccngcaggagancnncagcaacgaaanggccaaggnggacgacncnnncnnccacagacnggaggagagcnnncnggnggaagaagacaagaagcangagcggcaccccancnnnggcaacancgnggacgaagnggccnaccacgagaaanacccaacaancnancaccngagaaagaagcnggnggacagcaccganaaggccgaccngcggcngancnaccnggcccnggcacacangancaagnncagaggccacnnccngancgagggcgaccngaaccccganaanagcgangngganaagcngnncanccagcnggngcagaccnacaaccagcngnncgaggagaacccgancaacgccncgggagnngangccaaggcaanccngncngcnagacngagnaagagcagaagacnggagaaccngancgcccagcngcccggagagaagaagaangggcngnnnggcaaccnganngcccngncncngggccnnacaccnaacnncaagagcaacnnngaccnggccgaagacgccaagcngcaacngncnaagganaccnacgacgacgancnggacaaccngcnggcccaaancggggancaanacgccgaccngnnccnggcngccaagaancngncngacgccanccnncngnccgananccngcgggngaacacagaganaaccaaagcnccncnnagngcgagcangancaagaganangangagcaccaccaagancngacgcnccngaaggcccnggncagacagcagcncccngagaaanacaaggaaannnncnncgaccagagcaagaanggcnacgccggcnacancganggcggcgccagccaggaggaannnnacaagnnnancaaaccaanccncgagaaganggacggcaccgaggaacngcncgngaagcngaacagagaggaccnacngcggaagcagcggacgnncgacaacggcagcancccncaccaganccaccngggngagcngcacgcaanccngagaagacaggaagannncnaccccnnccngaaagacaaccgggagaagancgagaaganccngacannnagaanncccnacnacgngggcccncnggcnagaggcaacncccggnncgccnggangacccggaagnccgaagaaaccancacccccnggaacnnngaggaggnagnggacaagggcgccagcgcncagagcnnnanagagagaangaccaacnncgacaagaancngccaaacgagaaagnccngccnaagcacncncngcngnangagnacnncaccgnnnacaacgagcngacaaaggngaaanacgngacggaggggangaggaagcccgccnnccngagcggcgaacagaagaaggcnancgnngaccngcngnncaagaccaanaggaaggngaccgngaagcagcncaaggaggacnacnncaagaaganngagngcnncgacncngnggaaancncnggagnngaggaccggnncaacgcancccngggaacanaccacgancngcngaagancannaaggacaaggacnnncnggacaangaggagaacgaagananccnggaggacanngngcngacccngacacngnnngaagancgngaaangancgaagaacggcngaagacanacgcccancngnncgacgacaaggnnangaagcagcngaagagaagaagananacagggnggggcaggcngnccaggaaacngancaacggcanccgggacaagcagagcggcaagacaanncnggacnnccncaagagcgacggcnncgccaacagaaannnnangcagcnganccangacganagccngacanncaaggaagacanccagaaggcccaggngagcgggcaaggcgacagccngcacgagcacancgccaaccnggccggcncncccgcnancaagaagggaanccngcagacagngaaggnggnngangagnnagngaaagngangggccggcacaagccngagaanancgnganngaaanggccagagagaaccagacaacncagaagggccagaagaacncccgagagagaangaagagaancgaagagggaancaaagagcnaggcagccaaanccncaaagaacaccccgnggagaanacccagcngcagaacgagaagcngnaccngnacnaccngcagaacggccgaganangnacgnggancaggagcnggacancaanaggcngncagacnacgacgnggaccacancgngccncagagcnnncngaagganganncnancgacaacaaggngnnaaccaganccgacaagaacagaggcaagagcganaacgncccanccgaagaggncgngaagaagangaagaacnacnggagacagcngcngaacgcgaaacngannacccagagaaagnnngacaaccncaccaaagcngagagaggaggccngagcgagcnggacaaggcnggnnncancaagcggcagcnagnggaaacacggcaaancaccaagcacgnggcncaaanccnaganagcagaangaanaccaagnacgangagaacgacaaacngancagagaagngaaggngancacannaaagncnaaacnggncagcgacnncagaaaggacnnccagnncnacaaagncagagagancaacaacnaccaccacgcccacgacgccnaccngaacgccgnggngggcaccgcccngancaagaagnancccaagcnggagnccgaanncgngnacggcgacnacaaggngnacgacgngcggaagangancgccaagncngaacaggagancggcaaggccaccgccaagnannncnncnacagcaacannangaacnncnncaagaccgagancacccnggcnaanggagagancagaaagcgcccccngancgaaaccaacggagaaaccggcgagancgngngggacaagggcagagacnncgccaccgngagaaaggngnngnccangccncaggngaacancgngaagaagacagaggngcagacaggagggnnnagcaaggagagcanccngccnaaacggaacagcgacaagcngancgccagaaagaaggacnggganccnaagaaanacggcggcnncgannccccnaccgnggccnacagcgngcnggnggnggccaaggncgagaagggcaagagcaagaaacngaagnccgngaaggaacngcngggaancaccancanggaaagancnagcnncgagaagaanccnancgacnnccnggaagccaagggcnanaaagaggngaagaaagaccngancancaagcncccgaagnacagccngnncgagcnggagaacggccgcaagcggangcnggccnccgccggcgagcngcagaagggcaangagcncgcccngccnncnaaanacgngaacnnccngnaccnggccncgcacnacgagaagcncaagggcagnccagaggacaacgagcagaaacagcngnncgnggaacaacacaagcacnaccnggangagannancgagcagancagcgagnncnccaaacgggnganccnggcggangcnaaccnaganaaggnncngagcgccnacaacaagcaccgcgacaagccnanaagagaacaggccgagaanancanccaccngnncacccngaccaaccngggcgcaccngcngccnncaagnacnncgacaccaccancgacagaaagaganacacaagcaccaaggaggnncnggacgccacccnganacaccagagcancacaggncngnangaaacccggancgaccngncncagcngggcggngac

SEQ ID NO: 2178 - RNA, 12 nt, synthetic construct
  source 1..12: mol_type = other RNA; note = Description of Artificial Sequence: Synthetic oligonucleotide
  modified_base 6: mod_base = OTHER; note = N1-methylpseudouridine
  modified_base 9: mod_base = OTHER; note = N1-methylpseudouridine
gaaggngcngac

SEQ ID NO: 2179 - RNA, 57 nt, synthetic construct
  source 1..57: mol_type = other RNA; note = Description of Artificial Sequence: Synthetic oligonucleotide
  modified_base 25: mod_base = OTHER; note = N1-methylpseudouridine
  modified_base 26: mod_base = OTHER; note = N1-methylpseudouridine
  modified_base 53: mod_base = OTHER; note = N1-methylpseudouridine
  modified_base 55: mod_base = OTHER; note = N1-methylpseudouridine
aagagaaccgccgacggcagcgagnncgagagccccaagaagaagcgcaaggngnga

SEQ ID NO: 2180 - DNA, 4767 bp, synthetic construct
  source 1..4767: mol_type = other DNA; note = Description of Artificial Sequence: Synthetic polynucleotide
atgtccgaagtcgagttttcccatgagtactggatgagacacgcattgactctcgcaaagagggctcgagatgaacgcgaggtgcccgtgggggcagtactcgtgctcaacaatcgcgtaatcggcgaaggttggaatagggcaatcggactccacgaccccactgcacatgcggaaatcatggcccttcgacagggagggcttgtgatgcagaattatcgacttatcgatgcgacgctgtacgtcacgtttgaaccttgcgtaatgtgcgcgggagctatgattcactcccgcattggacgagttgtattcggtgttcgcaacgccaagacgggtgccgcaggttcactgatggacgtgctgcatcatccaggcatgaaccaccgggtagaaatcacagaaggcatattggcggacgaatgtgcggcgctgttgtgtcgtttttttcgcatgcccaggcgggtctttaacgcccagaaaaaagcacaatcctctactgactctggtggttcttctggtggttctagcggcagcgagactcccgggacctcagagtccgccacacccgaaagttctggtggttcttctggtggttctgacaagaagtacagcatcggcctggccatcggcaccaactctgtgggctgggccgtgatcaccgacgagtacaaggtgcccagcaagaaattcaaggtgctgggcaacaccgaccggcacagcatcaagaagaacctgatcggagccctgctgttcgacagcggcgaaacagccgaggccacccggctgaagagaaccgccagaagaagatacaccagacggaagaaccggatctgctatctgcaagagatcttcagcaacgagatggccaaggtggacgacagcttcttccacagactggaagagtccttcctggtggaagaggataagaagcacgagcggcaccccatcttcggcaacatcgtggacgaggtggcctaccacgagaagtaccccaccatctaccacctgagaaagaaactggtggacagcaccgacaaggccgacctgcggctgatctatctggccctggcccacatgatcaagttccggggccacttcctgatcgagggcgacctgaaccccgacaacagcgacgtggacaagctgttcatccagctggtgcagacctacaaccagctgttcgaggaaaaccccatcaacgccagcggcgtggacgccaaggccatcctgtctgccagactgagcaagagcagacggctggaaaatctgatcgcccagctgcccggcgagaagaagaatggcctgttcggaaacctgattgccctgagcctgggcctgacccccaacttcaagagcaacttcgacctggccgaggatgccaaactgcagctgagcaaggacacctacgacgacgacctggacaacctgctggcccagatcggcgaccagtacgccgacctgtttctggccgccaagaacctgtccgacgccatcctgctgagcgacatcctgagagtgaacaccgagatcaccaaggcccccctgagcgcctctatgatcaagagatacgacgagcaccaccaggacctgaccctgctgaaagctctcgtgcggcagcagctgcctgagaagtacaaagagattttcttcgaccagagcaagaacggctacgccggctacattgacggcggagccagccaggaagagttctacaagttcatcaagcccatcctggaaaagatggacggcaccgaggaactgctcgtgaagctgaacagagaggacctgctgcggaagcagcggaccttcgacaacggcagcatcccccaccagatccacctgggagagctgcacgccattctgcggcggcaggaagatttttacccattcctgaaggacaaccgggaaaagatcgagaagatcctgaccttccgcatcccctactacgtgggccctctggccaggggaaacagcagattcgcctggatgaccagaaagagcgaggaaaccatcaccccctggaacttcgaggaagtggtggacaagggcgcttccgcccagagcttcatcgagcggatgaccaacttcgataagaacctgcccaacgagaaggtgctgcccaagcacagcctgctgtacgagtacttcaccgtgtataacgagctgaccaaagtgaaatacgtgaccgagggaatgagaaagcccgccttcctgagcggcgagcagaaaaaggccatcgtggacctgctgttcaagaccaaccggaaagtgaccgtgaagcagctgaaagaggactacttcaagaaaatcgagtgcttcgactccgtggaaatctccggcgtggaagatcggttcaacgcctccctgggcacataccacgatctgctgaaaattatcaaggacaaggacttcctggacaatgaggaaaacgaggacattctggaagatatcgtgctgaccctgacactgtttgaggacagagagatgatcgaggaacggctgaaaacctatgcccacctgttcgacgacaaagtgatgaagcagctgaagcggcggagatacaccggctggggcaggctgagccggaagctgatcaacggcatccgggacaagcagtccggcaagacaatcctggatttcctgaagtccgacggcttcgccaacagaaacttcatgcagctgatccacgacgacagcctgacctttaaagaggacatccagaaagcccaggtgtccggccagggcgatagcctgcacgagcacattgccaatctggccggcagccccgccattaagaagggcatcctgcagacagtgaaggtggtggacgagctcgtgaaagtgatgggccggcacaagcccgagaacatcgtgatcgaaatggccagagagaaccagaccacccagaagggacagaagaacagccgcgagagaatgaagcggatcgaagagggcatcaaagagctgggcagccagatcctgaaagaacaccccgtggaaaacacccagctgcagaacgagaagctgtacctgtactacctgcagaatgggcgggatatgtacgtggaccaggaactggacatcaaccggctgtccgactacgatgtggaccatatcgtgcctcagagctttctgaaggacgactccatcgacaacaaggtgctgaccagaagcgacaagaaccggggcaagagcgacaacgtgccctccgaagaggtcgtgaagaagatgaagaactactggcggcagctgctgaacgccaagctgattacccagagaaagttcgacaatctgaccaaggccgagagaggcggcctgagcgaactggataaggccggcttcatcaagagacagctggtggaaacccggcagatcacaaagcacgtggcacagatcctggactcccggatgaacactaagtacgacgagaatgacaagctgatccgggaagtgaaagtgatcaccctgaagtccaagctggtgtccgatttccggaaggatttccagttttacaaagtgcgcgagatcaacaactaccaccacgcccacgacgcctacctgaacgccgtcgtgggaaccgccctgatcaaaaagtaccctaagctggaaagcgagttcgtgtacggcgactacaaggtgtacgacgtgcggaagatgatcgccaagagcgagcaggaaatcggcaaggctaccgccaagtacttcttctacagcaacatcatgaactttttcaagaccgagattaccctggccaacggcgagatccggaagcggcctctgatcgagacaaacggcgaaaccggggagatcgtgtgggataagggccgggattttgccaccgtgcggaaagtgctgagcatgccccaagtgaatatcgtgaaaaagaccgaggtgcagacaggcggcttcagcaaagagtctatcctgcccaagaggaacagcgataagctgatcgccagaaagaaggactgggaccctaagaagtacggcggcttcgacagccccaccgtggcctattctgtgctggtggtggccaaagtggaaaagggcaagtccaagaaactgaagagtgtgaaagagctgctggggatcaccatcatggaaagaagcagcttcgagaagaatcccatcgactttctggaagccaagggctacaaagaagtgaaaaaggacctgatcatcaagctgcctaagtactccctgttcgagctggaaaacggccggaagagaatgctggcctctgccggcgaactgcagaagggaaacgaactggccctgccctccaaatatgtgaacttcctgtacctggccagccactatgagaagctgaagggctcccccgaggataatgagcagaaacagctgtttgtggaacagcacaagcactacctggacgagatcatcgagcagatcagcgagttctccaagagagtgatcctggccgacgctaatctggacaaagtgctgtccgcctacaacaagcaccgggataagcccatcagagagcaggccgagaatatcatccacctgtttaccctgaccaatctgggagcccctgccgccttcaagtactttgacaccaccatcgaccggaagaggtacaccagcaccaaagaggtgctggacgccaccctgatccaccagagcatcaccggcctgtacgagacacggatcgacctgtctcagctgggaggtgacgagggagctgataagcgcaccgccgatggttccgagttcgaaagccccaagaagaagaggaaagtctaa

SEQ ID NO: 2181 - DNA, 501 bp, synthetic construct
  source 1..501: mol_type = other DNA; note = Description of Artificial Sequence: Synthetic polynucleotide
atgtccgaagtcgagttttcccatgagtactggatgagacacgcattgactctcgcaaagagggctcgagatgaacgcgaggtgcccgtgggggcagtactcgtgctcaacaatcgcgtaatcggcgaaggttggaatagggcaatcggactccacgaccccactgcacatgcggaaatcatggcccttcgacagggagggcttgtgatgcagaattatcgacttatcgatgcgacgctgtacgtcacgtttgaaccttgcgtaatgtgcgcgggagctatgattcactcccgcattggacgagttgtattcggtgttcgcaacgccaagacgggtgccgcaggttcactgatggacgtgctgcatcatccaggcatgaaccaccgggtagaaatcacagaaggcatattggcggacgaatgtgcggcgctgttgtgtcgtttttttcgcatgcccaggcgggtctttaacgcccagaaaaaagcacaatcctctactgac

SEQ ID NO: 2182 - DNA, 96 bp, synthetic construct
  source 1..96: mol_type = other DNA; note = Description of Artificial Sequence: Synthetic oligonucleotide
tctggtggttcttctggtggttctagcggcagcgagactcccgggacctcagagtccgccacacccgaaagttctggtggttcttctggtggttct

SEQ ID NO: 2183 - DNA, 4101 bp, synthetic construct
  source 1..4101: mol_type = other DNA; note = Description of Artificial Sequence: Synthetic polynucleotide
gacaagaagtacagcatcggcctggccatcggcaccaactctgtgggctgggccgtgatcaccgacgagtacaaggtgcccagcaagaaattcaaggtgctgggcaacaccgaccggcacagcatcaagaagaacctgatcggagccctgctgttcgacagcggcgaaacagccgaggccacccggctgaagagaaccgccagaagaagatacaccagacggaagaaccggatctgctatctgcaagagatcttcagcaacgagatggccaaggtggacgacagcttcttccacagactggaagagtccttcctggtggaagaggataagaagcacgagcggcaccccatcttcggcaacatcgtggacgaggtggcctaccacgagaagtaccccaccatctaccacctgagaaagaaactggtggacagcaccgacaaggccgacctgcggctgatctatctggccctggcccacatgatcaagttccggggccacttcctgatcgagggcgacctgaaccccgacaacagcgacgtggacaagctgttcatccagctggtgcagacctacaaccagctgttcgaggaaaaccccatcaacgccagcggcgtggacgccaaggccatcctgtctgccagactgagcaagagcagacggctggaaaatctgatcgcccagctgcccggcgagaagaagaatggcctgttcggaaacctgattgccctgagcctgggcctgacccccaacttcaagagcaacttcgacctggccgaggatgccaaactgcagctgagcaaggacacctacgacgacgacctggacaacctgctggcccagatcggcgaccagtacgccgacctgtttctggccgccaagaacctgtccgacgccatcctgctgagcgacatcctgagagtgaacaccgagatcaccaaggcccccctgagcgcctctatgatcaagagatacgacgagcaccaccaggacctgaccctgctgaaagctctcgtgcggcagcagctgcctgagaagtacaaagagattttcttcgaccagagcaagaacggctacgccggctacattgacggcggagccagccaggaagagttctacaagttcatcaagcccatcctggaaaagatggacggcaccgaggaactgctcgtgaagctgaacagagaggacctgctgcggaagcagcggaccttcgacaacggcagcatcccccaccagatccacctgggagagctgcacgccattctgcggcggcaggaagatttttacccattcctgaaggacaaccgggaaaagatcgagaagatcctgaccttccgcatcccctactacgtgggccctctggccaggggaaacagcagattcgcctggatgaccagaaagagcgaggaaaccatcaccccctggaacttcgaggaagtggtggacaagggcgcttccgcccagagcttcatcgagcggatgaccaacttcgataagaacctgcccaacgagaaggtgctgcccaagcacagcctgctgtacgagtacttcaccgtgtataacgagctgaccaaagtgaaatacgtgaccgagggaatgagaaagcccgccttcctgagcggcgagcagaaaaaggccatcgtggacctgctgttcaagaccaaccggaaagtgaccgtgaagcagctgaaagaggactacttcaagaaaatcgagtgcttcgactccgtggaaatctccggcgtggaagatcggttcaacgcctccctgggcacataccacgatctgctgaaaattatcaaggacaaggacttcctggacaatgaggaaaacgaggacattctggaagatatcgtgctgaccctgacactgtttgaggacagagagatgatcgaggaacggctgaaaacctatgcccacctgttcgacgacaaagtgatgaagcagctgaagcggcggagatacaccggctggggcaggctgagccggaagctgatcaacggcatccgggacaagcagtccggcaagacaatcctggatttcctgaagtccgacggcttcgccaacagaaacttcatgcagctgatccacgacgacagcctgacctttaaagaggacatccagaaagcccaggtgtccggccagggcgatagcctgcacgagcacattgccaatctggccggcagccccgccattaagaagggcatcctgcagacagtgaaggtggtggacgagctcgtgaaagtgatgggccggcacaagcccgagaacatcgtgatcgaaatggccagagagaaccagaccacccagaagggacagaagaacagccgcgagagaatgaagcggatcgaagagggcatcaaagagctgggcagccagatcctgaaagaacaccccgtggaaaacacccagctgcagaacgagaagctgtacctgtactacctgcagaatgggcgggatatgtacgtggaccaggaactggacatcaaccggctgtccgactacgatgtggaccatatcgtgcctcagagctttctgaaggacgactccatcgacaacaaggtgctgaccagaagcgacaagaaccggggcaagagcgacaacgtgccctccgaagaggtcgtgaagaagatgaagaactactggcggcagctgctgaacgccaagctgattacccagagaaagttcgacaatctgaccaaggccgagagaggcggcctgagcgaactggataaggccggcttcatcaagagacagctggtggaaacccggcagatcacaaagcacgtggcacagatcctggactcccggatgaacactaagtacgacgagaatgacaagctgatccgggaagtgaaagtgatcaccctgaagtccaagctggtgtccgatttccggaaggatttccagttttacaaagtgcgcgagatcaacaactaccaccacgcccacgacgcctacctgaacgccgtcgtgggaaccgccctgatcaaaaagtaccctaagctggaaagcgagttcgtgtacggcgactacaaggtgtacgacgtgcggaagatgatcgccaagagcgagcaggaaatcggcaaggctaccgccaagtacttcttctacagcaacatcatgaactttttcaagaccgagattaccctggccaacggcgagatccggaagcggcctctgatcgagacaaacggcgaaaccggggagatcgtgtgggataagggccgggattttgccaccgtgcggaaagtgctgagcatgccccaagtgaatatcgtgaaaaagaccgaggtgcagacaggcggcttcagcaaagagtctatcctgcccaagaggaacagcgataagctgatcgccagaaagaaggactgggaccctaagaagtacggcggcttcgacagccccaccgtggcctattctgtgctggtggtggccaaagtggaaaagggcaagtccaagaaactgaagagtgtgaaagagctgctggggatcaccatcatggaaagaagcagcttcgagaagaatcccatcgactttctggaagccaagggctacaaagaagtgaaaaaggacctgatcatcaagctgcctaagtactccctgttcgagctggaaaacggccggaagagaatgctggcctctgccggcgaactgcagaagggaaacgaactggccctgccctccaaatatgtgaacttcctgtacctggccagccactatgagaagctgaagggctcccccgaggataatgagcagaaacagctgtttgtggaacagcacaagcactacctggacgagatcatcgagcagatcagcgagttctccaagagagtgatcctggccgacgctaatctggacaaagtgctgtccgcctacaacaagcaccgggataagcccatcagagagcaggccgagaatatcatccacctgtttaccctgaccaatctgggagcccctgccgccttcaagtactttgacaccaccatcgaccggaagaggtacaccagcaccaaagaggtgctggacgccaccctgatccaccagagcatcaccggcctgtacgagacacggatcgacctgtctcagctgggaggtgac

SEQ ID NO: 2184 - DNA, 12 bp, synthetic construct
  source 1..12: mol_type = other DNA; note = Description of Artificial Sequence: Synthetic oligonucleotide
gagggagctgat

SEQ ID NO: 2185 - DNA, 57 bp, synthetic construct
  source 1..57: mol_type = other DNA; note = Description of Artificial Sequence: Synthetic oligonucleotide
aagcgcaccgccgatggttccgagttcgaaagccccaagaagaagaggaaagtctaa

SEQ ID NO: 2186 - RNA, 4380 nt, synthetic construct
  source 1..4380: mol_type = other RNA; note = Description of Artificial Sequence: Synthetic polynucleotide
  modified_base 7: mod_base = OTHER; note = N1-methylpseudouridine
  modified_base 25: mod_base = OTHER; note = N1-methylpseudouridine
  modified_base 35: mod_base = OTHER; note = N1-methylpseudouridine
  modified_base 37: mod_base = OTHER; note = N1-methylpseudouridine
  modified_base 49: mod_base = OTHER; note = N1-methylpseudouridine
  modified_base 73: mod_base = OTHER; note = N1-methylpseudouridine
  modified_base 79: mod_base = OTHER; note = N1-methylpseudouridine
  modified_base 88: mod_base = OTHER; note = N1-methylpseudouridine
  modified_base 108: mod_base = OTHER; note = N1-methylpseudouridine
  modified_base 115: mod_base = OTHER; note = N1-methylpseudouridine
  modified_base 121: mod_base = OTHER; note = N1-methylpseudouridine
  modified_base 127: mod_base = OTHER; note = N1-methylpseudouridine
  modified_base 142: mod_base = OTHER; note = N1-methylpseudouridine
  modified_base 147: mod_base = OTHER; note = N1-methylpseudouridine
  modified_base 154: mod_base = OTHER; note = N1-methylpseudouridine
  modified_base 157: mod_base = OTHER; note = N1-methylpseudouridine
  modified_base 168: mod_base = OTHER; note = N1-methylpseudouridine
  modified_base 175: mod_base = OTHER; note = N1-methylpseudouridine
  modified_base 189: mod_base = OTHER; note = N1-methylpseudouridine
  modified_base 190: mod_base = OTHER; note = N1-methylpseudouridine
  modified_base 196: mod_base = OTHER; note = N1-methylpseudouridine
  modified_base 199: mod_base = OTHER; note = N1-methylpseudouridine
  modified_base 223: mod_base = OTHER; note = N1-methylpseudouridine
  modified_base 235: mod_base = OTHER; note = N1-methylpseudouridine
  modified_base 238: mod_base = OTHER; note = N1-methylpseudouridine
  modified_base 247: mod_base = OTHER; note = N1-methylpseudouridine
  modified_base 250: mod_base = OTHER; note = N1-methylpseudouridine
  modified_base 252: mod_base = OTHER; note = N1-methylpseudouridine
  modified_base 253: mod_base = OTHER; note = N1-methylpseudouridine
  modified_base 286: mod_base = OTHER; note = N1-methylpseudouridine
  modified_base 309: mod_base = OTHER; note = N1-methylpseudouridine
  modified_base 331: mod_base = OTHER; note = N1-methylpseudouridine
  modified_base 333: mod_base = OTHER; note = N1-methylpseudouridine
  modified_base 336: mod_base = OTHER; note = N1-methylpseudouridine
  modified_base 340: mod_base = OTHER; note = N1-methylpseudouridine
  modified_base 349: mod_base = OTHER; note = N1-methylpseudouridine
  modified_base 351: mod_base = OTHER; note = N1-methylpseudouridine
  modified_base 352: mod_base = OTHER; note = N1-methylpseudouridine
  modified_base 364: mod_base = OTHER; note = N1-methylpseudouridine
  modified_base 373: mod_base = OTHER; note = N1-methylpseudouridine
  modified_base 384: mod_base = OTHER; note = N1-methylpseudouridine
  modified_base 385: mod_base = OTHER; note = N1-methylpseudouridine
  modified_base 387: mod_base = OTHER; note = N1-methylpseudouridine
  modified_base 388: mod_base = OTHER; note = N1-methylpseudouridine
  modified_base 397: mod_base = OTHER; note = N1-methylpseudouridine
  modified_base 408: mod_base = OTHER; note = N1-methylpseudouridine
  modified_base 409: mod_base = OTHER; note = N1-methylpseudouridine
  modified_base 412: mod_base = OTHER; note = N1-methylpseudouridine
  modified_base 415: mod_base = OTHER; note = N1-methylpseudouridine
  modified_base 448: mod_base = OTHER; note = N1-methylpseudouridine
  modified_base 450: mod_base = OTHER; note = N1-methylpseudouridine
  modified_base 451: mod_base = OTHER; note = N1-methylpseudouridine
  modified_base 460: mod_base = OTHER; note = N1-methylpseudouridine
  modified_base 463: mod_base = OTHER; note = N1-methylpseudouridine
  modified_base 472: mod_base = OTHER; note = N1-methylpseudouridine
  modified_base 477: mod_base = OTHER; note = N1-methylpseudouridine
  modified_base 489: mod_base = OTHER; note = N1-methylpseudouridine
  modified_base 499: mod_base = OTHER; note = N1-methylpseudouridine
  modified_base 501: mod_base = OTHER; note = N1-methylpseudouridine
  modified_base 508: mod_base = OTHER; note = N1-methylpseudouridine
  modified_base 520: mod_base = OTHER; note = N1-methylpseudouridine
  modified_base 523: mod_base = OTHER; note = N1-methylpseudouridine
  modified_base 547: mod_base = OTHER; note = N1-methylpseudouridine
  modified_base 553: mod_base = OTHER; note = N1-methylpseudouridine
  modified_base 556: mod_base = OTHER; note = N1-methylpseudouridine
  modified_base 558: mod_base = OTHER; note = N1-methylpseudouridine
  modified_base 562: mod_base = OTHER; note = N1-methylpseudouridine
  modified_base 568: mod_base = OTHER; note = N1-methylpseudouridine
  modified_base 577: mod_base = OTHER; note = N1-methylpseudouridine
  modified_base 580: mod_base = OTHER; note = N1-methylpseudouridine
  modified_base 585: mod_base = OTHER; note = N1-methylpseudouridine
  modified_base 586: mod_base = OTHER; note = N1-methylpseudouridine
  modified_base 597: mod_base = OTHER; note = N1-methylpseudouridine
  modified_base 598: mod_base = OTHER; note = N1-methylpseudouridine
  modified_base 601: mod_base = OTHER; note = N1-methylpseudouridine
  modified_base 604: mod_base = OTHER; note = N1-methylpseudouridine
  modified_base 616: mod_base = OTHER; note = N1-methylpseudouridine
  modified_base 637: mod_base = OTHER; note = N1-methylpseudouridine
  modified_base 646: mod_base = OTHER; note = N1-methylpseudouridine
  modified_base 648: mod_base = OTHER; note = N1-methylpseudouridine
  modified_base 649: mod_base = OTHER; note = N1-methylpseudouridine
  modified_base 652: mod_base = OTHER; note = N1-methylpseudouridine
  modified_base 658: mod_base = OTHER; note = N1-methylpseudouridine
  modified_base 661: mod_base = OTHER; note = N1-methylpseudouridine
  modified_base 669: mod_base = OTHER; note = N1-methylpseudouridine
  modified_base 679: mod_base = OTHER; note = N1-methylpseudouridine
  modified_base 681: mod_base = OTHER; note = N1-methylpseudouridine
  modified_base 682: mod_base = OTHER; note = N1-methylpseudouridine
  modified_base 697: mod_base = OTHER; note = N1-methylpseudouridine
  modified_base 712: mod_base = OTHER; note = N1-methylpseudouridine
  modified_base 727: mod_base = OTHER; note = N1-methylpseudouridine
  modified_base 730: mod_base = OTHER; note = N1-methylpseudouridine
  modified_base 742: mod_base = OTHER; note = N1-methylpseudouridine
  modified_base 760: mod_base = OTHER; note = N1-methylpseudouridine
  modified_base 769: mod_base = OTHER; note = N1-methylpseudouridine
  modified_base 772: mod_base = OTHER; note = N1-methylpseudouridine
  modified_base 781: mod_base = OTHER; note = N1-methylpseudouridine
  modified_base 805: mod_base = OTHER; note = N1-methylpseudouridine
  modified_base 807: mod_base = OTHER; note = N1-methylpseudouridine
  modified_base 808: mod_base = OTHER; note = N1-methylpseudouridine
  modified_base 817: mod_base = OTHER; note = N1-methylpseudouridine
  modified_base 820: mod_base = OTHER; note = N1-methylpseudouridine
  modified_base 826: mod_base = OTHER; note = N1-methylpseudouridine
  modified_base 832: mod_base = OTHER; note = N1-methylpseudouridine
  modified_base 838: mod_base = OTHER; note = N1-methylpseudouridine
  modified_base 849: mod_base = OTHER; note = N1-methylpseudouridine
  modified_base 850: mod_base = OTHER; note = N1-methylpseudouridine
  modified_base 861: mod_base = OTHER; note = N1-methylpseudouridine
  modified_base 862: mod_base = OTHER; note = N1-methylpseudouridine
  modified_base 868: mod_base = OTHER; note = N1-methylpseudouridine
  modified_base 886: mod_base = OTHER; note = N1-methylpseudouridine
  modified_base 892: mod_base = OTHER; note = N1-methylpseudouridine
  modified_base 906: mod_base = OTHER; note = N1-methylpseudouridine
  modified_base 919: mod_base = OTHER; note = N1-methylpseudouridine
  modified_base 928: mod_base = OTHER; note = N1-methylpseudouridine
  modified_base 931: mod_base = OTHER; note = N1-methylpseudouridine
  modified_base 940: mod_base = OTHER; note = N1-methylpseudouridine
  modified_base 951: mod_base = OTHER; note = N1-methylpseudouridine
  modified_base 961: mod_base = OTHER; note = N1-methylpseudouridine
  modified_base 963: mod_base = OTHER; note = N1-methylpseudouridine
  modified_base 964: mod_base = OTHER; note = N1-methylpseudouridine
  modified_base 967: mod_base = OTHER; note = N1-methylpseudouridine
  modified_base 982: mod_base = OTHER; note = N1-methylpseudouridine
  modified_base 994: mod_base = OTHER; note = N1-methylpseudouridine
  modified_base 997: mod_base = OTHER; note = N1-methylpseudouridine
  modified_base 1000: mod_base = OTHER; note = N1-methylpseudouridine
  modified_base 1009: mod_base = OTHER; note = N1-methylpseudouridine
  modified_base 1012: mod_base = OTHER; note = N1-methylpseudouridine
  modified_base 1018: mod_base = OTHER; note = N1-methylpseudouridine
  modified_base 1030: mod_base = OTHER; note = N1-methylpseudouridine
  modified_base 1045: mod_base = OTHER; note = N1-methylpseudouridine
  modified_base 1057: mod_base = OTHER; note = N1-methylpseudouridine
  modified_base 1060: mod_base = OTHER; note = N1-methylpseudouridine
  modified_base 1068: mod_base = OTHER; note = N1-methylpseudouridine
  modified_base 1090: mod_base = OTHER; note = N1-methylpseudouridine
  modified_base 1096: mod_base = OTHER; note = N1-methylpseudouridine
  modified_base 1099: mod_base = OTHER; note = N1-methylpseudouridine
  modified_base 1108: mod_base = OTHER; note = N1-methylpseudouridine
  modified_base 1111: mod_base = OTHER; note = N1-methylpseudouridine
  modified_base 1123: mod_base = OTHER; note = N1-methylpseudouridine
  modified_base 1134: mod_base = OTHER; note = N1-methylpseudouridine
  modified_base 1144: mod_base = OTHER; note = N1-methylpseudouridine
  modified_base 1146: mod_base = OTHER; note = N1-methylpseudouridine
  modified_base 1147: mod_base = OTHER; note = N1-methylpseudouridine
  modified_base 1149: mod_base = OTHER; note = N1-methylpseudouridine
  modified_base 1150: mod_base = OTHER; note = N1-methylpseudouridine
  modified_base 1170: mod_base = OTHER; note = N1-methylpseudouridine
  modified_base 1179: mod_base = OTHER; note = N1-methylpseudouridine
  modified_base 1183: mod_base = OTHER; note = N1-methylpseudouridine
  modified_base 1209: mod_base = OTHER; note = N1-methylpseudouridine
  modified_base 1210: mod_base = OTHER; note = N1-methylpseudouridine
  modified_base 1212: mod_base = OTHER; note = N1-methylpseudouridine
  modified_base 1218: mod_base = OTHER; note = N1-methylpseudouridine
  modified_base 1219: mod_base = OTHER; note = N1-methylpseudouridine
  modified_base 1222: mod_base = OTHER; note = N1-methylpseudouridine
  modified_base 1231: mod_base = OTHER; note = N1-methylpseudouridine
  modified_base 1234: mod_base = OTHER; note = N1-methylpseudouridine
  modified_base 1243: mod_base = OTHER; note = N1-methylpseudouridine
  modified_base 1261: mod_base = OTHER; note = N1-methylpseudouridine
  modified_base 1264: mod_base = OTHER; note = N1-methylpseudouridine
  modified_base 1267: mod_base = OTHER; note = N1-methylpseudouridine
  modified_base 1273: mod_base = OTHER; note = N1-methylpseudouridine
  modified_base 1288: mod_base = OTHER; note = N1-methylpseudouridine
  modified_base 1291: mod_base = OTHER; note = N1-methylpseudouridine
  modified_base 1308: mod_base = OTHER; note = N1-methylpseudouridine
  modified_base 1309: mod_base = OTHER; note = N1-methylpseudouridine
  modified_base 1324: mod_base = OTHER; note = N1-methylpseudouridine
  modified_base 1336: mod_base = OTHER; note = N1-methylpseudouridine
  modified_base 1342: mod_base = OTHER; note = N1-methylpseudouridine
  modified_base 1351: mod_base = OTHER; note = N1-methylpseudouridine
  modified_base 1360: mod_base = OTHER; note = N1-methylpseudouridine
  modified_base 1363: mod_base = OTHER; note = N1-methylpseudouridine
  modified_base 1380: mod_base = OTHER; note = N1-methylpseudouridine
  modified_base 1381: mod_base = OTHER; note = N1-methylpseudouridine
  modified_base 1383: mod_base = OTHER; note = N1-methylpseudouridine
  modified_base 1389: mod_base = OTHER; note = N1-methylpseudouridine
  modified_base 1390: mod_base = OTHER; note = N1-methylpseudouridine
  modified_base 1393: mod_base = OTHER; note = N1-methylpseudouridine
  modified_base 1414: mod_base = OTHER; note = N1-methylpseudouridine
  modified_base 1423: mod_base = OTHER; note = N1-methylpseudouridine
  modified_base 1426: mod_base = OTHER; note = N1-methylpseudouridine
  modified_base 1431: mod_base = OTHER; note = N1-methylpseudouridine
  modified_base 1432: mod_base = OTHER; note = N1-methylpseudouridine
  modified_base 1438: mod_base = OTHER; note = N1-methylpseudouridine
  modified_base 1443: mod_base = OTHER; note = N1-methylpseudouridine
  modified_base 1446: mod_base = OTHER; note = N1-methylpseudouridine
  modified_base 1450: mod_base = OTHER; note = N1-methylpseudouridine
  modified_base 1459: mod_base = OTHER; note = N1-methylpseudouridine
  modified_base 1479: mod_base = OTHER; note = N1-methylpseudouridine
  modified_base 1480: mod_base = OTHER; note = N1-methylpseudouridine
  modified_base 1485: mod_base = OTHER; note = N1-methylpseudouridine
  modified_base 1489: mod_base = OTHER; note = N1-methylpseudouridine
  modified_base 1513: mod_base = OTHER; note = N1-methylpseudouridine
  modified_base 1521: mod_base = OTHER; note = N1-methylpseudouridine
  modified_base 1527: mod_base = OTHER; note = N1-methylpseudouridine
  modified_base 1528: mod_base = OTHER; note = N1-methylpseudouridine
  modified_base 1537: mod_base = OTHER; note = N1-methylpseudouridine
  modified_base 1540: mod_base = OTHER; note = N1-methylpseudouridine
  modified_base 1566: mod_base = OTHER; note = N1-methylpseudouridine
  modified_base 1567: mod_base = OTHER; note = N1-methylpseudouridine
  modified_base 1570: mod_base = OTHER; note = N1-methylpseudouridine
  modified_base 1579: mod_base = OTHER; note = N1-methylpseudouridine
  modified_base 1587: mod_base = OTHER; note = N1-methylpseudouridine
  modified_base 1588: mod_base = OTHER; note = N1-methylpseudouridine
  modified_base 1600: mod_base = OTHER; note = N1-methylpseudouridine
  modified_base 1615: mod_base = OTHER; note = N1-methylpseudouridine
  modified_base 1618: mod_base = OTHER; note = N1-methylpseudouridine
  modified_base 1633: mod_base = OTHER; note = N1-methylpseudouridine
  modified_base 1636: mod_base = OTHER; note = N1-methylpseudouridine
  modified_base 1638: mod_base = OTHER; note = N1-methylpseudouridine
  modified_base 1644: mod_base = OTHER; note = N1-methylpseudouridine
  modified_base 1647: mod_base = OTHER; note = N1-methylpseudouridine
  modified_base 1648: mod_base = OTHER; note = N1-methylpseudouridine
  modified_base 1654: mod_base = OTHER; note = N1-methylpseudouridine
  modified_base 1656: mod_base = OTHER; note = N1-methylpseudouridine
  modified_base 1666: mod_base = OTHER; note = N1-methylpseudouridine
  modified_base 1675: mod_base = OTHER; note = N1-methylpseudouridine
  modified_base 1680: mod_base = OTHER; note = N1-methylpseudouridine
  modified_base 1684: mod_base = OTHER; note = N1-methylpseudouridine
  modified_base 1696: mod_base = OTHER; note = N1-methylpseudouridine
  modified_base 1710: mod_base = OTHER; note = N1-methylpseudouridine
  modified_base 1711: mod_base = OTHER; note = N1-methylpseudouridine
  modified_base 1714: mod_base = OTHER; note = N1-methylpseudouridine
  modified_base 1738: mod_base = OTHER; note = N1-methylpseudouridine
  modified_base 1741: mod_base = OTHER; note = N1-methylpseudouridine
  modified_base 1747: mod_base = OTHER; note = N1-methylpseudouridine
  modified_base 1750: mod_base = OTHER; note = N1-methylpseudouridine
  modified_base 1752: mod_base = OTHER; note = N1-methylpseudouridine
  modified_base 1753: mod_base = OTHER; note = N1-methylpseudouridine
  modified_base 1771: mod_base = OTHER; note = N1-methylpseudouridine
  modified_base 1777: mod_base = OTHER; note = N1-methylpseudouridine
  modified_base 1786: mod_base = OTHER; note = N1-methylpseudouridine
  modified_base 1797: mod_base = OTHER; note = N1-methylpseudouridine
  modified_base 1800: mod_base = OTHER; note = N1-methylpseudouridine
  modified_base 1801: mod_base = OTHER; note = N1-methylpseudouridine
  modified_base 1810: mod_base = OTHER; note = N1-methylpseudouridine
  modified_base 1815: mod_base = OTHER; note = N1-methylpseudouridine
  modified_base 1818: mod_base = OTHER; note = N1-methylpseudouridine
  modified_base 1819: mod_base = OTHER; note = N1-methylpseudouridine
  modified_base 1828: mod_base = OTHER; note = N1-methylpseudouridine
  modified_base 1834: mod_base = OTHER; note = N1-methylpseudouridine
  modified_base 1843: mod_base = OTHER; note = N1-methylpseudouridine
  modified_base 1854: mod_base = OTHER; note = N1-methylpseudouridine
  modified_base 1855: mod_base = OTHER; note = N1-methylpseudouridine
  modified_base 1867: mod_base = OTHER; note = N1-methylpseudouridine
  modified_base 1875: mod_base = OTHER; note = N1-methylpseudouridine
  modified_base 1885: mod_base = OTHER; note = N1-methylpseudouridine
  modified_base 1888: mod_base = OTHER; note = N1-methylpseudouridine
  modified_base 1894: mod_base = OTHER; note = N1-methylpseudouridine
  modified_base 1897: mod_base = OTHER; note = N1-methylpseudouridine
  modified_base 1911: mod_base = OTHER; note = N1-methylpseudouridine
  modified_base 1912: mod_base = OTHER; note = N1-methylpseudouridine
  modified_base 1915: mod_base = OTHER; note = N1-methylpseudouridine
  modified_base 1939: mod_base = OTHER; note = N1-methylpseudouridine
  modified_base 1942: mod_base = OTHER; note = N1-methylpseudouridine
  modified_base 1951: mod_base = OTHER; note = N1-methylpseudouridine
  modified_base 1954: mod_base = OTHER; note = N1-methylpseudouridine
  modified_base 1957: mod_base = OTHER; note = N1-methylpseudouridine
  modified_base 1963: mod_base = OTHER; note = N1-methylpseudouridine
  modified_base 1969: mod_base = OTHER; note = N1-methylpseudouridine
  modified_base 1971: mod_base = OTHER; note = N1-methylpseudouridine
  modified_base 1972: mod_base = OTHER; note = N1-methylpseudouridine
  modified_base 1987: mod_base = OTHER; note = N1-methylpseudouridine
  modified_base 1990: mod_base = OTHER; note = N1-methylpseudouridine
  modified_base 2002: mod_base = OTHER; note = N1-methylpseudouridine
  modified_base 2010: mod_base = OTHER; note = N1-methylpseudouridine
  modified_base 2020: mod_base = OTHER; note = N1-methylpseudouridine
  modified_base 2022: mod_base = OTHER; note = N1-methylpseudouridine
  modified_base 2023: mod_base = OTHER; note = N1-methylpseudouridine
  modified_base 2035: mod_base = OTHER; note = N1-methylpseudouridine
  modified_base 2038: mod_base = OTHER; note = N1-methylpseudouridine
  modified_base 2047: mod_base = OTHER; note = N1-methylpseudouridine
  modified_base 2061: mod_base = OTHER; note = N1-methylpseudouridine
  modified_base 2070: mod_base = OTHER; note = N1-methylpseudouridine
  modified_base 2080: mod_base = OTHER; note = N1-methylpseudouridine
  modified_base 2092: mod_base = OTHER; note = N1-methylpseudouridine
  modified_base 2095: mod_base = OTHER; note = N1-methylpseudouridine
  modified_base 2104: mod_base = OTHER; note = N1-methylpseudouridine
  modified_base 2131: mod_base = OTHER; note = N1-methylpseudouridine
  modified_base 2134: mod_base = OTHER; note = N1-methylpseudouridine
  modified_base 2139: mod_base = OTHER; note = N1-methylpseudouridine
  modified_base 2140: mod_base = OTHER; note = N1-methylpseudouridine
  modified_base 2143: mod_base = OTHER; note = N1-methylpseudouridine
  modified_base 2157: mod_base = OTHER; note = N1-methylpseudouridine
  modified_base 2158: mod_base = OTHER; note = N1-methylpseudouridine
  modified_base 2172: mod_base = OTHER; note = N1-methylpseudouridine
  modified_base 2173: mod_base = OTHER; note = N1-methylpseudouridine
  modified_base 2176: mod_base = OTHER; note = N1-methylpseudouridine
  modified_base 2182: mod_base = OTHER; note = N1-methylpseudouridine
  modified_base 2185: mod_base = OTHER; note = N1-methylpseudouridine
  modified_base 2200: mod_base = OTHER; note = N1-methylpseudouridine
  modified_base 2205: mod_base = OTHER; note = N1-methylpseudouridine
  modified_base 2206: mod_base = OTHER; note = N1-methylpseudouridine
  modified_base 2218: mod_base = OTHER; note = N1-methylpseudouridine
  modified_base 2233: mod_base = OTHER; note = N1-methylpseudouridine
  modified_base 2254: mod_base = OTHER; note = N1-methylpseudouridine
  modified_base 2266: mod_base = OTHER; note = N1-methylpseudouridine
  modified_base 2275: mod_base = OTHER; note = N1-methylpseudouridine
  modified_base 2293: mod_base = OTHER; note = N1-methylpseudouridine
  modified_base 2305: mod_base = OTHER; note = N1-methylpseudouridine
  modified_base 2308: mod_base = OTHER; note = N1-methylpseudouridine
  modified_base 2317: mod_base = OTHER; note = N1-methylpseudouridine
  modified_base 2323: mod_base = OTHER; note = N1-methylpseudouridine
  modified_base 2326: mod_base = OTHER; note = N1-methylpseudouridine
  modified_base 2335: mod_base = OTHER; note = N1-methylpseudouridine
  modified_base 2338: mod_base = OTHER; note = N1-methylpseudouridine
  modified_base 2344: mod_base = OTHER; note = N1-methylpseudouridine
  modified_base 2347: mod_base = OTHER; note = N1-methylpseudouridine
  modified_base 2371: mod_base = OTHER; note = N1-methylpseudouridine
  modified_base 2374: mod_base = OTHER; note = N1-methylpseudouridine
  modified_base 2377: mod_base = OTHER; note = N1-methylpseudouridine
  modified_base 2383: mod_base = OTHER; note = N1-methylpseudouridine
  modified_base 2437: mod_base = OTHER; note = N1-methylpseudouridine
  modified_base 2446: mod_base = OTHER; note = N1-methylpseudouridine
  modified_base 2458: mod_base = OTHER; note = N1-methylpseudouridine
  modified_base 2467: mod_base = OTHER; note = N1-methylpseudouridine
  modified_base 2479: mod_base = OTHER; note = N1-methylpseudouridine
  modified_base 2482: mod_base = OTHER; note = N1-methylpseudouridine
  modified_base 2497: mod_base = OTHER; note = N1-methylpseudouridine
  modified_base 2512: mod_base = OTHER; note = N1-methylpseudouridine
  modified_base 2527: mod_base = OTHER; note = N1-methylpseudouridine
  modified_base 2529: mod_base = OTHER; note = N1-methylpseudouridine
  modified_base 2533: mod_base = OTHER; note = N1-methylpseudouridine
  modified_base 2535: mod_base = OTHER; note = N1-methylpseudouridine
  modified_base 2538: mod_base = OTHER; note = N1-methylpseudouridine
  modified_base 2542: mod_base = OTHER; note = N1-methylpseudouridine
  modified_base 2560: mod_base = OTHER; note = N1-methylpseudouridine
  modified_base 2562: mod_base = OTHER; note = N1-methylpseudouridine
  modified_base 2566: mod_base = OTHER; note = N1-methylpseudouridine
  modified_base 2578: mod_base = OTHER; note = N1-methylpseudouridine
  modified_base 2584: mod_base = OTHER; note = N1-methylpseudouridine
  modified_base 2593: mod_base = OTHER; note = N1-methylpseudouridine
  modified_base 2601: mod_base = OTHER; note = N1-methylpseudouridine
  modified_base 2608: mod_base = OTHER; note = N1-methylpseudouridine
  modified_base 2617: mod_base = OTHER; note = N1-methylpseudouridine
  modified_base 2620: mod_base = OTHER; note = N1-methylpseudouridine
  modified_base 2631: mod_base = OTHER; note = N1-methylpseudouridine
  modified_base 2632: mod_base = OTHER; note = N1-methylpseudouridine
  modified_base 2635: mod_base = OTHER; note = N1-methylpseudouridine
  modified_base 2650: mod_base = OTHER; note = N1-methylpseudouridine
  modified_base 2662: mod_base = OTHER; note = N1-methylpseudouridine
  modified_base 2665: mod_base = OTHER; note = N1-methylpseudouridine
  modified_base 2704: mod_base = OTHER; note = N1-methylpseudouridine
  modified_base 2719: mod_base = OTHER; note = N1-methylpseudouridine
  modified_base 2722: mod_base = OTHER; note = N1-methylpseudouridine
  modified_base 2731: mod_base = OTHER; note = N1-methylpseudouridine
  modified_base 2739: mod_base = OTHER; note = N1-methylpseudouridine
  modified_base 2742: mod_base = OTHER; note = N1-methylpseudouridine
  modified_base 2752: mod_base = OTHER; note = N1-methylpseudouridine
  modified_base 2755: mod_base = OTHER; note = N1-methylpseudouridine
  modified_base 2767: mod_base = OTHER; note = N1-methylpseudouridine
  modified_base 2770: mod_base = OTHER; note = N1-methylpseudouridine
  modified_base 2784: mod_base = OTHER; note = N1-methylpseudouridine
  modified_base 2785: mod_base = OTHER; note = N1-methylpseudouridine
  modified_base 2794: mod_base = OTHER; note = N1-methylpseudouridine
  modified_base 2818: mod_base = OTHER; note = N1-methylpseudouridine
  modified_base 2827: mod_base = OTHER; note = N1-methylpseudouridine
  modified_base 2841: mod_base = OTHER; note = N1-methylpseudouridine
  modified_base 2842: mod_base = OTHER; note = N1-methylpseudouridine
  modified_base 2845: mod_base = OTHER; note = N1-methylpseudouridine
  modified_base 2857: mod_base = OTHER; note = N1-methylpseudouridine
  modified_base 2860: mod_base = OTHER; note = N1-methylpseudouridine
  modified_base 2875: mod_base = OTHER; note = N1-methylpseudouridine
  modified_base 2887: mod_base = OTHER; note = N1-methylpseudouridine
  modified_base 2896: mod_base = OTHER; note = N1-methylpseudouridine
  modified_base 2899: mod_base = OTHER; note = N1-methylpseudouridine
  modified_base 2911: mod_base = OTHER; note = N1-methylpseudouridine
  modified_base 2922: mod_base = OTHER; note = N1-methylpseudouridine
  modified_base 2941: mod_base = OTHER; note = N1-methylpseudouridine
  modified_base 2944: mod_base = OTHER; note = N1-methylpseudouridine
  modified_base 2953: mod_base = OTHER; note = N1-methylpseudouridine
  modified_base 2959: mod_base = OTHER; note = N1-methylpseudouridine
  modified_base 2962: mod_base = OTHER; note = N1-methylpseudouridine
  modified_base 2968: mod_base = OTHER; note = N1-methylpseudouridine
  modified_base 2980: mod_base = OTHER; note = N1-methylpseudouridine
  modified_base 2983: mod_base = OTHER; note = N1-methylpseudouridine
  modified_base 2991: mod_base = OTHER; note = N1-methylpseudouridine
  modified_base 2992: mod_base = OTHER; note = N1-methylpseudouridine
  modified_base 3003: mod_base = OTHER; note = N1-methylpseudouridine
  modified_base 3004: mod_base = OTHER; note = N1-methylpseudouridine
  modified_base 3009: mod_base = OTHER; note = N1-methylpseudouridine
  modified_base 3010: mod_base = OTHER; note = N1-methylpseudouridine
  modified_base 3012: mod_base = OTHER; note = N1-methylpseudouridine
  modified_base 3019: mod_base = OTHER; note = N1-methylpseudouridine
  modified_base 3028: mod_base = OTHER; note = N1-methylpseudouridine
  modified_base 3036: mod_base = OTHER; note = N1-methylpseudouridine
  modified_base 3057: mod_base = OTHER; note = N1-methylpseudouridine
  modified_base 3061: mod_base = OTHER; note = N1-methylpseudouridine
  modified_base 3070: mod_base = OTHER; note = N1-methylpseudouridine
  modified_base 3073: mod_base = OTHER; note = N1-methylpseudouridine
  modified_base 3085: mod_base = OTHER; note = N1-methylpseudouridine
  modified_base 3088: mod_base = OTHER; note = N1-methylpseudouridine
  modified_base 3096: mod_base = OTHER; note = N1-methylpseudouridine
  modified_base 3106: mod_base = OTHER; note = N1-methylpseudouridine
  modified_base 3117: mod_base = OTHER; note = N1-methylpseudouridine
  modified_base 3118: mod_base = OTHER; note = N1-methylpseudouridine
  modified_base 3121: mod_base = OTHER; note = N1-methylpseudouridine
  modified_base 3123: mod_base = OTHER; note = N1-methylpseudouridine
  modified_base 3132: mod_base = OTHER; note = N1-methylpseudouridine
  modified_base 3139: mod_base = OTHER; note = N1-methylpseudouridine
  modified_base 3141: mod_base = OTHER; note = N1-methylpseudouridine
  modified_base 3148: mod_base = OTHER; note = N1-methylpseudouridine
  modified_base 3157: mod_base = OTHER; note = N1-methylpseudouridine
  modified_base 3160: mod_base = OTHER; note = N1-methylpseudouridine
  modified_base 3181: mod_base = OTHER; note = N1-methylpseudouridine
  modified_base 3201: mod_base = OTHER; note = N1-methylpseudouridine
  modified_base 3204: mod_base = OTHER; note = N1-methylpseudouridine
  modified_base 3205: mod_base = OTHER; note = N1-methylpseudouridine
  modified_base 3207: mod_base = OTHER; note = N1-methylpseudouridine
  modified_base 3208: mod_base = OTHER; note = N1-methylpseudouridine
  modified_base 3210: mod_base = OTHER; note = N1-methylpseudouridine
  modified_base 3220: mod_base = OTHER; note = N1-methylpseudouridine
  modified_base 3223: mod_base = OTHER; note = N1-methylpseudouridine
  modified_base 3228: mod_base = OTHER; note = N1-methylpseudouridine
  modified_base 3229: mod_base = OTHER; note = N1-methylpseudouridine
  modified_base 3231: mod_base = OTHER; note = N1-methylpseudouridine
  modified_base 3232: mod_base = OTHER; note = N1-methylpseudouridine
  modified_base 3244: mod_base = OTHER; note = N1-methylpseudouridine
  modified_base 3250: mod_base = OTHER; note = N1-methylpseudouridine
  modified_base 3265: mod_base = OTHER; note = N1-methylpseudouridine
  modified_base 3280: mod_base = OTHER; note = N1-methylpseudouridine
  modified_base 3283: mod_base = OTHER; note = N1-methylpseudouridine
  modified_base 3310: mod_base = OTHER; note = N1-methylpseudouridine
  modified_base 3313: mod_base = OTHER; note = N1-methylpseudouridine
  modified_base 3315: mod_base = OTHER; note = N1-methylpseudouridine
  modified_base 3333: mod_base = OTHER; note = N1-methylpseudouridine
  modified_base 3334: mod_base = OTHER; note = N1-methylpseudouridine
  modified_base 3343: mod_base = OTHER; note = N1-methylpseudouridine
  modified_base 3352: mod_base = OTHER; note = N1-methylpseudouridine
  modified_base 3355: mod_base = OTHER; note = N1-methylpseudouridine
  modified_base 3361: mod_base = OTHER; note = N1-methylpseudouridine
  modified_base 3370: mod_base = OTHER; note = N1-methylpseudouridine
  modified_base 3376: mod_base = OTHER; note = N1-methylpseudouridine
  modified_base 3379: mod_base = OTHER; note = N1-methylpseudouridine
  modified_base 3394: mod_base = OTHER; note = N1-methylpseudouridine
  modified_base 3408: mod_base = OTHER; note = N1-methylpseudouridine
  modified_base 3409: mod_base = OTHER; note = N1-methylpseudouridine
  modified_base 3424: mod_base = OTHER; note = N1-methylpseudouridine
  modified_base 3427: mod_base = OTHER; note = N1-methylpseudouridine
  modified_base 3451: mod_base = OTHER; note = N1-methylpseudouridine
  modified_base 3454: mod_base = OTHER; note = N1-methylpseudouridine
  modified_base 3471: mod_base = OTHER; note = N1-methylpseudouridine
  modified_base 3486: mod_base = OTHER; note = N1-methylpseudouridine
  modified_base 3495: mod_base = OTHER; note = N1-methylpseudouridine
  modified_base 3496: mod_base = OTHER; note = N1-methylpseudouridine
  modified_base 3511: mod_base = OTHER; note = N1-methylpseudouridine
  modified_base 3516: mod_base = OTHER; note = N1-methylpseudouridine
  modified_base 3523: mod_base = OTHER; note = N1-methylpseudouridine
  modified_base 3526: mod_base = OTHER; note = N1-methylpseudouridine
  modified_base 3529: mod_base = OTHER; note = N1-methylpseudouridine
  modified_base 3532: mod_base = OTHER; note = N1-methylpseudouridine
  modified_base 3541: mod_base = OTHER; note = N1-methylpseudouridine
  modified_base 3565: mod_base = OTHER; note = N1-methylpseudouridine
  modified_base 3574: mod_base = OTHER; note = N1-methylpseudouridine
  modified_base 3583: mod_base = OTHER; note = N1-methylpseudouridine
  modified_base 3586: mod_base = OTHER; note = N1-methylpseudouridine
  modified_base 3592: mod_base = OTHER; note = N1-methylpseudouridine
  modified_base 3598: mod_base = OTHER; note = N1-methylpseudouridine
  modified_base 3601: mod_base = OTHER; note = N1-methylpseudouridine
  modified_base 3615: mod_base = OTHER; note = N1-methylpseudouridine
  modified_base 3616: mod_base = OTHER; note = N1-methylpseudouridine
  modified_base 3631: mod_base = OTHER; note = N1-methylpseudouridine
  modified_base 3636: mod_base = OTHER; note = N1-methylpseudouridine
  modified_base 3637: mod_base = OTHER; note = N1-methylpseudouridine
  modified_base 3640: mod_base = OTHER; note = N1-methylpseudouridine
  modified_base 3654: mod_base = OTHER; note = N1-methylpseudouridine
  modified_base 3664: mod_base = OTHER; note = N1-methylpseudouridine
  modified_base 3676: mod_base = OTHER; note = N1-methylpseudouridine
  modified_base 3679: mod_base = OTHER; note = N1-methylpseudouridine
  modified_base 3682: mod_base = OTHER; note = N1-methylpseudouridine
  modified_base 3688: mod_base = OTHER; note = N1-methylpseudouridine
  modified_base 3696: mod_base = OTHER; note = N1-methylpseudouridine
  modified_base 3703: mod_base = OTHER; note = N1-methylpseudouridine
  modified_base 3705: mod_base = OTHER; note = N1-methylpseudouridine
  modified_base 3706: mod_base = OTHER; note = N1-methylpseudouridine
  modified_base 3712: mod_base = OTHER; note = N1-methylpseudouridine
  modified_base 3733: mod_base = OTHER; note = N1-methylpseudouridine
  modified_base 3736: mod_base = OTHER; note = N1-methylpseudouridine
  modified_base 3754: mod_base = OTHER; note = N1-methylpseudouridine
  modified_base 3772: mod_base = OTHER; note = N1-methylpseudouridine
  modified_base 3778: mod_base = OTHER; note = N1-methylpseudouridine
  modified_base 3789: mod_base = OTHER; note = N1-methylpseudouridine
  modified_base 3793: mod_base = OTHER; note = N1-methylpseudouridine
  modified_base 3798: mod_base = OTHER; note = N1-methylpseudouridine
  modified_base 3799: mod_base = OTHER; note = N1-methylpseudouridine
  modified_base 3802: mod_base = OTHER; note = N1-methylpseudouridine
  modified_base 3804: mod_base = OTHER; note = N1-methylpseudouridine
  modified_base 3808: mod_base = OTHER; note = N1-methylpseudouridine
  modified_base 3819: mod_base = OTHER; note = N1-methylpseudouridine
  modified_base 3829: mod_base = OTHER; note = N1-methylpseudouridine
  modified_base 3865: mod_base = OTHER; note = N1-methylpseudouridine
  modified_base 3867: mod_base = OTHER; note = N1-methylpseudouridine
  modified_base 3868: mod_base = OTHER; note = N1-methylpseudouridine
  modified_base 3871: mod_base = OTHER; note = N1-methylpseudouridine
  modified_base 3888: mod_base = OTHER; note = N1-methylpseudouridine
  modified_base 3892: mod_base = OTHER; note = N1-methylpseudouridine
  modified_base 3901: mod_base = OTHER; note = N1-methylpseudouridine
  modified_base 3904: mod_base = OTHER; note = N1-methylpseudouridine
  modified_base 3913: mod_base = OTHER; note = N1-methylpseudouridine
  modified_base 3921: mod_base = OTHER; note = N1-methylpseudouridine
  modified_base 3922: mod_base = OTHER; note = N1-methylpseudouridine
  modified_base 3934: mod_base = OTHER; note = N1-methylpseudouridine
  modified_base 3937: mod_base = OTHER; note = N1-methylpseudouridine
  modified_base 3940: mod_base = OTHER; note = N1-methylpseudouridine
  modified_base 3955: mod_base = OTHER; note = N1-methylpseudouridine
  modified_base 3964: mod_base = OTHER; note = N1-methylpseudouridine
  modified_base 3967: mod_base = OTHER; note = N1-methylpseudouridine
  modified_base 3975: mod_base = OTHER; note = N1-methylpseudouridine
  modified_base 4000: mod_base = OTHER; note = N1-methylpseudouridine
  modified_base 4021: mod_base = OTHER; note = N1-methylpseudouridine
  modified_base 4024: mod_base = OTHER; note = N1-methylpseudouridine
  modified_base 4030: mod_base = OTHER; note = N1-methylpseudouridine
  modified_base 4032: mod_base = OTHER; note = N1-methylpseudouridine
  modified_base 4033: mod_base = OTHER; note = N1-methylpseudouridine
  modified_base 4039: mod_base = OTHER; note = N1-methylpseudouridine
  modified_base 4048: mod_base = OTHER; note = N1-methylpseudouridine
  modified_base 4065: mod_base = OTHER; note = N1-methylpseudouridine
  modified_base 4066: mod_base = OTHER; note = N1-methylpseudouridine
  modified_base 4071: mod_base = OTHER; note = N1-methylpseudouridine
  modified_base 4074: mod_base = OTHER; note = N1-methylpseudouridine
  modified_base 4075: mod_base = OTHER; note = N1-methylpseudouridine
  modified_base 4087: mod_base = OTHER; note = N1-methylpseudouridine
  modified_base 4101: mod_base = OTHER; note = N1-methylpseudouridine
  modified_base 4120: mod_base = OTHER; note = N1-methylpseudouridine
  modified_base 4123: mod_base = OTHER; note = N1-methylpseudouridine
  modified_base 4135: mod_base = OTHER; note = N1-methylpseudouridine
  modified_base 4138: mod_base = OTHER; note = N1-methylpseudouridine
  modified_base 4150: mod_base = OTHER; note = N1-methylpseudouridine
  modified_base 4159: mod_base = OTHER; note = N1-methylpseudouridine
  modified_base 4161: mod_base = OTHER; note = N1-methylpseudouridine
  modified_base 4174: mod_base = OTHER; note = N1-methylpseudouridine
  modified_base 4180: mod_base = OTHER; note = N1-methylpseudouridine
  modified_base 4189: mod_base = OTHER; note = N1-methylpseudouridine
  modified_base 4257: mod_base = OTHER; note = N1-methylpseudouridine
  modified_base 4260: mod_base = OTHER; note = N1-methylpseudouridine
  modified_base 4263: mod_base = OTHER; note = N1-methylpseudouridine
  modified_base 4274: mod_base = OTHER; note = N1-methylpseudouridine
  modified_base 4275: mod_base = OTHER; note = N1-methylpseudouridine
  modified_base 4278: mod_base = OTHER; note = N1-methylpseudouridine
  modified_base 4279: mod_base = OTHER; note = N1-methylpseudouridine
  modified_base 4284: mod_base = OTHER; note = N1-methylpseudouridine
  modified_base 4288: mod_base = OTHER; note = N1-methylpseudouridine
  modified_base 4289: mod_base = OTHER; note = N1-methylpseudouridine
  modified_base 4291: mod_base = OTHER; note = N1-methylpseudouridine
  modified_base 4299: mod_base = OTHER; note = N1-methylpseudouridine
  modified_base 4300: mod_base = OTHER; note = N1-methylpseudouridine
  modified_base 4304: mod_base = OTHER; note = N1-methylpseudouridine
  modified_base 4305: mod_base = OTHER; note = N1-methylpseudouridine
  modified_base 4307: mod_base = OTHER; note = N1-methylpseudouridine
  modified_base 4313: mod_base = OTHER; note = N1-methylpseudouridine
  modified_base 4318: mod_base = OTHER; note = N1-methylpseudouridine
  modified_base 4319: mod_base = OTHER; note = N1-methylpseudouridine
  modified_base 4321: mod_base = OTHER; note = N1-methylpseudouridine
  modified_base 4322: mod_base = OTHER; note = N1-methylpseudouridine
  modified_base 4324: mod_base = OTHER; note = N1-methylpseudouridine
  modified_base 4326: mod_base = OTHER; note = N1-methylpseudouridine
  modified_base 4330: mod_base = OTHER; note = N1-methylpseudouridine
  modified_base 4331: mod_base = OTHER; note = N1-methylpseudouridine
  modified_base 4337: mod_base = OTHER; note = N1-methylpseudouridine
  modified_base 4339: mod_base = OTHER; note = N1-methylpseudouridine
  modified_base 4343: mod_base = OTHER; note = N1-methylpseudouridine
  modified_base 4345: mod_base = OTHER; note = N1-methylpseudouridine
  modified_base 4346: mod_base = OTHER; note = N1-methylpseudouridine
  modified_base 4349: mod_base = OTHER; note = N1-methylpseudouridine
  modified_base 4351: mod_base = OTHER; note = N1-methylpseudouridine
  modified_base 4352: mod_base = OTHER; note = N1-methylpseudouridine
  modified_base 4353: mod_base = OTHER; note = N1-methylpseudouridine
  modified_base 4357: mod_base = OTHER; note = N1-methylpseudouridine
  modified_base 4364: mod_base = OTHER; note = N1-methylpseudouridine
  modified_base 4368: mod_base = OTHER; note = N1-methylpseudouridine
  modified_base 4375: mod_base = OTHER; note = N1-methylpseudouridine
  modified_base 4377: mod_base = OTHER; note = N1-methylpseudouridine
aggaaanaagagagaaaagaagagnaagaagaaananaagagccaccanggcccccaagaagaagcggaaggngggcanccacggcgngcccgccgccgacaagaagnacagcancggccnggacancggcaccaacagcgngggcngggccgngancaccgacgagnacaaggngcccagcaagaagnncaaggngcngggcaacaccgaccggcacagcancaagaagaaccngancggcgcccngcngnncgacagcggcgagacggccgaggccacccggcngaagcggaccgcccggcggcggnacacccggcggaagaaccggancngcnaccngcaggagancnncagcaacgaganggccaaggnggacgacagcnncnnccaccggcnggaggagagcnnccnggnggaggaggacaagaagcacgagcggcaccccancnncggcaacancgnggacgaggnggccnaccacgagaagnaccccaccancnaccaccngcggaagaagcnggnggacagcaccgacaaggccgaccngcggcngancnaccnggcccnggcccacangancaagnnccggggccacnnccngancgagggcgaccngaaccccgacaacagcgacgnggacaagcngnncanccagcnggngcagaccnacaaccagcngnncgaggagaaccccancaacgccagcggcgnggacgccaaggccanccngagcgcccggcngagcaagagccggcggcnggagaaccngancgcccagcngcccggcgagaagaagaacggccngnncggcaaccngancgcccngagccngggccngacccccaacnncaagagcaacnncgaccnggccgaggacgccaagcngcagcngagcaaggacaccnacgacgacgaccnggacaaccngcnggcccagancggcgaccagnacgccgaccngnnccnggccgccaagaaccngagcgacgccanccngcngagcgacanccngcgggngaacaccgagancaccaaggccccccngagcgccagcangancaagcggnacgacgagcaccaccaggaccngacccngcngaaggcccnggngcggcagcagcngcccgagaagnacaaggagancnncnncgaccagagcaagaacggcnacgccggcnacancgacggcggcgccagccaggaggagnncnacaagnncancaagcccanccnggagaaganggacggcaccgaggagcngcnggngaagcngaaccgggaggaccngcngcggaagcagcggaccnncgacaacggcagcancccccaccaganccaccngggcgagcngcacgccanccngcggcggcaggaggacnncnaccccnnccngaaggacaaccgggagaagancgagaaganccngaccnnccgganccccnacnacgngggcccccnggcccggggcaacagccggnncgccnggangacccgcaagagcgaggagacgancacccccnggaacnncgaggaggnggnggacaagggcgccagcgcccagagcnncancgagcggangaccaacnncgacaagaaccngcccaacgagaaggngcngcccaagcacagccngcngnacgagnacnncaccgngnacaacgagcngaccaaggngaagnacgngaccgagggcangcggaagcccgccnnccngagcggcgagcagaagaaggccancgnggaccngcngnncaagaccaaccggaaggngaccgngaagcagcngaaggaggacnacnncaagaagancgagngcnncgacagcgnggagancagcggcgnggaggaccggnncaacgccagccngggcaccnaccacgaccngcngaagancancaaggacaaggacnnccnggacaacgaggagaacgaggacanccnggaggacancgngcngacccngacccngnncgaggaccgggagangancgaggagcggcngaagaccnacgcccaccngnncgacgacaaggngangaagcagcngaagcggcggcggnacaccggcnggggccggcngagccggaagcngancaacggcanccgggacaagcagagcggcaagaccanccnggacnnccncaagagcgacggcnncgccaaccggaacnncangcagcnganccacgacgacagccngaccnncaaggaggacanccagaaggcccaggngagcggccagggcgacagccngcacgagcacancgccaaccnggccggcagccccgccancaagaagggcanccngcagaccgngaaggnggnggacgagcnggngaaggngangggccggcacaagcccgagaacancgngancgaganggcccgggagaaccagaccacccagaagggccagaagaacagccgggagcggangaagcggancgaggagggcancaaggagcngggcagccaganccngaaggagcaccccgnggagaacacccagcngcagaacgagaagcngnaccngnacnaccngcagaacggccgggacangnacgnggaccaggagcnggacancaaccggcngagcgacnacgacgnggaccacancgngccccagagcnnccngaaggacgacagcancgacaacaaggngcngacccggagcgacaagaaccggggcaagagcgacaacgngcccagcgaggaggnggngaagaagangaagaacnacnggcggcagcngcngaacgccaagcngancacccagcggaagnncgacaaccngaccaaggccgagcggggcggccngagcgagcnggacaaggccggcnncancaagcggcagcnggnggagacgcggcagancaccaagcacgnggcccaganccnggacagccggangaacaccaagnacgacgagaacgacaagcnganccgggaggngaaggngancacccncaagagcaagcnggngagcgacnnccggaaggacnnccagnncnacaaggngcgggagancaacaacnaccaccacgcccacgacgccnaccngaacgccgnggngggcaccgcccngancaagaagnaccccaagcnggagagcgagnncgngnacggcgacnacaaggngnacgacgngcggaagangancgccaagagcgagcaggagancggcaaggccaccgccaagnacnncnncnacagcaacancangaacnncnncaagaccgagancacccnggccaacggcgaganccggaagcggccccngancgagacgaacggcgagacgggcgagancgngngggacaagggccgggacnncgccaccgngcggaaggngcngagcangccccaggngaacancgngaagaagaccgaggngcagaccggcggcnncagcaaggagagcanccngcccaagcggaacagcgacaagcngancgcccggaagaaggacngggaccccaagaagnacggcggcnncgacagccccaccgnggccnacagcgngcnggnggnggccaaggnggagaagggcaagagcaagaagcncaagagcgngaaggagcngcngggcancaccancanggagcggagcagcnncgagaagaaccccancgacnnccnggaggccaagggcnacaaggaggngaagaaggaccngancancaagcngcccaagnacagccngnncgagcnggagaacggccggaagcggangcnggccagcgccggcgagcngcagaagggcaacgagcnggcccngcccagcaagnacgngaacnnccngnaccnggccagccacnacgagaagcngaagggcagccccgaggacaacgagcagaagcagcngnncgnggagcagcacaagcacnaccnggacgagancancgagcagancagcgagnncagcaagcgggnganccnggccgacgccaaccnggacaaggngcngagcgccnacaacaagcaccgggacaagcccanccgggagcaggccgagaacancanccaccngnncacccngaccaaccngggcgcccccgccgccnncaagnacnncgacaccaccancgaccggaagcggnacaccagcaccaaggaggngcnggacgccacccnganccaccagagcancaccggccngnacgagacgcggancgaccngagccagcngggcggcgacagcggcggcaagcggcccgccgccaccaagaaggccggccaggccaagaagaagaagnaanganaggcggccgcnnaannaagcngccnncngcggggcnngccnncnggccangcccnncnncncncccnngcaccngnaccncnnggncnnngaanaaagccngagnaggaagncnaga

SEQ ID NO: 2187 - RNA, 4218 nt, synthetic construct
  source 1..4218: mol_type = other RNA; note = Description of Artificial Sequence: Synthetic polynucleotide
  modified_base 2: mod_base = OTHER; note = N1-methylpseudouridine
  modified_base 26: mod_base = OTHER; note = N1-methylpseudouridine
  modified_base 32: mod_base = OTHER; note = N1-methylpseudouridine
  modified_base 41: mod_base = OTHER; note = N1-methylpseudouridine
  modified_base 61: mod_base = OTHER; note = N1-methylpseudouridine
  modified_base 68: mod_base = OTHER; note = N1-methylpseudouridine
  modified_base 74: mod_base = OTHER; note = N1-methylpseudouridine
  modified_base 80: mod_base = OTHER; note = N1-methylpseudouridine
  modified_base 95: mod_base = OTHER; note = N1-methylpseudouridine
  modified_base 100: mod_base = OTHER; note = N1-methylpseudouridine
  modified_base 107: mod_base = OTHER; note = N1-methylpseudouridine
  modified_base 110: mod_base = OTHER; note = N1-methylpseudouridine
  modified_base 121: mod_base = OTHER; note = N1-methylpseudouridine
  modified_base 128: mod_base = OTHER; note = N1-methylpseudouridine
  modified_base 142: mod_base = OTHER; note = N1-methylpseudouridine
  modified_base 143: mod_base = OTHER; note = N1-methylpseudouridine
  modified_base 149: mod_base = OTHER; note = N1-methylpseudouridine
  modified_base 152: mod_base = OTHER; note = N1-methylpseudouridine
  modified_base 176: mod_base = OTHER; note = N1-methylpseudouridine
  modified_base 188: mod_base = OTHER; note = N1-methylpseudouridine
  modified_base 191: mod_base = OTHER; note = N1-methylpseudouridine
  modified_base 200: mod_base = OTHER; note = N1-methylpseudouridine
  modified_base 203: mod_base = OTHER; note = N1-methylpseudouridine
  modified_base 205: mod_base = OTHER; note = N1-methylpseudouridine
  modified_base 206: mod_base = OTHER; note = N1-methylpseudouridine
  modified_base 239: mod_base = OTHER; note = N1-methylpseudouridine
  modified_base 262: mod_base = OTHER; note = N1-methylpseudouridine
  modified_base 284: mod_base = OTHER; note = N1-methylpseudouridine
  modified_base 286: mod_base = OTHER; note = N1-methylpseudouridine
  modified_base 289: mod_base = OTHER; note = N1-methylpseudouridine
  modified_base 293: mod_base = OTHER; note = N1-methylpseudouridine
  modified_base 302: mod_base = OTHER; note = N1-methylpseudouridine
  modified_base 304: mod_base = OTHER; note = N1-methylpseudouridine
  modified_base 305: mod_base = OTHER; note = N1-methylpseudouridine
  modified_base 317: mod_base = OTHER; note = N1-methylpseudouridine
  modified_base 326: mod_base = OTHER; note = N1-methylpseudouridine
  modified_base 337: mod_base = OTHER; note = N1-methylpseudouridine
  modified_base 338: mod_base = OTHER; note = N1-methylpseudouridine
  modified_base 340: mod_base = OTHER; note = N1-methylpseudouridine
  modified_base 341: mod_base = OTHER; note = N1-methylpseudouridine
  modified_base 350: mod_base = OTHER; note = N1-methylpseudouridine
  modified_base 361: mod_base = OTHER; note = N1-methylpseudouridine
  modified_base 362: mod_base = OTHER; note = N1-methylpseudouridine
  modified_base 365: mod_base = OTHER; note = N1-methylpseudouridine
  modified_base 368: mod_base = OTHER; note = N1-methylpseudouridine
  modified_base 401: mod_base = OTHER; note = N1-methylpseudouridine
  modified_base 403: mod_base = OTHER; note = N1-methylpseudouridine
  modified_base 404: mod_base = OTHER; note = N1-methylpseudouridine
  modified_base 413: mod_base = OTHER; note = N1-methylpseudouridine
  modified_base 416: mod_base = OTHER; note = N1-methylpseudouridine
  modified_base 425: mod_base = OTHER; note = N1-methylpseudouridine
  modified_base 430: mod_base = OTHER; note = N1-methylpseudouridine
  modified_base 442: mod_base = OTHER; note = N1-methylpseudouridine
  modified_base 452: mod_base = OTHER; note = N1-methylpseudouridine
  modified_base 454: mod_base = OTHER; note = N1-methylpseudouridine
  modified_base 461: mod_base = OTHER; note = N1-methylpseudouridine
  modified_base 473: mod_base = OTHER; note = N1-methylpseudouridine
  modified_base 476: mod_base = OTHER; note = N1-methylpseudouridine
  modified_base 500: mod_base = OTHER; note = N1-methylpseudouridine
  modified_base 506: mod_base = OTHER; note = N1-methylpseudouridine
  modified_base 509: mod_base = OTHER; note = N1-methylpseudouridine
  modified_base 511: mod_base = OTHER; note = N1-methylpseudouridine
  modified_base 515: mod_base = OTHER; note = N1-methylpseudouridine
  modified_base 521: mod_base = OTHER; note = N1-methylpseudouridine
  modified_base 530: mod_base = OTHER; note = N1-methylpseudouridine
  modified_base 533: mod_base = OTHER; note = N1-methylpseudouridine
  modified_base 538: mod_base = OTHER; note = N1-methylpseudouridine
  modified_base 539: mod_base = OTHER; note = N1-methylpseudouridine
  modified_base 550: mod_base = OTHER; note = N1-methylpseudouridine
  modified_base 551: mod_base = OTHER; note = N1-methylpseudouridine
  modified_base 554: mod_base = OTHER; note = N1-methylpseudouridine
  modified_base 557: mod_base = OTHER; note = N1-methylpseudouridine
  modified_base 569: mod_base = OTHER; note = N1-methylpseudouridine
  modified_base 590: mod_base = OTHER; note = N1-methylpseudouridine
  modified_base 599: mod_base = OTHER; note = N1-methylpseudouridine
  modified_base 601: mod_base = OTHER; note = N1-methylpseudouridine
  modified_base 602: mod_base = OTHER; note = N1-methylpseudouridine
  modified_base 605: mod_base = OTHER; note = N1-methylpseudouridine
  modified_base 611: mod_base = OTHER; note = N1-methylpseudouridine
  modified_base 614: mod_base = OTHER; note = N1-methylpseudouridine
  modified_base 622: mod_base = OTHER; note = N1-methylpseudouridine
  modified_base 632: mod_base = OTHER; note = N1-methylpseudouridine
  modified_base 634: mod_base = OTHER; note = N1-methylpseudouridine
  modified_base 635: mod_base = OTHER; note = N1-methylpseudouridine
  modified_base 650: mod_base = OTHER; note = N1-methylpseudouridine
  modified_base 665: mod_base = OTHER; note = N1-methylpseudouridine
  modified_base 680: mod_base = OTHER; note = N1-methylpseudouridine
  modified_base 683: mod_base = OTHER; note = N1-methylpseudouridine
  modified_base 695: mod_base = OTHER; note = N1-methylpseudouridine
  modified_base 713: mod_base = OTHER; note = N1-methylpseudouridine
  modified_base 722: mod_base = OTHER; note = N1-methylpseudouridine
  modified_base 725: mod_base = OTHER; note = N1-methylpseudouridine
  modified_base 734: mod_base = OTHER; note = N1-methylpseudouridine
  modified_base 758: mod_base = OTHER; note = N1-methylpseudouridine
  modified_base 760: mod_base = OTHER; note = N1-methylpseudouridine
  modified_base 761: mod_base = OTHER; note = N1-methylpseudouridine
  modified_base 770: mod_base = OTHER; note = N1-methylpseudouridine
  modified_base 773: mod_base = OTHER; note = N1-methylpseudouridine
  modified_base 779: mod_base = OTHER; note = N1-methylpseudouridine
  modified_base 785: mod_base = OTHER; note = N1-methylpseudouridine
  modified_base 791: mod_base = OTHER; note = N1-methylpseudouridine
  modified_base 802: mod_base = OTHER; note = N1-methylpseudouridine
  modified_base 803: mod_base = OTHER; note = N1-methylpseudouridine
  modified_base 814: mod_base = OTHER; note = N1-methylpseudouridine
  modified_base 815: mod_base = OTHER; note = N1-methylpseudouridine
  modified_base 821: mod_base = OTHER; note = N1-methylpseudouridine
  modified_base 839: mod_base = OTHER; note = N1-methylpseudouridine
  modified_base 845: mod_base = OTHER; note = N1-methylpseudouridine
  modified_base 859: mod_base = OTHER; note = N1-methylpseudouridine
  modified_base 872: mod_base = OTHER; note = N1-methylpseudouridine
  modified_base 881: mod_base = OTHER; note = N1-methylpseudouridine
  modified_base 884: mod_base = OTHER; note = N1-methylpseudouridine
  modified_base 893: mod_base = OTHER; note = N1-methylpseudouridine
  modified_base 904: mod_base = OTHER; note = N1-methylpseudouridine
  modified_base 914: mod_base = OTHER; note = N1-methylpseudouridine
  modified_base 916: mod_base = OTHER; note = N1-methylpseudouridine
  modified_base 917: mod_base = OTHER; note = N1-methylpseudouridine
  modified_base 920: mod_base = OTHER; note = N1-methylpseudouridine
  modified_base 935: mod_base = OTHER; note = N1-methylpseudouridine
  modified_base 947: mod_base = OTHER; note = N1-methylpseudouridine
  modified_base 950: mod_base = OTHER; note = N1-methylpseudouridine
  modified_base 953: mod_base = OTHER; note = N1-methylpseudouridine
  modified_base 962: mod_base = OTHER; note = N1-methylpseudouridine
  modified_base 965: mod_base = OTHER; note = N1-methylpseudouridine
  modified_base 971: mod_base = OTHER; note = N1-methylpseudouridine
  modified_base 983: mod_base = OTHER; note = N1-methylpseudouridine
  modified_base 998: mod_base = OTHER; note = N1-methylpseudouridine
  modified_base 1010: mod_base = OTHER; note = N1-methylpseudouridine
  modified_base 1013: mod_base = OTHER; note = N1-methylpseudouridine
  modified_base 1021: mod_base = OTHER; note = N1-methylpseudouridine
  modified_base 1043: mod_base = OTHER; note = N1-methylpseudouridine
  modified_base 1049: mod_base = OTHER; note = N1-methylpseudouridine
  modified_base 1052: mod_base = OTHER; note = N1-methylpseudouridine
  modified_base 1061: mod_base = OTHER; note = N1-methylpseudouridine
  modified_base 1064: mod_base = OTHER; note = N1-methylpseudouridine
  modified_base 1076: mod_base = OTHER; note = N1-methylpseudouridine
  modified_base 1087: mod_base = OTHER; note = N1-methylpseudouridine
  modified_base 1097: mod_base = OTHER; note = N1-methylpseudouridine
  modified_base 1099: mod_base = OTHER; note = N1-methylpseudouridine
  modified_base 1100: mod_base = OTHER; note = N1-methylpseudouridine
  modified_base 1102: mod_base = OTHER; note = N1-methylpseudouridine
  modified_base 1103: mod_base = OTHER; note = N1-methylpseudouridine
  modified_base 1123: mod_base = OTHER; note = N1-methylpseudouridine
  modified_base 1132: mod_base = OTHER; note = N1-methylpseudouridine
  modified_base 1136: mod_base = OTHER; note = N1-methylpseudouridine
  modified_base 1162: mod_base = OTHER; note = N1-methylpseudouridine
  modified_base 1163: mod_base = OTHER; note = N1-methylpseudouridine
  modified_base 1165: mod_base = OTHER; note = N1-methylpseudouridine
  modified_base 1171: mod_base = OTHER; note = N1-methylpseudouridine
  modified_base 1172: mod_base = OTHER; note = N1-methylpseudouridine
  modified_base 1175: mod_base = OTHER; note = N1-methylpseudouridine
  modified_base 1184: mod_base = OTHER; note = N1-methylpseudouridine
  modified_base 1187: mod_base = OTHER; note = N1-methylpseudouridine
  modified_base 1196: mod_base = OTHER; note = N1-methylpseudouridine
  modified_base 1214: mod_base = OTHER; note = N1-methylpseudouridine
  modified_base 1217: mod_base = OTHER; note = N1-methylpseudouridine
  modified_base 1220: mod_base = OTHER; note = N1-methylpseudouridine
  modified_base 1226: mod_base = OTHER; note = N1-methylpseudouridine
  modified_base 1241: mod_base = OTHER; note = N1-methylpseudouridine
  modified_base 1244: mod_base = OTHER; note = N1-methylpseudouridine
  modified_base 1261: mod_base = OTHER; note = N1-methylpseudouridine
  modified_base 1262: mod_base = OTHER; note = N1-methylpseudouridine
  modified_base 1277: mod_base = OTHER; note = N1-methylpseudouridine
  modified_base 1289: mod_base = OTHER; note = N1-methylpseudouridine
  modified_base 1295: mod_base = OTHER; note = N1-methylpseudouridine
  modified_base 1304: mod_base = OTHER; note = N1-methylpseudouridine
  modified_base 1313: mod_base = OTHER; note = N1-methylpseudouridine
  modified_base 1316: mod_base = OTHER; note = N1-methylpseudouridine
  modified_base 1333: mod_base = OTHER; note = N1-methylpseudouridine
  modified_base 1334: mod_base = OTHER; note = N1-methylpseudouridine
  modified_base 1336: mod_base = OTHER; note = N1-methylpseudouridine
  modified_base 1342: mod_base = OTHER; note = N1-methylpseudouridine
  modified_base 1343: mod_base = OTHER; note = N1-methylpseudouridine
  modified_base 1346: mod_base = OTHER; note = N1-methylpseudouridine
  modified_base 1367: mod_base = OTHER; note = N1-methylpseudouridine
  modified_base 1376: mod_base = OTHER; note = N1-methylpseudouridine
  modified_base 1379: mod_base = OTHER; note = N1-methylpseudouridine
  modified_base 1384: mod_base = OTHER; note = N1-methylpseudouridine
  modified_base 1385: mod_base = OTHER; note = N1-methylpseudouridine
  modified_base 1391: mod_base = OTHER; note = N1-methylpseudouridine
  modified_base 1396: mod_base = OTHER; note = N1-methylpseudouridine
  modified_base 1399: mod_base = OTHER; note = N1-methylpseudouridine
  modified_base 1403: mod_base = OTHER; note = N1-methylpseudouridine
  modified_base 1412: mod_base = OTHER; note = N1-methylpseudouridine
  modified_base 1432: mod_base = OTHER; note = N1-methylpseudouridine
  modified_base 1433: mod_base = OTHER; note = N1-methylpseudouridine
  modified_base 1438: mod_base = OTHER; note = N1-methylpseudouridine
  modified_base 1442: mod_base = OTHER; note = N1-methylpseudouridine
  modified_base 1466: mod_base = OTHER; note = N1-methylpseudouridine
  modified_base 1474: mod_base = OTHER; note = N1-methylpseudouridine
  modified_base 1480: mod_base = OTHER; note = N1-methylpseudouridine
  modified_base 1481: mod_base = OTHER; note = N1-methylpseudouridine
  modified_base 1490: mod_base = OTHER; note = N1-methylpseudouridine
  modified_base 1493: mod_base = OTHER; note = N1-methylpseudouridine
  modified_base 1519: mod_base = OTHER; note = N1-methylpseudouridine
  modified_base 1520: mod_base = OTHER; note = N1-methylpseudouridine
  modified_base 1523: mod_base = OTHER; note = N1-methylpseudouridine
  modified_base 1532: mod_base = OTHER; note = N1-methylpseudouridine
  modified_base 1540: mod_base = OTHER; note = N1-methylpseudouridine
  modified_base 1541: mod_base = OTHER; note = N1-methylpseudouridine
  modified_base 1553: mod_base = OTHER; note = N1-methylpseudouridine
  modified_base 1568: mod_base = OTHER; note = N1-methylpseudouridine
  modified_base 1571: mod_base = OTHER; note = N1-methylpseudouridine
  modified_base 1586: mod_base = OTHER; note = N1-methylpseudouridine
  modified_base 1589: mod_base = OTHER; note = N1-methylpseudouridine
  modified_base 1591: mod_base = OTHER; note = N1-methylpseudouridine
  modified_base 1597: mod_base = OTHER; note = N1-methylpseudouridine
  modified_base 1600: mod_base = OTHER; note = N1-methylpseudouridine
  modified_base 1601: mod_base = OTHER; note = N1-methylpseudouridine
  modified_base 1607: mod_base = OTHER; note = N1-methylpseudouridine
  modified_base 1609: mod_base = OTHER; note = N1-methylpseudouridine
  modified_base 1619: mod_base = OTHER; note = N1-methylpseudouridine
  modified_base 1628: mod_base = OTHER; note = N1-methylpseudouridine
  modified_base 1633: mod_base = OTHER; note = N1-methylpseudouridine
  modified_base 1637: mod_base = OTHER; note = N1-methylpseudouridine
  modified_base 1649: mod_base = OTHER; note = N1-methylpseudouridine
  modified_base 1663: mod_base = OTHER; note = N1-methylpseudouridine
  modified_base 1664: mod_base = OTHER; note = N1-methylpseudouridine
  modified_base 1667: mod_base = OTHER; note = N1-methylpseudouridine
  modified_base 1691: mod_base = OTHER; note = N1-methylpseudouridine
  modified_base 1694: mod_base = OTHER; note = N1-methylpseudouridine
  modified_base 1700: mod_base = OTHER; note = N1-methylpseudouridine
  modified_base 1703: mod_base = OTHER; note = N1-methylpseudouridine
  modified_base 1705: mod_base = OTHER; note = N1-methylpseudouridine
  modified_base 1706: mod_base = OTHER; note = N1-methylpseudouridine
  modified_base 1724: mod_base = OTHER; note = N1-methylpseudouridine
  modified_base 1730: mod_base = OTHER; note = N1-methylpseudouridine
  modified_base 1739: mod_base = OTHER; note = N1-methylpseudouridine
  modified_base 1750: mod_base = OTHER; note = N1-methylpseudouridine
  modified_base 1753: mod_base = OTHER; note = N1-methylpseudouridine
  modified_base 1754: mod_base = OTHER; note = N1-methylpseudouridine
  modified_base 1763: mod_base = OTHER; note = N1-methylpseudouridine
  modified_base 1768: mod_base = OTHER; note = N1-methylpseudouridine
  modified_base 1771: mod_base = OTHER; note = N1-methylpseudouridine
  modified_base 1772: mod_base = OTHER; note = N1-methylpseudouridine
  modified_base 1781: mod_base = OTHER; note = N1-methylpseudouridine
  modified_base 1787: mod_base = OTHER; note = N1-methylpseudouridine
  modified_base 1796: mod_base = OTHER; note = N1-methylpseudouridine
  modified_base 1807: mod_base = OTHER; note = N1-methylpseudouridine
  modified_base 1808: mod_base = OTHER; note = N1-methylpseudouridine
  modified_base 1820: mod_base = OTHER; note = N1-methylpseudouridine
  modified_base 1828: mod_base = OTHER; note = N1-methylpseudouridine
  modified_base 1838: mod_base = OTHER; note = N1-methylpseudouridine
  modified_base 1841: mod_base = OTHER; note = N1-methylpseudouridine
  modified_base 1847: mod_base = OTHER; note = N1-methylpseudouridine
  modified_base 1850: mod_base = OTHER; note = N1-methylpseudouridine
  modified_base 1864: mod_base = OTHER; note = N1-methylpseudouridine
  modified_base 1865: mod_base = OTHER; note = N1-methylpseudouridine
  modified_base 1868: mod_base = OTHER; note = N1-methylpseudouridine
  modified_base 1892: mod_base = OTHER; note = N1-methylpseudouridine
  modified_base 1895: mod_base = OTHER; note = N1-methylpseudouridine
  modified_base 1904: mod_base = OTHER; note = N1-methylpseudouridine
  modified_base 1907: mod_base = OTHER; note = N1-methylpseudouridine
  modified_base 1910: mod_base = OTHER; note = N1-methylpseudouridine
  modified_base 1916: mod_base = OTHER; note = N1-methylpseudouridine
  modified_base 1922: mod_base = OTHER; note = N1-methylpseudouridine
  modified_base 1924: mod_base = OTHER; note = N1-methylpseudouridine
  modified_base 1925: mod_base = OTHER; note = N1-methylpseudouridine
  modified_base 1940: mod_base = OTHER; note = N1-methylpseudouridine
  modified_base 1943: mod_base = OTHER; note = N1-methylpseudouridine
  modified_base 1955: mod_base = OTHER; note = N1-methylpseudouridine
  modified_base 1963: mod_base = OTHER; note = N1-methylpseudouridine
  modified_base 1973: mod_base = OTHER; note = N1-methylpseudouridine
  modified_base 1975: mod_base = OTHER; note = N1-methylpseudouridine
  modified_base 1976: mod_base = OTHER; note = N1-methylpseudouridine
  modified_base 1988: mod_base = OTHER; note = N1-methylpseudouridine
  modified_base 1991: mod_base = OTHER; note = N1-methylpseudouridine
  modified_base 2000: mod_base = OTHER; note = N1-methylpseudouridine
  modified_base 2014: mod_base = OTHER; note = N1-methylpseudouridine
  modified_base 2023: mod_base = OTHER; note = N1-methylpseudouridine
  modified_base 2033: mod_base = OTHER; note = N1-methylpseudouridine
  modified_base 2045: mod_base = OTHER; note = N1-methylpseudouridine
  modified_base 2048: mod_base = OTHER; note = N1-methylpseudouridine
  modified_base 2057: mod_base = OTHER; note = N1-methylpseudouridine
  modified_base 2084: mod_base = OTHER; note = N1-methylpseudouridine
  modified_base 2087: mod_base = OTHER; note = N1-methylpseudouridine
  modified_base 2092: mod_base = OTHER; note = N1-methylpseudouridine
  modified_base 2093: mod_base = OTHER; note = N1-methylpseudouridine
  modified_base 2096: mod_base = OTHER; note = N1-methylpseudouridine
  modified_base 2110: mod_base = OTHER; note = N1-methylpseudouridine
  modified_base 2111: mod_base = OTHER; note = N1-methylpseudouridine
  modified_base 2125: mod_base = OTHER; note = N1-methylpseudouridine
  modified_base 2126: mod_base = OTHER; note = N1-methylpseudouridine
  modified_base 2129: mod_base = OTHER; note = N1-methylpseudouridine
  modified_base 2135: mod_base = OTHER; note = N1-methylpseudouridine
  modified_base 2138: mod_base = OTHER; note = N1-methylpseudouridine
  modified_base 2153: mod_base = OTHER; note = N1-methylpseudouridine
  modified_base 2158: mod_base = OTHER; note = N1-methylpseudouridine
  modified_base 2159: mod_base = OTHER; note = N1-methylpseudouridine
  modified_base 2171: mod_base = OTHER; note = N1-methylpseudouridine
  modified_base 2186: mod_base = OTHER; note = N1-methylpseudouridine
  modified_base 2207: mod_base = OTHER; note = N1-methylpseudouridine
  modified_base 2219: mod_base = OTHER; note = N1-methylpseudouridine
  modified_base 2228: mod_base = OTHER; note = N1-methylpseudouridine
  modified_base 2246: mod_base = OTHER; note = N1-methylpseudouridine
  modified_base 2258: mod_base = OTHER; note = N1-methylpseudouridine
  modified_base 2261: mod_base = OTHER; note = N1-methylpseudouridine
  modified_base 2270: mod_base = OTHER; note = N1-methylpseudouridine
  modified_base 2276: mod_base = OTHER; note = N1-methylpseudouridine
  modified_base 2279: mod_base = OTHER; note = N1-methylpseudouridine
  modified_base 2288: mod_base = OTHER; note = N1-methylpseudouridine
  modified_base 2291: mod_base = OTHER; note = N1-methylpseudouridine
  modified_base 2297: mod_base = OTHER; note = N1-methylpseudouridine
  modified_base 2300: mod_base = OTHER; note = N1-methylpseudouridine
  modified_base 2324: mod_base = OTHER; note = N1-methylpseudouridine
  modified_base 2327: mod_base = OTHER; note = N1-methylpseudouridine
  modified_base 2330: mod_base = OTHER; note = N1-methylpseudouridine
  modified_base 2336: mod_base = OTHER; note = N1-methylpseudouridine
  modified_base 2390: mod_base = OTHER; note = N1-methylpseudouridine
  modified_base 2399: mod_base = OTHER; note = N1-methylpseudouridine
  modified_base 2411: mod_base = OTHER; note = N1-methylpseudouridine
  modified_base 2420: mod_base = OTHER; note = N1-methylpseudouridine
  modified_base 2432: mod_base = OTHER; note = N1-methylpseudouridine
  modified_base 2435: mod_base = OTHER; note = N1-methylpseudouridine
  modified_base 2450: mod_base = OTHER; note = N1-methylpseudouridine
  modified_base 2465: mod_base = OTHER; note = N1-methylpseudouridine
  modified_base 2480: mod_base = OTHER; note = N1-methylpseudouridine
  modified_base 2482: mod_base = OTHER; note = N1-methylpseudouridine
  modified_base 2486: mod_base = OTHER; note = N1-methylpseudouridine
  modified_base 2488: mod_base = OTHER; note = N1-methylpseudouridine
  modified_base 2491: mod_base = OTHER; note = N1-methylpseudouridine
  modified_base 2495: mod_base = OTHER; note = N1-methylpseudouridine
  modified_base 2513: mod_base = OTHER; note = N1-methylpseudouridine
  modified_base 2515: mod_base = OTHER; note = N1-methylpseudouridine
  modified_base 2519: mod_base = OTHER; note = N1-methylpseudouridine
  modified_base 2531: mod_base = OTHER; note = N1-methylpseudouridine
  modified_base 2537: mod_base = OTHER; note = N1-methylpseudouridine
  modified_base 2546: mod_base = OTHER; note = N1-methylpseudouridine
  modified_base 2554: mod_base = OTHER; note = N1-methylpseudouridine
  modified_base 2561: mod_base = OTHER; note = N1-methylpseudouridine
  modified_base 2570: mod_base = OTHER; note = N1-methylpseudouridine
  modified_base 2573: mod_base = OTHER; note = N1-methylpseudouridine
  modified_base 2584: mod_base = OTHER; note = N1-methylpseudouridine
  modified_base 2585: mod_base = OTHER; note = N1-methylpseudouridine
  modified_base 2588: mod_base = OTHER; note = N1-methylpseudouridine
  modified_base 2603: mod_base = OTHER; note = N1-methylpseudouridine
  modified_base 2615: mod_base = OTHER; note = N1-methylpseudouridine
  modified_base 2618: mod_base = OTHER; note = N1-methylpseudouridine
  modified_base 2657: mod_base = OTHER; note = N1-methylpseudouridine
  modified_base 2672: mod_base = OTHER; note = N1-methylpseudouridine
  modified_base 2675: mod_base = OTHER; note = N1-methylpseudouridine
  modified_base 2684: mod_base = OTHER; note = N1-methylpseudouridine
  modified_base 2692: mod_base = OTHER; note = N1-methylpseudouridine
  modified_base 2695: mod_base = OTHER; note = N1-methylpseudouridine
  modified_base 2705: mod_base = OTHER; note = N1-methylpseudouridine
  modified_base 2708: mod_base = OTHER; note = N1-methylpseudouridine
  modified_base 2720: mod_base = OTHER; note = N1-methylpseudouridine
  modified_base 2723: mod_base = OTHER; note = N1-methylpseudouridine
  modified_base 2737: mod_base = OTHER; note = N1-methylpseudouridine
  modified_base 2738: mod_base = OTHER; note = N1-methylpseudouridine
  modified_base 2747: mod_base = OTHER; note = N1-methylpseudouridine
  modified_base 2771: mod_base = OTHER; note = N1-methylpseudouridine
  modified_base 2780: mod_base = OTHER; note = N1-methylpseudouridine
  modified_base 2794: mod_base = OTHER; note = N1-methylpseudouridine
  modified_base 2795: mod_base = OTHER; note = N1-methylpseudouridine
  modified_base 2798: mod_base = OTHER; note = N1-methylpseudouridine
  modified_base 2810: mod_base = OTHER; note = N1-methylpseudouridine
  modified_base 2813: mod_base = OTHER; note = N1-methylpseudouridine
  modified_base 2828: mod_base = OTHER; note = N1-methylpseudouridine
  modified_base 2840: mod_base = OTHER; note = N1-methylpseudouridine
  modified_base 2849: mod_base = OTHER; note = N1-methylpseudouridine
  modified_base 2852: mod_base = OTHER; note = N1-methylpseudouridine
  modified_base 2864: mod_base = OTHER; note = N1-methylpseudouridine
  modified_base 2875: mod_base = OTHER; note = N1-methylpseudouridine
  modified_base 2894: mod_base = OTHER; note = N1-methylpseudouridine
  modified_base 2897: mod_base = OTHER; note = N1-methylpseudouridine
  modified_base 2906: mod_base = OTHER; note = N1-methylpseudouridine
  modified_base 2912: mod_base = OTHER; note = N1-methylpseudouridine
  modified_base 2915: mod_base = OTHER; note = N1-methylpseudouridine
  modified_base 2921: mod_base = OTHER; note = N1-methylpseudouridine
  modified_base 2933: mod_base = OTHER; note = N1-methylpseudouridine
  modified_base 2936: mod_base = OTHER; note = N1-methylpseudouridine
  modified_base 2944: mod_base = OTHER; note = N1-methylpseudouridine
  modified_base 2945: mod_base = OTHER; note = N1-methylpseudouridine
  modified_base 2956: mod_base = OTHER; note = N1-methylpseudouridine
  modified_base 2957: mod_base = OTHER; note = N1-methylpseudouridine
  modified_base 2962: mod_base = OTHER; note = N1-methylpseudouridine
  modified_base 2963: mod_base = OTHER; note = N1-methylpseudouridine
  modified_base 2965: mod_base = OTHER; note = N1-methylpseudouridine
  modified_base 2972: mod_base = OTHER; note = N1-methylpseudouridine
  modified_base 2981: mod_base = OTHER; note = N1-methylpseudouridine
  modified_base 2989: mod_base = OTHER; note = N1-methylpseudouridine
  modified_base 3010: mod_base = OTHER; note = N1-methylpseudouridine
  modified_base 3014: mod_base = OTHER; note = N1-methylpseudouridine
  modified_base 3023: mod_base = OTHER; note = N1-methylpseudouridine
  modified_base 3026: mod_base = OTHER; note = N1-methylpseudouridine
  modified_base 3038: mod_base = OTHER; note = N1-methylpseudouridine
  modified_base 3041: mod_base = OTHER; note = N1-methylpseudouridine
  modified_base 3049: mod_base = OTHER; note = N1-methylpseudouridine
  modified_base 3059: mod_base = OTHER; note = N1-methylpseudouridine
  modified_base 3070: mod_base = OTHER; note = N1-methylpseudouridine
  modified_base 3071: mod_base = OTHER; note = N1-methylpseudouridine
  modified_base 3074: mod_base = OTHER; note = N1-methylpseudouridine
  modified_base 3076: mod_base = OTHER; note = N1-methylpseudouridine
  modified_base 3085: mod_base = OTHER; note = N1-methylpseudouridine
  modified_base 3092: mod_base = OTHER; note = N1-methylpseudouridine
  modified_base 3094: mod_base = OTHER; note = N1-methylpseudouridine
  modified_base 3101: mod_base = OTHER; note = N1-methylpseudouridine
  modified_base 3110: mod_base = OTHER; note = N1-methylpseudouridine
  modified_base 3113: mod_base = OTHER; note = N1-methylpseudouridine
  modified_base 3134: mod_base = OTHER; note = N1-methylpseudouridine
  modified_base 3154: mod_base = OTHER; note = N1-methylpseudouridine
  modified_base 3157: mod_base = OTHER; note = N1-methylpseudouridine
  modified_base 3158: mod_base = OTHER; note = N1-methylpseudouridine
  modified_base 3160: mod_base = OTHER; note = N1-methylpseudouridine
  modified_base 3161: mod_base = OTHER; note = N1-methylpseudouridine
  modified_base 3163: mod_base = OTHER; note = N1-methylpseudouridine
  modified_base 3173: mod_base = OTHER; note = N1-methylpseudouridine
  modified_base 3176: mod_base = OTHER; note = N1-methylpseudouridine
  modified_base 3181: mod_base = OTHER; note = N1-methylpseudouridine
  modified_base 3182: mod_base = OTHER; note = N1-methylpseudouridine
  modified_base 3184: mod_base = OTHER; note = N1-methylpseudouridine
  modified_base 3185: mod_base = OTHER; note = N1-methylpseudouridine
  modified_base 3197: mod_base = OTHER; note = N1-methylpseudouridine
  modified_base 3203: mod_base = OTHER; note = N1-methylpseudouridine
  modified_base 3218: mod_base = OTHER; note = N1-methylpseudouridine
  modified_base 3233: mod_base = OTHER; note = N1-methylpseudouridine
  modified_base 3236: mod_base = OTHER; note = N1-methylpseudouridine
  modified_base 3263: mod_base = OTHER; note = N1-methylpseudouridine
  modified_base 3266: mod_base = OTHER; note = N1-methylpseudouridine
  modified_base 3268: mod_base = OTHER; note = N1-methylpseudouridine
  modified_base 3286: mod_base = OTHER; note = N1-methylpseudouridine
  modified_base 3287: mod_base = OTHER; note = N1-methylpseudouridine
  modified_base 3296: mod_base = OTHER; note = N1-methylpseudouridine
  modified_base 3305: mod_base = OTHER; note = N1-methylpseudouridine
  modified_base 3308: mod_base = OTHER; note = N1-methylpseudouridine
  modified_base 3314: mod_base = OTHER; note = N1-methylpseudouridine
  modified_base 3323: mod_base = OTHER; note = N1-methylpseudouridine
  modified_base 3329: mod_base = OTHER; note = N1-methylpseudouridine
  modified_base 3332: mod_base = OTHER; note = N1-methylpseudouridine
  modified_base 3347: mod_base = OTHER; note = N1-methylpseudouridine
  modified_base 3361: mod_base = OTHER; note = N1-methylpseudouridine
  modified_base 3362: mod_base = OTHER; note = N1-methylpseudouridine
  modified_base 3377: mod_base = OTHER; note = N1-methylpseudouridine
  modified_base 3380: mod_base = OTHER; note = N1-methylpseudouridine
  modified_base 3404: mod_base = OTHER; note = N1-methylpseudouridine
  modified_base 3407: mod_base = OTHER; note = N1-methylpseudouridine
  modified_base 3424: mod_base = OTHER; note = N1-methylpseudouridine
  modified_base 3439: mod_base = OTHER; note = N1-methylpseudouridine
  modified_base 3448: mod_base = OTHER; note = N1-methylpseudouridine
  modified_base 3449: mod_base = OTHER; note = N1-methylpseudouridine
  modified_base 3464: mod_base = OTHER; note = N1-methylpseudouridine
  modified_base 3469: mod_base = OTHER; note = N1-methylpseudouridine
  modified_base 3476: mod_base = OTHER; note = N1-methylpseudouridine
  modified_base 3479: mod_base = OTHER; note = N1-methylpseudouridine
  modified_base 3482: mod_base = OTHER; note = N1-methylpseudouridine
  modified_base 3485: mod_base = OTHER; note = N1-methylpseudouridine
  modified_base 3494: mod_base = OTHER; note = N1-methylpseudouridine
  modified_base 3518: mod_base = OTHER; note = N1-methylpseudouridine
  modified_base 3527: mod_base = OTHER; note = N1-methylpseudouridine
  modified_base 3536: mod_base = OTHER; note = N1-methylpseudouridine
  modified_base 3539: mod_base = OTHER; note = N1-methylpseudouridine
  modified_base 3545: mod_base = OTHER; note = N1-methylpseudouridine
  modified_base 3551: mod_base = OTHER; note = N1-methylpseudouridine
  modified_base 3554: mod_base = OTHER; note = N1-methylpseudouridine
  modified_base 3568: mod_base = OTHER; note = N1-methylpseudouridine
  modified_base 3569: mod_base = OTHER; note = N1-methylpseudouridine
  modified_base 3584: mod_base = OTHER; note = N1-methylpseudouridine
  modified_base 3589: mod_base = OTHER; note = N1-methylpseudouridine
  modified_base 3590: mod_base = OTHER; note = N1-methylpseudouridine
  modified_base 3593: mod_base = OTHER; note = N1-methylpseudouridine
  modified_base 3607: mod_base = OTHER; note = N1-methylpseudouridine
  modified_base 3617: mod_base = OTHER; note = N1-methylpseudouridine
  modified_base 3629: mod_base = OTHER; note = N1-methylpseudouridine
  modified_base 3632: mod_base = OTHER; note = N1-methylpseudouridine
  modified_base 3635: mod_base = OTHER; note = N1-methylpseudouridine
  modified_base 3641: mod_base = OTHER; note = N1-methylpseudouridine
  modified_base 3649: mod_base = OTHER; note = N1-methylpseudouridine
  modified_base 3656: mod_base = OTHER; note = N1-methylpseudouridine
  modified_base 3658: mod_base = OTHER; note = N1-methylpseudouridine
  modified_base 3659: mod_base = OTHER; note = N1-methylpseudouridine
  modified_base 3665: mod_base = OTHER; note = N1-methylpseudouridine
  modified_base 3686: mod_base = OTHER; note = N1-methylpseudouridine
  modified_base 3689: mod_base = OTHER; note = N1-methylpseudouridine
  modified_base 3707: mod_base = OTHER; note = N1-methylpseudouridine
  modified_base 3725: mod_base = OTHER; note = N1-methylpseudouridine
  modified_base 3731: mod_base = OTHER; note = N1-methylpseudouridine
  modified_base 3742: mod_base = OTHER; note = N1-methylpseudouridine
  modified_base 3746: mod_base = OTHER; note = N1-methylpseudouridine
  modified_base 3751: mod_base = OTHER; note = N1-methylpseudouridine
  modified_base 3752: mod_base = OTHER; note = N1-methylpseudouridine
  modified_base 3755: mod_base = OTHER; note = N1-methylpseudouridine
  modified_base 3757: mod_base = OTHER; note = N1-methylpseudouridine
  modified_base 3761: mod_base = OTHER; note = N1-methylpseudouridine
  modified_base 3772: mod_base = OTHER; note = N1-methylpseudouridine
  modified_base 3782: mod_base = OTHER; note = N1-methylpseudouridine
  modified_base 3818: mod_base = OTHER; note = N1-methylpseudouridine
  modified_base 3820: mod_base = OTHER; note = N1-methylpseudouridine
  modified_base 3821: mod_base = OTHER; note = N1-methylpseudouridine
  modified_base 3824: mod_base = OTHER; note = N1-methylpseudouridine
  modified_base 3841: mod_base = OTHER; note = N1-methylpseudouridine
  modified_base 3845: mod_base = OTHER; note = N1-methylpseudouridine
  modified_base 3854: mod_base = OTHER; note = N1-methylpseudouridine
  modified_base 3857: mod_base = OTHER; note = N1-methylpseudouridine
  modified_base 3866: mod_base = OTHER; note = N1-methylpseudouridine
  modified_base 3874: mod_base = OTHER; note = N1-methylpseudouridine
  modified_base 3875: mod_base = OTHER; note = N1-methylpseudouridine
  modified_base 3887: mod_base = OTHER; note = N1-methylpseudouridine
  modified_base 3890: mod_base = OTHER; note = N1-methylpseudouridine
  modified_base 3893: mod_base = OTHER; note = N1-methylpseudouridine
  modified_base 3908: mod_base = OTHER; note = N1-methylpseudouridine
  modified_base 3917: mod_base = OTHER; note = N1-methylpseudouridine
  modified_base 3920: mod_base = OTHER; note = N1-methylpseudouridine
  modified_base 3928: mod_base = OTHER; note = N1-methylpseudouridine
  modified_base 3953: mod_base = OTHER; note = N1-methylpseudouridine
  modified_base 3974: mod_base = OTHER; note = N1-methylpseudouridine
  modified_base 3977: mod_base = OTHER; note = N1-methylpseudouridine
  modified_base 3983: mod_base = OTHER; note = N1-methylpseudouridine
  modified_base 3985: mod_base = OTHER; note = N1-methylpseudouridine
  modified_base 3986: mod_base = OTHER; note = N1-methylpseudouridine
  modified_base 3992: mod_base = OTHER; note = N1-methylpseudouridine
  modified_base 4001: mod_base = OTHER; note = N1-methylpseudouridine
  modified_base 4018: mod_base = OTHER; note = N1-methylpseudouridine
  modified_base 4019: mod_base = OTHER; note = N1-methylpseudouridine
  modified_base 4024: mod_base = OTHER; note = N1-methylpseudouridine
  modified_base 4027: mod_base = OTHER; note = N1-methylpseudouridine
  modified_base 4028: mod_base = OTHER; note = N1-methylpseudouridine
  modified_base 4040: mod_base = OTHER; note = N1-methylpseudouridine
  modified_base 4054: mod_base = OTHER; note = N1-methylpseudouridine
  modified_base 4073: mod_base = OTHER; note = N1-methylpseudouridine
  modified_base 4076: mod_base = OTHER; note = N1-methylpseudouridine
  modified_base 4088: mod_base = OTHER; note = N1-methylpseudouridine
  modified_base 4091: mod_base = OTHER; note = N1-methylpseudouridine
  modified_base 4103: mod_base = OTHER; note = N1-methylpseudouridine
  modified_base 4112: mod_base = OTHER; note = N1-methylpseudouridine
  modified_base 4114: mod_base = OTHER; note = N1-methylpseudouridine
  modified_base 4127: mod_base = OTHER; note = N1-methylpseudouridine
  modified_base 4133: mod_base = OTHER; note = N1-methylpseudouridine
  modified_base 4142: mod_base = OTHER; note = N1-methylpseudouridine
  modified_base 4210: mod_base = OTHER; note = N1-methylpseudouridine
  modified_base 4213: mod_base = OTHER; note = N1-methylpseudouridine
  modified_base 4216: mod_base = OTHER; note = N1-methylpseudouridine
anggcccccaagaagaagcggaaggngggcanccacggcgngcccgccgccgacaagaagnacagcancggccnggacancggcaccaacagcgngggcngggccgngancaccgacgagnacaaggngcccagcaagaagnncaaggngcngggcaacaccgaccggcacagcancaagaagaaccngancggcgcccngcngnncgacagcggcgagacggccgaggccacccggcngaagcggaccgcccggcggcggnacacccggcggaagaaccggancngcnaccngcaggagancnncagcaacgaganggccaaggnggacgacagcnncnnccaccggcnggaggagagcnnccnggnggaggaggacaagaagcacgagcggcaccccancnncggcaacancgnggacgaggnggccnaccacgagaagnaccccaccancnaccaccngcggaagaagcnggnggacagcaccgacaaggccgaccngcggcngancnaccnggcccnggcccacangancaagnnccggggccacnnccngancgagggcgaccngaaccccgacaacagcgacgnggacaagcngnncanccagcnggngcagaccnacaaccagcngnncgaggagaaccccancaacgccagcggcgnggacgccaaggccanccngagcgcccggcngagcaagagccggcggcnggagaaccngancgcccagcngcccggcgagaagaagaacggccngnncggcaaccngancgcccngagccngggccngacccccaacnncaagagcaacnncgaccnggccgaggacgccaagcngcagcngagcaaggacaccnacgacgacgaccnggacaaccngcnggcccagancggcgaccagnacgccgaccngnnccnggccgccaagaaccngagcgacgccanccngcngagcgacanccngcgggngaacaccgagancaccaaggccccccngagcgccagcangancaagcggnacgacgagcaccaccaggaccngacccngcngaaggcccnggngcggcagcagcngcccgagaagnacaaggagancnncnncgaccagagcaagaacggcnacgccggcnacancgacggcggcgccagccaggaggagnncnacaagnncancaagcccanccnggagaaganggacggcaccgaggagcngcnggngaagcngaaccgggaggaccngcngcggaagcagcggaccnncgacaacggcagcancccccaccaganccaccngggcgagcngcacgccanccngcggcggcaggaggacnncnaccccnnccngaaggacaaccgggagaagancgagaaganccngaccnnccgganccccnacnacgngggcccccnggcccggggcaacagccggnncgccnggangacccgcaagagcgaggagacgancacccccnggaacnncgaggaggnggnggacaagggcgccagcgcccagagcnncancgagcggangaccaacnncgacaagaaccngcccaacgagaaggngcngcccaagcacagccngcngnacgagnacnncaccgngnacaacgagcngaccaaggngaagnacgngaccgagggcangcggaagcccgccnnccngagcggcgagcagaagaaggccancgnggaccngcngnncaagaccaaccggaaggngaccgngaagcagcngaaggaggacnacnncaagaagancgagngcnncgacagcgnggagancagcggcgnggaggaccggnncaacgccagccngggcaccnaccacgaccngcngaagancancaaggacaaggacnnccnggacaacgaggagaacgaggacanccnggaggacancgngcngacccngacccngnncgaggaccgggagangancgaggagcggcngaagaccnacgcccaccngnncgacgacaaggngangaagcagcngaagcggcggcggnacaccggcnggggccggcngagccggaagcngancaacggcanccgggacaagcagagcggcaagaccanccnggacnnccncaagagcgacggcnncgccaaccggaacnncangcagcnganccacgacgacagccngaccnncaaggaggacanccagaaggcccaggngagcggccagggcgacagccngcacgagcacancgccaaccnggccggcagccccgccancaagaagggcanccngcagaccgngaaggnggnggacgagcnggngaaggngangggccggcacaagcccgagaacancgngancgaganggcccgggagaaccagaccacccagaagggccagaagaacagccgggagcggangaagcggancgaggagggcancaaggagcngggcagccaganccngaaggagcaccccgnggagaacacccagcngcagaacgagaagcngnaccngnacnaccngcagaacggccgggacangnacgnggaccaggagcnggacancaaccggcngagcgacnacgacgnggaccacancgngccccagagcnnccngaaggacgacagcancgacaacaaggngcngacccggagcgacaagaaccggggcaagagcgacaacgngcccagcgaggaggnggngaagaagangaagaacnacnggcggcagcngcngaacgccaagcngancacccagcggaagnncgacaaccngaccaaggccgagcggggcggccngagcgagcnggacaaggccggcnncancaagcggcagcnggnggagacgcggcagancaccaagcacgnggcccaganccnggacagccggangaacaccaagnacgacgagaacgacaagcnganccgggaggngaaggngancacccncaagagcaagcnggngagcgacnnccggaaggacnnccagnncnacaaggngcgggagancaacaacnaccaccacgcccacgacgccnaccngaacgccgnggngggcaccgcccngancaagaagnaccccaagcnggagagcgagnncgngnacggcgacnacaaggngnacgacgngcggaagangancgccaagagcgagcaggagancggcaaggccaccgccaagnacnncnncnacagcaacancangaacnncnncaagaccgagancacccnggccaacggcgaganccggaagcggccccngancgagacgaacggcgagacgggcgagancgngngggacaagggccgggacnncgccaccgngcggaaggngcngagcangccccaggngaacancgngaagaagaccgaggngcagaccggcggcnncagcaaggagagcanccngcccaagcggaacagcgacaagcngancgcccggaagaaggacngggaccccaagaagnacggcggcnncgacagccccaccgnggccnacagcgngcnggnggnggccaaggnggagaagggcaagagcaagaagcncaagagcgngaaggagcngcngggcancaccancanggagcggagcagcnncgagaagaaccccancgacnnccnggaggccaagggcnacaaggaggngaagaaggaccngancancaagcngcccaagnacagccngnncgagcnggagaacggccggaagcggangcnggccagcgccggcgagcngcagaagggcaacgagcnggcccngcccagcaagnacgngaacnnccngnaccnggccagccacnacgagaagcngaagggcagccccgaggacaacgagcagaagcagcngnncgnggagcagcacaagcacnaccnggacgagancancgagcagancagcgagnncagcaagcgggnganccnggccgacgccaaccnggacaaggngcngagcgccnacaacaagcaccgggacaagcccanccgggagcaggccgagaacancanccaccngnncacccngaccaaccngggcgcccccgccgccnncaagnacnncgacaccaccancgaccggaagcggnacaccagcaccaaggaggngcnggacgccacccnganccaccagagcancaccggccngnacgagacgcggancgaccngagccagcngggcggcgacagcggcggcaagcggcccgccgccaccaagaaggccggccaggccaagaagaagaagnaanganag

SEQ ID NO: 2188 - protein, 1403 aa, synthetic construct
  source 1..1403: note = Description of Artificial Sequence: Synthetic polypeptide
MAPKKKRKVGIHGVPAADKKYSIGLDIGTNSVGWAVITDEYKVPSKKFKVLGNTDRHSIKKNLIGALLFDSGETAEATRLKRTARRRYTRRKNRICYLQEIFSNEMAKVDDSFFHRLEESFLVEEDKKHERHPIFGNIVDEVAYHEKYPTIYHLRKKLVDSTDKADLRLIYLALAHMIKFRGHFLIEGDLNPDNSDVDKLFIQLVQTYNQLFEENPINASGVDAKAILSARLSKSRRLENLIAQLPGEKKNGLFGNLIALSLGLTPNFKSNFDLAEDAKLQLSKDTYDDDLDNLLAQIGDQYADLFLAAKNLSDAILLSDILRVNTEITKAPLSASMIKRYDEHHQDLTLLKALVRQQLPEKYKEIFFDQSKNGYAGYIDGGASQEEFYKFIKPILEKMDGTEELLVKLNREDLLRKQRTFDNGSIPHQIHLGELHAILRRQEDFYPFLKDNREKIEKILTFRIPYYVGPLARGNSRFAWMTRKSEETITPWNFEEVVDKGASAQSFIERMTNFDKNLPNEKVLPKHSLLYEYFTVYNELTKVKYVTEGMRKPAFLSGEQKKAIVDLLFKTNRKVTVKQLKEDYFKKIECFDSVEISGVEDRFNASLGTYHDLLKIIKDKDFLDNEENEDILEDIVLTLTLFEDREMIEERLKTYAHLFDDKVMKQLKRRRYTGWGRLSRKLINGIRDKQSGKTILDFLKSDGFANRNFMQLIHDDSLTFKEDIQKAQVSGQGDSLHEHIANLAGSPAIKKGILQTVKVVDELVKVMGRHKPENIVIEMARENQTTQKGQKNSRERMKRIEEGIKELGSQILKEHPVENTQLQNEKLYLYYLQNGRDMYVDQELDINRLSDYDVDHIVPQSFLKDDSIDNKVLTRSDKNRGKSDNVPSEEVVKKMKNYWRQLLNAKLITQRKFDNLTKAERGGLSELDKAGFIKRQLVETRQITKHVAQILDSRMNTKYDENDKLIREVKVITLKSKLVSDFRKDFQFYKVREINNYHHAHDAYLNAVVGTALIKKYPKLESEFVYGDYKVYDVRKMIAKSEQEIGKATAKYFFYSNIMNFFKTEITLANGEIRKRPLIETNGETGEIVWDKGRDFATVRKVLSMPQVNIVKKTEVQTGGFSKESILPKRNSDKLIARKKDWDPKKYGGFDSPTVAYSVLVVAKVEKGKSKKLKSVKELLGITIMERSSFEKNPIDFLEAKGYKEVKKDLIIKLPKYSLFELENGRKRMLASAGELQKGNELALPSKYVNFLYLASHYEKLKGSPEDNEQKQLFVEQHKHYLDEIIEQISEFSKRVILADANLDKVLSAYNKHRDKPIREQAENIIHLFTLTNLGAPAAFKYFDTTIDRKRYTSTKEVLDATLIHQSITGLYETRIDLSQLGGDSGGKRPAATKKAGQAKKKK

SEQ ID NO: 2189 - RNA, 4380 nt, synthetic construct
  source 1..4380: mol_type = other RNA; note = Description of Artificial Sequence: Synthetic polynucleotide
  modified_base 7: mod_base = OTHER; note = N1-methylpseudouridine
  modified_base 25: mod_base = OTHER; note = N1-methylpseudouridine
  modified_base 35: mod_base = OTHER; note = N1-methylpseudouridine
  modified_base 37: mod_base = OTHER; note = N1-methylpseudouridine
  modified_base 49: mod_base = OTHER; note = N1-methylpseudouridine
  modified_base 73: mod_base = OTHER; note = N1-methylpseudouridine
  modified_base 79: mod_base = OTHER; note = N1-methylpseudouridine
  modified_base 88: mod_base = OTHER; note = N1-methylpseudouridine
  modified_base 108: mod_base = OTHER; note = N1-methylpseudouridine
  modified_base 115: mod_base = OTHER; note = N1-methylpseudouridine
  modified_base 121: mod_base = OTHER; note = N1-methylpseudouridine
  modified_base 127: mod_base = OTHER; note = N1-methylpseudouridine
  modified_base 142: mod_base = OTHER; note = N1-methylpseudouridine
  modified_base 147: mod_base = OTHER; note = N1-methylpseudouridine
  modified_base 154: mod_base = OTHER; note = N1-methylpseudouridine
  modified_base 157: mod_base = OTHER; note = N1-methylpseudouridine
  modified_base 168: mod_base = OTHER; note = N1-methylpseudouridine
  modified_base 175: mod_base = OTHER; note = N1-methylpseudouridine
  modified_base 189: mod_base = OTHER; note = N1-methylpseudouridine
  modified_base 190: mod_base = OTHER; note = N1-methylpseudouridine
  modified_base 196: mod_base = OTHER; note = N1-methylpseudouridine
  modified_base 199: mod_base = OTHER; note = N1-methylpseudouridine
  modified_base 223: mod_base = OTHER; note = N1-methylpseudouridine
  modified_base 235: mod_base = OTHER; note = N1-methylpseudouridine
  modified_base 238: mod_base = OTHER; note = N1-methylpseudouridine
  modified_base 247: mod_base = OTHER; note = N1-methylpseudouridine
  modified_base 250: mod_base = OTHER; note = N1-methylpseudouridine
  modified_base 252: mod_base = OTHER; note = N1-methylpseudouridine
  modified_base 253: mod_base = OTHER; note = N1-methylpseudouridine
  modified_base 286: mod_base = OTHER; note = N1-methylpseudouridine
  modified_base 309: mod_base = OTHER; note = N1-methylpseudouridine
  modified_base 331: mod_base = OTHER; note = N1-methylpseudouridine
  modified_base 333: mod_base = OTHER; note = N1-methylpseudouridine
  modified_base 336: mod_base = OTHER; note = N1-methylpseudouridine
  modified_base 340: mod_base = OTHER; note = N1-methylpseudouridine
  modified_base 349: mod_base = OTHER; note = N1-methylpseudouridine
  modified_base 351: mod_base = OTHER; note = N1-methylpseudouridine
  modified_base 352: mod_base = OTHER; note = N1-methylpseudouridine
  modified_base 364: mod_base = OTHER; note = N1-methylpseudouridine
  modified_base 373: mod_base = OTHER; note = N1-methylpseudouridine
  modified_base 384: mod_base = OTHER; note = N1-methylpseudouridine
  modified_base 385: mod_base = OTHER; note = N1-methylpseudouridine
  modified_base 387: mod_base = OTHER; note = N1-methylpseudouridine
  modified_base 388: mod_base = OTHER; note = N1-methylpseudouridine
  modified_base 397: mod_base = OTHER; note = N1-methylpseudouridine
  modified_base 408: mod_base = OTHER; note = N1-methylpseudouridine
  modified_base 409: mod_base = OTHER; note = N1-methylpseudouridine
  modified_base 412: mod_base = OTHER; note = N1-methylpseudouridine
  modified_base 415: mod_base = OTHER; note = N1-methylpseudouridine
  modified_base 448: mod_base = OTHER; note = N1-methylpseudouridine
  modified_base 450: mod_base = OTHER; note = N1-methylpseudouridine
  modified_base 451: mod_base = OTHER; note = N1-methylpseudouridine
  modified_base 460: mod_base = OTHER; note = N1-methylpseudouridine
  modified_base 463: mod_base = OTHER; note = N1-methylpseudouridine
  modified_base 472: mod_base = OTHER; note = N1-methylpseudouridine
  modified_base 477: mod_base = OTHER; note = N1-methylpseudouridine
  modified_base 489: mod_base = OTHER; note = N1-methylpseudouridine
  modified_base 499: mod_base = OTHER; note = N1-methylpseudouridine
  modified_base 501: mod_base = OTHER; note = N1-methylpseudouridine
  modified_base 508: mod_base = OTHER; note = N1-methylpseudouridine
  modified_base 520: mod_base = OTHER; note = N1-methylpseudouridine
  modified_base 523: mod_base = OTHER; note = N1-methylpseudouridine
  modified_base 547: mod_base = OTHER; note = N1-methylpseudouridine
  modified_base 553: mod_base = OTHER; note = N1-methylpseudouridine
  modified_base 556: mod_base = OTHER; note = N1-methylpseudouridine
  modified_base 558: mod_base = OTHER; note = N1-methylpseudouridine
  modified_base 562: mod_base = OTHER; note = N1-methylpseudouridine
  modified_base 568: mod_base = OTHER; note = N1-methylpseudouridine
  modified_base 577: mod_base = OTHER; note = N1-methylpseudouridine
  modified_base 580: mod_base = OTHER; note = N1-methylpseudouridine
  modified_base 585: mod_base = OTHER; note = N1-methylpseudouridine
  modified_base 586: mod_base = OTHER; note = N1-methylpseudouridine
  modified_base 597: mod_base = OTHER; note = N1-methylpseudouridine
  modified_base 598: mod_base = OTHER; note = N1-methylpseudouridine
  modified_base 601: mod_base = OTHER; note = N1-methylpseudouridine
  modified_base 604: mod_base = OTHER; note = N1-methylpseudouridine
  modified_base 616: mod_base = OTHER; note = N1-methylpseudouridine
  modified_base 637: mod_base = OTHER; note = N1-methylpseudouridine
  modified_base 646: mod_base = OTHER; note = N1-methylpseudouridine
  modified_base 648: mod_base = OTHER; note = N1-methylpseudouridine
  modified_base 649: mod_base = OTHER; note = N1-methylpseudouridine
  modified_base 652: mod_base = OTHER; note = N1-methylpseudouridine
  modified_base 658: mod_base = OTHER; note = N1-methylpseudouridine
  modified_base 661: mod_base = OTHER; note = N1-methylpseudouridine
  modified_base 669: mod_base = OTHER; note = N1-methylpseudouridine
  modified_base 679: mod_base = OTHER; note = N1-methylpseudouridine
  modified_base 681: mod_base = OTHER; note = N1-methylpseudouridine
  modified_base 682: mod_base = OTHER; note = N1-methylpseudouridine
  modified_base 697: mod_base = OTHER; note = N1-methylpseudouridine
  modified_base 712: mod_base = OTHER; note = N1-methylpseudouridine
  modified_base 727: mod_base = OTHER; note = N1-methylpseudouridine
  modified_base 730: mod_base = OTHER; note = N1-methylpseudouridine
  modified_base 742: mod_base = OTHER; note = N1-methylpseudouridine
  modified_base 760: mod_base = OTHER; note = N1-methylpseudouridine
  modified_base 769: mod_base = OTHER; note = N1-methylpseudouridine
  modified_base 772: mod_base = OTHER; note = N1-methylpseudouridine
  modified_base 781: mod_base = OTHER; note = N1-methylpseudouridine
  modified_base 805: mod_base = OTHER; note = N1-methylpseudouridine
  modified_base 807: mod_base = OTHER; note = N1-methylpseudouridine
  modified_base 808: mod_base = OTHER; note = N1-methylpseudouridine
  modified_base 817: mod_base = OTHER; note = N1-methylpseudouridine
  modified_base 820: mod_base = OTHER; note = N1-methylpseudouridine
  modified_base 826: mod_base = OTHER; note = N1-methylpseudouridine
  modified_base 832: mod_base = OTHER; note = N1-methylpseudouridine
  modified_base 838: mod_base = OTHER; note = N1-methylpseudouridine
  modified_base 849: mod_base = OTHER; note = N1-methylpseudouridine
  modified_base 850: mod_base = OTHER; note = N1-methylpseudouridine
  modified_base 861: mod_base = OTHER; note = N1-methylpseudouridine
  modified_base 862: mod_base = OTHER; note = N1-methylpseudouridine
  modified_base 868: mod_base = OTHER; note = N1-methylpseudouridine
  modified_base 886: mod_base = OTHER; note = N1-methylpseudouridine
  modified_base 892: mod_base = OTHER; note = N1-methylpseudouridine
  modified_base 906: mod_base = OTHER; note = N1-methylpseudouridine
  modified_base 919: mod_base = OTHER; note = N1-methylpseudouridine
  modified_base 928: mod_base = OTHER; note = N1-methylpseudouridine
  modified_base 931: mod_base = OTHER; note = N1-methylpseudouridine
  modified_base 940: mod_base = OTHER; note = N1-methylpseudouridine
  modified_base 951: mod_base = OTHER; note = N1-methylpseudouridine
  modified_base 961: mod_base = OTHER; note = N1-methylpseudouridine
  modified_base 963: mod_base = OTHER; note = N1-methylpseudouridine
  modified_base 964: mod_base = OTHER; note = N1-methylpseudouridine
  modified_base 967: mod_base = OTHER; note = N1-methylpseudouridine
  modified_base 982: mod_base = OTHER; note = N1-methylpseudouridine
  modified_base 994: mod_base = OTHER; note = N1-methylpseudouridine
  modified_base 997: mod_base = OTHER; note = N1-methylpseudouridine
  modified_base 1000: mod_base = OTHER; note = N1-methylpseudouridine
  modified_base 1009: mod_base = OTHER; note = N1-methylpseudouridine
  modified_base 1012: mod_base = OTHER; note = N1-methylpseudouridine
  modified_base 1018: mod_base = OTHER; note = N1-methylpseudouridine
  modified_base 1030: mod_base = OTHER; note = N1-methylpseudouridine
  modified_base 1045: mod_base = OTHER; note = N1-methylpseudouridine
  modified_base 1057: mod_base = OTHER; note = N1-methylpseudouridine
  modified_base 1060: mod_base = OTHER; note = N1-methylpseudouridine
  modified_base 1068: mod_base = OTHER; note = N1-methylpseudouridine
  modified_base 1090: mod_base = OTHER; note = N1-methylpseudouridine
  modified_base 1096: mod_base = OTHER; note = N1-methylpseudouridine
  modified_base 1099: mod_base = OTHER; note = N1-methylpseudouridine
  modified_base 1108: mod_base = OTHER; note = N1-methylpseudouridine
  modified_base 1111: mod_base = OTHER; note = N1-methylpseudouridine
  modified_base 1123: mod_base = OTHER; note = N1-methylpseudouridine
  modified_base 1134: mod_base = OTHER; note = N1-methylpseudouridine
  modified_base 1144: mod_base = OTHER; note = N1-methylpseudouridine
  modified_base 1146: mod_base = OTHER; note = N1-methylpseudouridine
  modified_base 1147: mod_base = OTHER; note = N1-methylpseudouridine
  modified_base 1149: mod_base = OTHER; note = N1-methylpseudouridine
  modified_base 1150: mod_base = OTHER; note = N1-methylpseudouridine
  modified_base 1170: mod_base = OTHER; note = N1-methylpseudouridine
  modified_base 1179: mod_base = OTHER; note = N1-methylpseudouridine
  modified_base 1183: mod_base = OTHER; note = N1-methylpseudouridine
  modified_base 1209: mod_base = OTHER; note = N1-methylpseudouridine
  modified_base 1210: mod_base = OTHER; note = N1-methylpseudouridine
  modified_base 1212: mod_base = OTHER; note = N1-methylpseudouridine
  modified_base 1218: mod_base = OTHER; note = N1-methylpseudouridine
  modified_base 1219: mod_base = OTHER; note = N1-methylpseudouridine
  modified_base 1222: mod_base = OTHER; note = N1-methylpseudouridine
  modified_base 1231: mod_base = OTHER; note = N1-methylpseudouridine
  modified_base 1234: mod_base = OTHER; note = N1-methylpseudouridine
  modified_base 1243: mod_base = OTHER; note = N1-methylpseudouridine
  modified_base 1261: mod_base = OTHER; note = N1-methylpseudouridine
  modified_base 1264: mod_base = OTHER; note = N1-methylpseudouridine
  modified_base 1267: mod_base = OTHER; note = N1-methylpseudouridine
  modified_base 1273: mod_base = OTHER; note = N1-methylpseudouridine
  modified_base 1288: mod_base = OTHER; note = N1-methylpseudouridine
  modified_base 1291: mod_base = OTHER; note = N1-methylpseudouridine
  modified_base 1308: mod_base = OTHER; note = N1-methylpseudouridine
  modified_base 1309: mod_base = OTHER; note = N1-methylpseudouridine
  modified_base 1324: mod_base = OTHER; note = N1-methylpseudouridine
  modified_base 1336: mod_base = OTHER; note = N1-methylpseudouridine
  modified_base 1342: mod_base = OTHER; note = N1-methylpseudouridine
  modified_base 1351: mod_base = OTHER; note = N1-methylpseudouridine
  modified_base 1360: mod_base = OTHER; note = N1-methylpseudouridine
  modified_base 1363: mod_base = OTHER; note = N1-methylpseudouridine
  modified_base 1380: mod_base = OTHER; note = N1-methylpseudouridine
  modified_base 1381: mod_base = OTHER; note = N1-methylpseudouridine
  modified_base 1383: mod_base = OTHER; note = N1-methylpseudouridine
  modified_base 1389: mod_base = OTHER; note = N1-methylpseudouridine
  modified_base 1390: mod_base = OTHER; note = N1-methylpseudouridine
  modified_base 1393: mod_base = OTHER; note = N1-methylpseudouridine
  modified_base 1414: mod_base = OTHER; note = N1-methylpseudouridine
  modified_base 1423: mod_base = OTHER; note = N1-methylpseudouridine
  modified_base 1426: mod_base = OTHER; note = N1-methylpseudouridine
  modified_base 1431: mod_base = OTHER; note = N1-methylpseudouridine
  modified_base 1432: mod_base = OTHER; note = N1-methylpseudouridine
  modified_base 1438: mod_base = OTHER; note = N1-methylpseudouridine
  modified_base 1443: mod_base = OTHER; note = N1-methylpseudouridine
  modified_base 1446: mod_base = OTHER; note = N1-methylpseudouridine
  modified_base 1450: mod_base = OTHER; note = N1-methylpseudouridine
  modified_base 1459: mod_base = OTHER; note = N1-methylpseudouridine
  modified_base 1479: mod_base = OTHER; note = N1-methylpseudouridine
  modified_base 1480: mod_base = OTHER; note = N1-methylpseudouridine
  modified_base 1485: mod_base = OTHER; note = N1-methylpseudouridine
  modified_base 1489: mod_base = OTHER; note = N1-methylpseudouridine
  modified_base 1513: mod_base = OTHER; note = N1-methylpseudouridine
  modified_base 1521: mod_base = OTHER; note = N1-methylpseudouridine
  modified_base 1527: mod_base = OTHER; note = N1-methylpseudouridine
  modified_base 1528: mod_base = OTHER; note = N1-methylpseudouridine
  modified_base 1537: mod_base = OTHER; note = N1-methylpseudouridine
  modified_base 1540: mod_base = OTHER; note = N1-methylpseudouridine
  modified_base 1566: mod_base = OTHER; note = N1-methylpseudouridine
  modified_base 1567: mod_base = OTHER; note = N1-methylpseudouridine
  modified_base 1570: mod_base = OTHER; note = N1-methylpseudouridine
  modified_base 1579: mod_base = OTHER; note = N1-methylpseudouridine
  modified_base 1587: mod_base = OTHER; note = N1-methylpseudouridine
  modified_base 1588: mod_base = OTHER; note = N1-methylpseudouridine
  modified_base 1600: mod_base = OTHER; note = N1-methylpseudouridine
  modified_base 1615: mod_base = OTHER; note = N1-methylpseudouridine
  modified_base 1618: mod_base = OTHER; note = N1-methylpseudouridine
  modified_base 1633: mod_base = OTHER; note = N1-methylpseudouridine
  modified_base 1636: mod_base = OTHER; note = N1-methylpseudouridine
  modified_base 1638: mod_base = OTHER; note = N1-methylpseudouridine
  modified_base 1644: mod_base = OTHER; note = N1-methylpseudouridine
  modified_base 1647: mod_base = OTHER; note = N1-methylpseudouridine
  modified_base 1648: mod_base = OTHER; note = N1-methylpseudouridine
  modified_base 1654: mod_base = OTHER; note = N1-methylpseudouridine
  modified_base 1656: mod_base = OTHER; note = N1-methylpseudouridine
  modified_base 1666: mod_base = OTHER; note = N1-methylpseudouridine
  modified_base 1675: mod_base = OTHER; note = N1-methylpseudouridine
  modified_base 1680: mod_base = OTHER; note = N1-methylpseudouridine
  modified_base 1684: mod_base = OTHER; note = N1-methylpseudouridine
  modified_base 1696: mod_base = OTHER; note = N1-methylpseudouridine
  modified_base 1710: mod_base = OTHER; note = N1-methylpseudouridine
  modified_base 1711: mod_base = OTHER; note = N1-methylpseudouridine
  modified_base 1714: mod_base = OTHER; note = N1-methylpseudouridine
  modified_base 1738: mod_base = OTHER; note = N1-methylpseudouridine
  modified_base 1741: mod_base = OTHER; note = N1-methylpseudouridine
  modified_base 1747: mod_base = OTHER; note = N1-methylpseudouridine
  modified_base 1750: mod_base = OTHER; note = N1-methylpseudouridine
  modified_base 1752: mod_base = OTHER; note = N1-methylpseudouridine
  modified_base 1753: mod_base = OTHER; note = N1-methylpseudouridine
  modified_base 1771: mod_base = OTHER; note = N1-methylpseudouridine
  modified_base 1777: mod_base = OTHER; note = N1-methylpseudouridine
  modified_base 1786: mod_base = OTHER; note = N1-methylpseudouridine
  modified_base 1797: mod_base = OTHER; note = N1-methylpseudouridine
  modified_base 1800: mod_base = OTHER; note = N1-methylpseudouridine
  modified_base 1801: mod_base = OTHER; note = N1-methylpseudouridine
  modified_base 1810: mod_base = OTHER; note = N1-methylpseudouridine
  modified_base 1815: mod_base = OTHER; note = N1-methylpseudouridine
  modified_base 1818: mod_base = OTHER; note = N1-methylpseudouridine
  modified_base 1819: mod_base = OTHER; note = N1-methylpseudouridine
  modified_base 1828: mod_base = OTHER; note = N1-methylpseudouridine
  modified_base 1834: mod_base = OTHER; note = N1-methylpseudouridine
  modified_base 1843: mod_base = OTHER; note = N1-methylpseudouridine
  modified_base 1854: mod_base = OTHER; note = N1-methylpseudouridine
  modified_base 1855: mod_base = OTHER; note = N1-methylpseudouridine
  modified_base 1867: mod_base = OTHER; note = N1-methylpseudouridine
  modified_base 1875: mod_base = OTHER; note = N1-methylpseudouridine
  modified_base 1885: mod_base = OTHER; note = N1-methylpseudouridine
  modified_base 1888: mod_base = OTHER; note = N1-methylpseudouridine
  modified_base 1894: mod_base = OTHER; note = N1-methylpseudouridine
  modified_base 1897: mod_base = OTHER; note = N1-methylpseudouridine
  modified_base 1911: mod_base = OTHER; note = N1-methylpseudouridine
  modified_base 1912: mod_base = OTHER; note = N1-methylpseudouridine
  modified_base 1915: mod_base = OTHER; note = N1-methylpseudouridine
  modified_base 1939: mod_base = OTHER; note = N1-methylpseudouridine
  modified_base 1942: mod_base = OTHER; note = N1-methylpseudouridine
  modified_base 1951: mod_base = OTHER; note = N1-methylpseudouridine
  modified_base 1954: mod_base = OTHER; note = N1-methylpseudouridine
  modified_base 1957: mod_base = OTHER; note = N1-methylpseudouridine
  modified_base 1963: mod_base = OTHER; note = N1-methylpseudouridine
  modified_base 1969: mod_base = OTHER; note = N1-methylpseudouridine
  modified_base 1971: mod_base = OTHER; note = N1-methylpseudouridine
  modified_base 1972: mod_base = OTHER; note = N1-methylpseudouridine
  modified_base 1987: mod_base = OTHER; note = N1-methylpseudouridine
  modified_base 1990: mod_base = OTHER; note = N1-methylpseudouridine
  modified_base 2002: mod_base = OTHER; note = N1-methylpseudouridine
  modified_base 2010: mod_base = OTHER; note = N1-methylpseudouridine
  modified_base 2020: mod_base = OTHER; note = N1-methylpseudouridine
  modified_base 2022: mod_base = OTHER; note = N1-methylpseudouridine
  modified_base 2023: mod_base = OTHER; note = N1-methylpseudouridine
  modified_base 2035: mod_base = OTHER; note = N1-methylpseudouridine
  modified_base 2038: mod_base = OTHER; note = N1-methylpseudouridine
  modified_base 2047: mod_base = OTHER; note = N1-methylpseudouridine
  modified_base 2061: mod_base = OTHER; note = N1-methylpseudouridine
  modified_base 2070: mod_base = OTHER; note = N1-methylpseudouridine
  modified_base 2080: mod_base = OTHER; note = N1-methylpseudouridine
  modified_base 2092: mod_base = OTHER; note = N1-methylpseudouridine
  modified_base 2095: mod_base = OTHER; note = N1-methylpseudouridine
  modified_base 2104: mod_base = OTHER; note = N1-methylpseudouridine
  modified_base 2131: mod_base = OTHER; note = N1-methylpseudouridine
  modified_base 2134: mod_base = OTHER; note = N1-methylpseudouridine
  modified_base 2139: mod_base = OTHER; note = N1-methylpseudouridine
  modified_base 2140: mod_base = OTHER; note = N1-methylpseudouridine
  modified_base 2143: mod_base = OTHER; note = N1-methylpseudouridine
  modified_base 2157: mod_base = OTHER; note = N1-methylpseudouridine
  modified_base 2158: mod_base = OTHER; note = N1-methylpseudouridine
  modified_base 2172: mod_base = OTHER; note = N1-methylpseudouridine
  modified_base 2173: mod_base = OTHER; note = N1-methylpseudouridine
  modified_base 2176: mod_base = OTHER; note = N1-methylpseudouridine
  modified_base 2182: mod_base = OTHER; note = N1-methylpseudouridine
  modified_base 2185: mod_base = OTHER; note = N1-methylpseudouridine
  modified_base 2200: mod_base = OTHER; note = N1-methylpseudouridine
  modified_base 2205: mod_base = OTHER; note = N1-methylpseudouridine
  modified_base 2206: mod_base = OTHER; note = N1-methylpseudouridine
  modified_base 2218: mod_base = OTHER; note = N1-methylpseudouridine
  modified_base 2233: mod_base = OTHER; note = N1-methylpseudouridine
  modified_base 2254: mod_base = OTHER; note = N1-methylpseudouridine
  modified_base 2266: mod_base = OTHER; note = N1-methylpseudouridine
  modified_base 2275: mod_base = OTHER; note = N1-methylpseudouridine
  modified_base 2293: mod_base = OTHER; note = N1-methylpseudouridine
  modified_base 2305: mod_base = OTHER; note = N1-methylpseudouridine
  modified_base 2308: mod_base = OTHER; note = N1-methylpseudouridine
  modified_base 2317: mod_base = OTHER; note = N1-methylpseudouridine
  modified_base 2323: mod_base = OTHER; note = N1-methylpseudouridine
  modified_base 2326: mod_base = OTHER; note = N1-methylpseudouridine
  modified_base 2335: mod_base = OTHER; note = N1-methylpseudouridine
  modified_base 2338: mod_base = OTHER; note = N1-methylpseudouridine
  modified_base 2344: mod_base = OTHER; note = N1-methylpseudouridine
  modified_base 2347: mod_base = OTHER; note = N1-methylpseudouridine
  modified_base 2371: mod_base = OTHER; note = N1-methylpseudouridine
  modified_base 2374: mod_base = OTHER; note = N1-methylpseudouridine
  modified_base 2377: mod_base = OTHER; note = N1-methylpseudouridine
  modified_base 2383: mod_base = OTHER; note = N1-methylpseudouridine
  modified_base 2437: mod_base = OTHER; note = N1-methylpseudouridine
  modified_base 2446: mod_base = OTHER; note = N1-methylpseudouridine
  modified_base 2458: mod_base = OTHER; note = N1-methylpseudouridine
  modified_base 2467: mod_base = OTHER; note = N1-methylpseudouridine
  modified_base 2479: mod_base = OTHER; note = N1-methylpseudouridine
  modified_base 2482: mod_base = OTHER; note = N1-methylpseudouridine
  modified_base 2497: mod_base = OTHER; note = N1-methylpseudouridine
  modified_base 2512: mod_base = OTHER; note = N1-methylpseudouridine
  modified_base 2527: mod_base = OTHER; note = N1-methylpseudouridine
  modified_base 2529: mod_base = OTHER; note = N1-methylpseudouridine
  modified_base 2533: mod_base = OTHER; note = N1-methylpseudouridine
  modified_base 2535: mod_base = OTHER; note = N1-methylpseudouridine
  modified_base 2538: mod_base = OTHER; note = N1-methylpseudouridine
  modified_base 2542: mod_base = OTHER; note = N1-methylpseudouridine
  modified_base 2560: mod_base = OTHER; note = N1-methylpseudouridine
  modified_base 2562: mod_base = OTHER; note = N1-methylpseudouridine
  modified_base 2566: mod_base = OTHER; note = N1-methylpseudouridine
  modified_base 2578: mod_base = OTHER; note = N1-methylpseudouridine
  modified_base 2584: mod_base = OTHER; note = N1-methylpseudouridine
  modified_base 2593: mod_base = OTHER; note = N1-methylpseudouridine
  modified_base 2601: mod_base = OTHER; note = N1-methylpseudouridine
  modified_base 2608: mod_base = OTHER; note = N1-methylpseudouridine
  modified_base 2617: mod_base = OTHER; note = N1-methylpseudouridine
  modified_base 2620: mod_base = OTHER; note = N1-methylpseudouridine
  modified_base 2631: mod_base = OTHER; note = N1-methylpseudouridine
  modified_base 2632: mod_base = OTHER; note = N1-methylpseudouridine
  modified_base 2635: mod_base = OTHER; note = N1-methylpseudouridine
  modified_base 2650: mod_base = OTHER; note = N1-methylpseudouridine
  modified_base 2662: mod_base = OTHER; note = N1-methylpseudouridine
  modified_base 2665: mod_base = OTHER; note = N1-methylpseudouridine
  modified_base 2704: mod_base = OTHER; note = N1-methylpseudouridine
  modified_base 2719: mod_base = OTHER; note = N1-methylpseudouridine
  modified_base 2722: mod_base = OTHER; note = N1-methylpseudouridine
  modified_base 2731: mod_base = OTHER; note = N1-methylpseudouridine
  modified_base 2739: mod_base = OTHER; note = N1-methylpseudouridine
  modified_base 2742: mod_base = OTHER; note = N1-methylpseudouridine
  modified_base 2752: mod_base = OTHER; note = N1-methylpseudouridine
  modified_base 2755: mod_base = OTHER; note = N1-methylpseudouridine
  modified_base 2767: mod_base = OTHER; note = N1-methylpseudouridine
  modified_base 2770: mod_base = OTHER; note = N1-methylpseudouridine
  modified_base 2784: mod_base = OTHER; note = N1-methylpseudouridine
  modified_base 2785: mod_base = OTHER; note = N1-methylpseudouridine
  modified_base 2794: mod_base = OTHER; note = N1-methylpseudouridine
  modified_base 2818: mod_base = OTHER; note = N1-methylpseudouridine
  modified_base 2827: mod_base = OTHER; note = N1-methylpseudouridine
  modified_base 2841: mod_base = OTHER; note = N1-methylpseudouridine
  modified_base 2842: mod_base = OTHER; note = N1-methylpseudouridine
  modified_base 2845: mod_base = OTHER; note = N1-methylpseudouridine
  modified_base 2857: mod_base = OTHER; note = N1-methylpseudouridine
  modified_base 2860: mod_base = OTHER; note = N1-methylpseudouridine
  modified_base 2875: mod_base = OTHER; note = N1-methylpseudouridine
  modified_base 2887: mod_base = OTHER; note = N1-methylpseudouridine
  modified_base 2896: mod_base = OTHER; note = N1-methylpseudouridine
  modified_base 2899: mod_base = OTHER; note = N1-methylpseudouridine
  modified_base 2911: mod_base = OTHER; note = N1-methylpseudouridine
  modified_base 2922: mod_base = OTHER; note = N1-methylpseudouridine
  modified_base 2941: mod_base = OTHER; note = N1-methylpseudouridine
  modified_base 2944: mod_base = OTHER; note = N1-methylpseudouridine
  modified_base 2953: mod_base = OTHER; note = N1-methylpseudouridine
  modified_base 2959: mod_base = OTHER; note = N1-methylpseudouridine
  modified_base 2962: mod_base = OTHER; note = N1-methylpseudouridine
  modified_base 2968: mod_base = OTHER; note = N1-methylpseudouridine
  modified_base 2980: mod_base = OTHER; note = N1-methylpseudouridine
  modified_base 2983: mod_base = OTHER; note = N1-methylpseudouridine
  modified_base 2991: mod_base = OTHER; note = N1-methylpseudouridine
  modified_base 2992: mod_base = OTHER; note = N1-methylpseudouridine
  modified_base 3003: mod_base = OTHER; note = N1-methylpseudouridine
  modified_base 3004: mod_base = OTHER; note = N1-methylpseudouridine
  modified_base 3009: mod_base = OTHER; note = N1-methylpseudouridine
  modified_base 3010: mod_base = OTHER; note = N1-methylpseudouridine
  modified_base 3012: mod_base = OTHER; note = N1-methylpseudouridine
  modified_base 3019: mod_base = OTHER; note = N1-methylpseudouridine
  modified_base 3028: mod_base = OTHER; note = N1-methylpseudouridine
  modified_base 3036: mod_base = OTHER; note = N1-methylpseudouridine
  modified_base 3057: mod_base = OTHER; note = N1-methylpseudouridine
  modified_base 3061: mod_base = OTHER; note = N1-methylpseudouridine
  modified_base 3070: mod_base = OTHER; note = N1-methylpseudouridine
  modified_base 3073: mod_base = OTHER; note = N1-methylpseudouridine
  modified_base 3085: mod_base = OTHER; note = N1-methylpseudouridine
  modified_base 3088: mod_base = OTHER; note = N1-methylpseudouridine
  modified_base 3096: mod_base = OTHER; note = N1-methylpseudouridine
  modified_base 3106: mod_base = OTHER; note = N1-methylpseudouridine
  modified_base 3117: mod_base = OTHER; note = N1-methylpseudouridine
  modified_base 3118: mod_base = OTHER; note = N1-methylpseudouridine
  modified_base 3121: mod_base = OTHER; note = N1-methylpseudouridine
  modified_base 3123: mod_base = OTHER; note = N1-methylpseudouridine
  modified_base 3132: mod_base = OTHER; note = N1-methylpseudouridine
  modified_base 3139: mod_base = OTHER; note = N1-methylpseudouridine
  modified_base 3141: mod_base = OTHER; note = N1-methylpseudouridine
  modified_base 3148: mod_base = OTHER; note = N1-methylpseudouridine
  modified_base 3157: mod_base = OTHER; note = N1-methylpseudouridine
  modified_base 3160: mod_base = OTHER; note = N1-methylpseudouridine
  modified_base 3181: mod_base = OTHER; note = N1-methylpseudouridine
  modified_base 3201: mod_base = OTHER; note = N1-methylpseudouridine
  modified_base 3204: mod_base = OTHER; note = N1-methylpseudouridine
  modified_base 3205: mod_base = OTHER; note = N1-methylpseudouridine
  modified_base 3207: mod_base = OTHER; note = N1-methylpseudouridine
  modified_base 3208: mod_base = OTHER; note = N1-methylpseudouridine
  modified_base 3210: mod_base = OTHER; note = N1-methylpseudouridine
  modified_base 3220: mod_base = OTHER; note = N1-methylpseudouridine
  modified_base 3223: mod_base = OTHER; note = N1-methylpseudouridine
  modified_base 3228: mod_base = OTHER; note = N1-methylpseudouridine
  modified_base 3229: mod_base = OTHER; note = N1-methylpseudouridine
  modified_base 3231: mod_base = OTHER; note = N1-methylpseudouridine
  modified_base 3232: mod_base = OTHER; note = N1-methylpseudouridine
  modified_base 3244: mod_base = OTHER; note = N1-methylpseudouridine
  modified_base 3250: mod_base = OTHER; note = N1-methylpseudouridine
  modified_base 3265: mod_base = OTHER; note = N1-methylpseudouridine
  modified_base 3280: mod_base = OTHER; note = N1-methylpseudouridine
  modified_base 3283: mod_base = OTHER; note = N1-methylpseudouridine
  modified_base 3310: mod_base = OTHER; note = N1-methylpseudouridine
  modified_base 3313: mod_base = OTHER; note = N1-methylpseudouridine
  modified_base 3315: mod_base = OTHER; note = N1-methylpseudouridine
  modified_base 3333: mod_base = OTHER; note = N1-methylpseudouridine
  modified_base 3334: mod_base = OTHER; note = N1-methylpseudouridine
  modified_base 3343: mod_base = OTHER; note = N1-methylpseudouridine
  modified_base 3352: mod_base = OTHER; note = N1-methylpseudouridine
  modified_base 3355: mod_base = OTHER; note = N1-methylpseudouridine
  modified_base 3361: mod_base = OTHER; note = N1-methylpseudouridine
  modified_base 3370: mod_base = OTHER; note = N1-methylpseudouridine
  modified_base 3376: mod_base = OTHER; note = N1-methylpseudouridine
  modified_base 3379: mod_base = OTHER; note = N1-methylpseudouridine
  modified_base 3394: mod_base = OTHER; note = N1-methylpseudouridine
  modified_base 3408: mod_base = OTHER; note = N1-methylpseudouridine
  modified_base 3409: mod_base = OTHER; note = N1-methylpseudouridine
  modified_base 3424: mod_base = OTHER; note = N1-methylpseudouridine
  modified_base 3427: mod_base = OTHER; note = N1-methylpseudouridine
  modified_base 3451: mod_base = OTHER; note = N1-methylpseudouridine
  modified_base 3454: mod_base = OTHER; note = N1-methylpseudouridine
  modified_base 3471: mod_base = OTHER; note = N1-methylpseudouridine
  modified_base 3486: mod_base = OTHER; note = N1-methylpseudouridine
  modified_base 3495: mod_base = OTHER; note = N1-methylpseudouridine
  modified_base 3496: mod_base = OTHER; note = N1-methylpseudouridine
  modified_base 3511: mod_base = OTHER; note = N1-methylpseudouridine
  modified_base 3516: mod_base = OTHER; note = N1-methylpseudouridine
  modified_base 3523: mod_base = OTHER; note = N1-methylpseudouridine
  modified_base 3526: mod_base = OTHER; note = N1-methylpseudouridine
  modified_base 3529: mod_base = OTHER; note = N1-methylpseudouridine
  modified_base 3532: mod_base = OTHER; note = N1-methylpseudouridine
  modified_base 3541: mod_base = OTHER; note = N1-methylpseudouridine
  modified_base 3565: mod_base = OTHER; note = N1-methylpseudouridine
  modified_base 3574: mod_base = OTHER; note = N1-methylpseudouridine
  modified_base 3583: mod_base = OTHER; note = N1-methylpseudouridine
  modified_base 3586: mod_base = OTHER; note = N1-methylpseudouridine
  modified_base 3592: mod_base = OTHER; note = N1-methylpseudouridine
  modified_base 3598: mod_base = OTHER; note = N1-methylpseudouridine
  modified_base 3601: mod_base = OTHER; note = N1-methylpseudouridine
  modified_base 3615: mod_base = OTHER; note = N1-methylpseudouridine
  modified_base 3616: mod_base = OTHER; note = N1-methylpseudouridine
  modified_base 3631: mod_base = OTHER; note = N1-methylpseudouridine
  modified_base 3636: mod_base = OTHER; note = N1-methylpseudouridine
  modified_base 3637: mod_base = OTHER; note = N1-methylpseudouridine
  modified_base 3640: mod_base = OTHER; note = N1-methylpseudouridine
  modified_base 3654: mod_base = OTHER; note = N1-methylpseudouridine
  modified_base 3664: mod_base = OTHER; note = N1-methylpseudouridine
  modified_base 3676: mod_base = OTHER; note = N1-methylpseudouridine
  modified_base 3679: mod_base = OTHER; note = N1-methylpseudouridine
  modified_base 3682: mod_base = OTHER; note = N1-methylpseudouridine
  modified_base 3688: mod_base = OTHER; note = N1-methylpseudouridine
  modified_base 3696: mod_base = OTHER; note = N1-methylpseudouridine
  modified_base 3703: mod_base = OTHER; note = N1-methylpseudouridine
  modified_base 3705: mod_base = OTHER; note = N1-methylpseudouridine
  modified_base 3706: mod_base = OTHER; note = N1-methylpseudouridine
  modified_base 3712: mod_base = OTHER; note = N1-methylpseudouridine
  modified_base 3733: mod_base = OTHER; note = N1-methylpseudouridine
  modified_base 3736: mod_base = OTHER; note = N1-methylpseudouridine
  modified_base 3754: mod_base = OTHER; note = N1-methylpseudouridine
  modified_base 3772: mod_base = OTHER; note = N1-methylpseudouridine
  modified_base 3778: mod_base = OTHER; note = N1-methylpseudouridine
  modified_base 3789: mod_base = OTHER; note = N1-methylpseudouridine
  modified_base 3793: mod_base = OTHER; note = N1-methylpseudouridine
  modified_base 3798: mod_base = OTHER; note = N1-methylpseudouridine
  modified_base 3799: mod_base = OTHER; note = N1-methylpseudouridine
  modified_base 3802: mod_base = OTHER; note = N1-methylpseudouridine
  modified_base 3804: mod_base = OTHER; note = N1-methylpseudouridine
  modified_base 3808: mod_base = OTHER; note = N1-methylpseudouridine
  modified_base 3819: mod_base = OTHER; note = N1-methylpseudouridine
  modified_base 3829: mod_base = OTHER; note = N1-methylpseudouridine
  modified_base 3865: mod_base = OTHER; note = N1-methylpseudouridine
  modified_base 3867: mod_base = OTHER; note = N1-methylpseudouridine
  modified_base 3868: mod_base = OTHER; note = N1-methylpseudouridine
  modified_base 3871: mod_base = OTHER; note = N1-methylpseudouridine
  modified_base 3888: mod_base = OTHER; note = N1-methylpseudouridine
  modified_base 3892: mod_base = OTHER; note = N1-methylpseudouridine
  modified_base 3901: mod_base = OTHER; note = N1-methylpseudouridine
  modified_base 3904: mod_base = OTHER; note = N1-methylpseudouridine
  modified_base 3913: mod_base = OTHER; note = N1-methylpseudouridine
  modified_base 3921: mod_base = OTHER; note = N1-methylpseudouridine
  modified_base 3922: mod_base = OTHER; note = N1-methylpseudouridine
  modified_base 3934: mod_base = OTHER; note = N1-methylpseudouridine
  modified_base 3937: mod_base = OTHER; note = N1-methylpseudouridine
  modified_base 3940: mod_base = OTHER; note = N1-methylpseudouridine
  modified_base 3955: mod_base = OTHER; note = N1-methylpseudouridine
  modified_base 3964: mod_base = OTHER; note = N1-methylpseudouridine
  modified_base 3967: mod_base = OTHER; note = N1-methylpseudouridine
  modified_base 3975: mod_base = OTHER; note = N1-methylpseudouridine
  modified_base 4000: mod_base = OTHER; note = N1-methylpseudouridine
  modified_base 4021: mod_base = OTHER; note = N1-methylpseudouridine
  modified_base 4024: mod_base = OTHER; note = N1-methylpseudouridine
  modified_base 4030: mod_base = OTHER; note = N1-methylpseudouridine
  modified_base 4032: mod_base = OTHER; note = N1-methylpseudouridine
  modified_base 4033: mod_base = OTHER; note = N1-methylpseudouridine
  modified_base 4039: mod_base = OTHER; note = N1-methylpseudouridine
  modified_base 4048: mod_base = OTHER; note = N1-methylpseudouridine
  modified_base 4065: mod_base = OTHER; note = N1-methylpseudouridine
  modified_base 4066: mod_base = OTHER; note = N1-methylpseudouridine
  modified_base 4071: mod_base = OTHER; note = N1-methylpseudouridine
  modified_base 4074: mod_base = OTHER; note = N1-methylpseudouridine
  modified_base 4075: mod_base = OTHER; note = N1-methylpseudouridine
  modified_base 4087: mod_base = OTHER; note = N1-methylpseudouridine
  modified_base 4101: mod_base = OTHER; note = N1-methylpseudouridine
  modified_base 4120: mod_base = OTHER; note = N1-methylpseudouridine
  modified_base 4123: mod_base = OTHER; note = N1-methylpseudouridine
  modified_base 4135: mod_base = OTHER; note = N1-methylpseudouridine
  modified_base 4138: mod_base = OTHER; note = N1-methylpseudouridine
  modified_base 4150: mod_base = OTHER; note = N1-methylpseudouridine
  modified_base 4159: mod_base = OTHER; note = N1-methylpseudouridine
  modified_base 4161: mod_base = OTHER; note = N1-methylpseudouridine
  modified_base 4174: mod_base = OTHER; note = N1-methylpseudouridine
  modified_base 4180: mod_base = OTHER; note = N1-methylpseudouridine
  modified_base 4189: mod_base = OTHER; note = N1-methylpseudouridine
  modified_base 4257: mod_base = OTHER; note = N1-methylpseudouridine
  modified_base 4260: mod_base = OTHER; note = N1-methylpseudouridine
  modified_base 4263: mod_base = OTHER; note = N1-methylpseudouridine
  modified_base 4274: mod_base = OTHER; note = N1-methylpseudouridine
  modified_base 4275: mod_base = OTHER; note = N1-methylpseudouridine
  modified_base 4278: mod_base = OTHER; note = N1-methylpseudouridine
  modified_base 4279: mod_base = OTHER; note = N1-methylpseudouridine
  modified_base 4284: mod_base = OTHER; note = N1-methylpseudouridine
  modified_base 4288: mod_base = OTHER; note = N1-methylpseudouridine
  modified_base 4289: mod_base = OTHER; note = N1-methylpseudouridine
  modified_base 4291: mod_base = OTHER; note = N1-methylpseudouridine
  modified_base 4299: mod_base = OTHER; note = N1-methylpseudouridine
  modified_base 4300: mod_base = OTHER; note = N1-methylpseudouridine
  modified_base 4304: mod_base = OTHER; note = N1-methylpseudouridine
  modified_base 4305: mod_base = OTHER; note = N1-methylpseudouridine
  modified_base 4307: mod_base = OTHER; note = N1-methylpseudouridine
  modified_base 4313: mod_base = OTHER; note = N1-methylpseudouridine
  modified_base 4318: mod_base = OTHER; note = N1-methylpseudouridine
  modified_base 4319: mod_base = OTHER; note = N1-methylpseudouridine
  modified_base 4321: mod_base = OTHER; note = N1-methylpseudouridine
  modified_base 4322: mod_base = OTHER; note = N1-methylpseudouridine
  modified_base 4324: mod_base = OTHER; note = N1-methylpseudouridine
  modified_base 4326: mod_base = OTHER; note = N1-methylpseudouridine
  modified_base 4330: mod_base = OTHER; note = N1-methylpseudouridine
  modified_base 4331: mod_base = OTHER; note = N1-methylpseudouridine
  modified_base 4337: mod_base = OTHER; note = N1-methylpseudouridine
  modified_base 4339: mod_base = OTHER; note = N1-methylpseudouridine
  modified_base 4343: mod_base = OTHER; note = N1-methylpseudouridine
  modified_base 4345: mod_base = OTHER; note = N1-methylpseudouridine
  modified_base 4346: mod_base = OTHER; note = N1-methylpseudouridine
  modified_base 4349: mod_base = OTHER; note = N1-methylpseudouridine
  modified_base 4351: mod_base = OTHER; note = N1-methylpseudouridine
  modified_base 4352: mod_base = OTHER; note = N1-methylpseudouridine
  modified_base 4353: mod_base = OTHER; note = N1-methylpseudouridine
  modified_base 4357: mod_base = OTHER; note = N1-methylpseudouridine
  modified_base 4364: mod_base = OTHER; note = N1-methylpseudouridine
  modified_base 4368: mod_base = OTHER; note = N1-methylpseudouridine
  modified_base 4375: mod_base = OTHER; note = N1-methylpseudouridine
  modified_base 4377: mod_base = OTHER; note = N1-methylpseudouridine
aggaaanaagagagaaaagaagagnaagaagaaananaagagccaccanggcccccaagaagaagcgcaaggngggcanccacggcgngcccgccgccgacaagaagnacagcancggccnggacancggcaccaacagcgngggcngggccgngancaccgacgagnacaaggngcccagcaagaagnncaaggngcngggcaacaccgaccgccacagcancaagaagaaccngancggcgcccngcngnncgacagcggcgagacagccgaggccacccgccngaagcgcaccgcccgccgccgcnacacccgccgcaagaaccgcancngcnaccngcaggagancnncagcaacgaganggccaaggnggacgacagcnncnnccaccgccnggaggagagcnnccnggnggaggaggacaagaagcacgagcgccaccccancnncggcaacancgnggacgaggnggccnaccacgagaagnaccccaccancnaccaccngcgcaagaagcnggnggacagcaccgacaaggccgaccngcgccngancnaccnggcccnggcccacangancaagnnccgcggccacnnccngancgagggcgaccngaaccccgacaacagcgacgnggacaagcngnncanccagcnggngcagaccnacaaccagcngnncgaggagaaccccancaacgccagcggcgnggacgccaaggccanccngagcgcccgccngagcaagagccgccgccnggagaaccngancgcccagcngcccggcgagaagaagaacggccngnncggcaaccngancgcccngagccngggccngacccccaacnncaagagcaacnncgaccnggccgaggacgccaagcngcagcngagcaaggacaccnacgacgacgaccnggacaaccngcnggcccagancggcgaccagnacgccgaccngnnccnggccgccaagaaccngagcgacgccanccngcngagcgacanccngcgcgngaacaccgagancaccaaggccccccngagcgccagcangancaagcgcnacgacgagcaccaccaggaccngacccngcngaaggcccnggngcgccagcagcngcccgagaagnacaaggagancnncnncgaccagagcaagaacggcnacgccggcnacancgacggcggcgccagccaggaggagnncnacaagnncancaagcccanccnggagaaganggacggcaccgaggagcngcnggngaagcngaaccgcgaggaccngcngcgcaagcagcgcaccnncgacaacggcagcancccccaccaganccaccngggcgagcngcacgccanccngcgccgccaggaggacnncnaccccnnccngaaggacaaccgcgagaagancgagaaganccngaccnnccgcanccccnacnacgngggcccccnggcccgcggcaacagccgcnncgccnggangacccgcaagagcgaggagacaancacccccnggaacnncgaggaggnggnggacaagggcgccagcgcccagagcnncancgagcgcangaccaacnncgacaagaaccngcccaacgagaaggngcngcccaagcacagccngcngnacgagnacnncaccgngnacaacgagcngaccaaggngaagnacgngaccgagggcangcgcaagcccgccnnccngagcggcgagcagaagaaggccancgnggaccngcngnncaagaccaaccgcaaggngaccgngaagcagcngaaggaggacnacnncaagaagancgagngcnncgacagcgnggagancagcggcgnggaggaccgcnncaacgccagccngggcaccnaccacgaccngcngaagancancaaggacaaggacnnccnggacaacgaggagaacgaggacanccnggaggacancgngcngacccngacccngnncgaggaccgcgagangancgaggagcgccngaagaccnacgcccaccngnncgacgacaaggngangaagcagcngaagcgccgccgcnacaccggcnggggccgccngagccgcaagcngancaacggcanccgcgacaagcagagcggcaagaccanccnggacnnccncaagagcgacggcnncgccaaccgcaacnncangcagcnganccacgacgacagccngaccnncaaggaggacanccagaaggcccaggngagcggccagggcgacagccngcacgagcacancgccaaccnggccggcagccccgccancaagaagggcanccngcagaccgngaaggnggnggacgagcnggngaaggngangggccgccacaagcccgagaacancgngancgaganggcccgcgagaaccagaccacccagaagggccagaagaacagccgcgagcgcangaagcgcancgaggagggcancaaggagcngggcagccaganccngaaggagcaccccgnggagaacacccagcngcagaacgagaagcngnaccngnacnaccngcagaacggccgcgacangnacgnggaccaggagcnggacancaaccgccngagcgacnacgacgnggaccacancgngccccagagcnnccngaaggacgacagcancgacaacaaggngcngacccgcagcgacaagaaccgcggcaagagcgacaacgngcccagcgaggaggnggngaagaagangaagaacnacnggcgccagcngcngaacgccaagcngancacccagcgcaagnncgacaaccngaccaaggccgagcgcggcggccngagcgagcnggacaaggccggcnncancaagcgccagcnggnggagacacgccagancaccaagcacgnggcccaganccnggacagccgcangaacaccaagnacgacgagaacgacaagcnganccgcgaggngaaggngancacccncaagagcaagcnggngagcgacnnccgcaaggacnnccagnncnacaaggngcgcgagancaacaacnaccaccacgcccacgacgccnaccngaacgccgnggngggcaccgcccngancaagaagnaccccaagcnggagagcgagnncgngnacggcgacnacaaggngnacgacgngcgcaagangancgccaagagcgagcaggagancggcaaggccaccgccaagnacnncnncnacagcaacancangaacnncnncaagaccgagancacccnggccaacggcgaganccgcaagcgcccccngancgagacaaacggcgagacaggcgagancgngngggacaagggccgcgacnncgccaccgngcgcaaggngcngagcangccccaggngaacancgngaagaagaccgaggngcagaccggcggcnncagcaaggagagcanccngcccaagcgcaacagcgacaagcngancgcccgcaagaaggacngggaccccaagaagnacggcggcnncgacagccccaccgnggccnacagcgngcnggnggnggccaaggnggagaagggcaagagcaagaagcncaagagcgngaaggagcngcngggcancaccancanggagcgcagcagcnncgagaagaaccccancgacnnccnggaggccaagggcnacaaggaggngaagaaggaccngancancaagcngcccaagnacagccngnncgagcnggagaacggccgcaagcgcangcnggccagcgccggcgagcngcagaagggcaacgagcnggcccngcccagcaagnacgngaacnnccngnaccnggccagccacnacgagaagcngaagggcagccccgaggacaacgagcagaagcagcngnncgnggagcagcacaagcacnaccnggacgagancancgagcagancagcgagnncagcaagcgcgnganccnggccgacgccaaccnggacaaggngcngagcgccnacaacaagcaccgcgacaagcccanccgcgagcaggccgagaacancanccaccngnncacccngaccaaccngggcgcccccgccgccnncaagnacnncgacaccaccancgaccgcaagcgcnacaccagcaccaaggaggngcnggacgccacccnganccaccagagcancaccggccngnacgagacacgcancgaccngagccagcngggcggcgacagcggcggcaagcgccccgccgccaccaagaaggccggccaggccaagaagaagaagnaanaanaagcggccgcnnaannaagcngccnncngcggggcnngccnncnggccangcccnncnncncncccnngcaccngnaccncnnggncnnngaanaaagccngagnaggaagncnaga

SEQ ID NO: 2190 - RNA, 4218 nt, synthetic construct
  source 1..4218: mol_type = other RNA; note = Description of Artificial Sequence: Synthetic polynucleotide
  modified_base 2: mod_base = OTHER; note = N1-methylpseudouridine
  modified_base 26: mod_base = OTHER; note = N1-methylpseudouridine
  modified_base 32: mod_base = OTHER; note = N1-methylpseudouridine
  modified_base 41: mod_base = OTHER; note = N1-methylpseudouridine
  modified_base 61: mod_base = OTHER; note = N1-methylpseudouridine
  modified_base 68: mod_base = OTHER; note = N1-methylpseudouridine
  modified_base 74: mod_base = OTHER; note = N1-methylpseudouridine
  modified_base 80: mod_base = OTHER; note = N1-methylpseudouridine
  modified_base 95: mod_base = OTHER; note = N1-methylpseudouridine
  modified_base 100: mod_base = OTHER; note = N1-methylpseudouridine
  modified_base 107: mod_base = OTHER; note = N1-methylpseudouridine
  modified_base 110: mod_base = OTHER; note = N1-methylpseudouridine
  modified_base 121: mod_base = OTHER; note = N1-methylpseudouridine
  modified_base 128: mod_base = OTHER; note = N1-methylpseudouridine
  modified_base 142: mod_base = OTHER; note = N1-methylpseudouridine
  modified_base 143: mod_base = OTHER; note = N1-methylpseudouridine
  modified_base 149: mod_base = OTHER; note = N1-methylpseudouridine
  modified_base 152: mod_base = OTHER; note = N1-methylpseudouridine
  modified_base 176: mod_base = OTHER; note = N1-methylpseudouridine
  modified_base 188: mod_base = OTHER; note = N1-methylpseudouridine
  modified_base 191: mod_base = OTHER; note = N1-methylpseudouridine
  modified_base 200: mod_base = OTHER; note = N1-methylpseudouridine
  modified_base 203: mod_base = OTHER; note = N1-methylpseudouridine
  modified_base 205: mod_base = OTHER; note = N1-methylpseudouridine
  modified_base 206: mod_base = OTHER; note = N1-methylpseudouridine
  modified_base 239: mod_base = OTHER; note = N1-methylpseudouridine
  modified_base 262: mod_base = OTHER; note = N1-methylpseudouridine
  modified_base 284: mod_base = OTHER; note = N1-methylpseudouridine
  modified_base 286: mod_base = OTHER; note = N1-methylpseudouridine
  modified_base 289: mod_base = OTHER; note = N1-methylpseudouridine
  modified_base 293: mod_base = OTHER; note = N1-methylpseudouridine
  modified_base 302: mod_base = OTHER; note = N1-methylpseudouridine
  modified_base 304: mod_base = OTHER; note = N1-methylpseudouridine
  modified_base 305: mod_base = OTHER; note = N1-methylpseudouridine
  modified_base 317: mod_base = OTHER; note = N1-methylpseudouridine
  modified_base 326: mod_base = OTHER; note = N1-methylpseudouridine
  modified_base 337: mod_base = OTHER; note = N1-methylpseudouridine
  modified_base 338: mod_base = OTHER; note = N1-methylpseudouridine
  modified_base 340: mod_base = OTHER; note = N1-methylpseudouridine
  modified_base 341: mod_base = OTHER; note = N1-methylpseudouridine
  modified_base 350: mod_base = OTHER; note = N1-methylpseudouridine
  modified_base 361: mod_base = OTHER; note = N1-methylpseudouridine
  modified_base 362: mod_base = OTHER; note = N1-methylpseudouridine
  modified_base 365: mod_base = OTHER; note = N1-methylpseudouridine
  modified_base 368: mod_base = OTHER; note = N1-methylpseudouridine
  modified_base 401: mod_base = OTHER; note = N1-methylpseudouridine
  modified_base 403: mod_base = OTHER; note = N1-methylpseudouridine
  modified_base 404: mod_base = OTHER; note = N1-methylpseudouridine
  modified_base 413: mod_base = OTHER; note = N1-methylpseudouridine
  modified_base 416: mod_base = OTHER; note = N1-methylpseudouridine
  modified_base 425: mod_base = OTHER; note = N1-methylpseudouridine
  modified_base 430: mod_base = OTHER; note = N1-methylpseudouridine
  modified_base 442: mod_base = OTHER; note = N1-methylpseudouridine
  modified_base 452: mod_base = OTHER; note = N1-methylpseudouridine
  modified_base 454: mod_base = OTHER; note = N1-methylpseudouridine
  modified_base 461: mod_base = OTHER; note = N1-methylpseudouridine
  modified_base 473: mod_base = OTHER; note = N1-methylpseudouridine
  modified_base 476: mod_base = OTHER; note = N1-methylpseudouridine
  modified_base 500: mod_base = OTHER; note = N1-methylpseudouridine
  modified_base 506: mod_base = OTHER; note = N1-methylpseudouridine
  modified_base 509: mod_base = OTHER; note = N1-methylpseudouridine
  modified_base 511: mod_base = OTHER; note = N1-methylpseudouridine
  modified_base 515: mod_base = OTHER; note = N1-methylpseudouridine
  modified_base 521: mod_base = OTHER; note = N1-methylpseudouridine
  modified_base 530: mod_base = OTHER; note = N1-methylpseudouridine
  modified_base 533: mod_base = OTHER; note = N1-methylpseudouridine
  modified_base 538: mod_base = OTHER; note = N1-methylpseudouridine
  modified_base 539: mod_base = OTHER; note = N1-methylpseudouridine
  modified_base 550: mod_base = OTHER; note = N1-methylpseudouridine
  modified_base 551: mod_base = OTHER; note = N1-methylpseudouridine
  modified_base 554: mod_base = OTHER; note = N1-methylpseudouridine
  modified_base 557: mod_base = OTHER; note = N1-methylpseudouridine
  modified_base 569: mod_base = OTHER; note = N1-methylpseudouridine
  modified_base 590: mod_base = OTHER; note = N1-methylpseudouridine
  modified_base 599: mod_base = OTHER; note = N1-methylpseudouridine
  modified_base 601: mod_base = OTHER; note = N1-methylpseudouridine
  modified_base 602: mod_base = OTHER; note = N1-methylpseudouridine
  modified_base 605: mod_base = OTHER; note = N1-methylpseudouridine
  modified_base 611: mod_base = OTHER; note = N1-methylpseudouridine
  modified_base 614: mod_base = OTHER; note = N1-methylpseudouridine
  modified_base 622: mod_base = OTHER; note = N1-methylpseudouridine
  modified_base 632: mod_base = OTHER; note = N1-methylpseudouridine
  modified_base 634: mod_base = OTHER; note = N1-methylpseudouridine
  modified_base 635: mod_base = OTHER; note = N1-methylpseudouridine
  modified_base 650: mod_base = OTHER; note = N1-methylpseudouridine
  modified_base 665: mod_base = OTHER; note = N1-methylpseudouridine
  modified_base 680: mod_base = OTHER; note = N1-methylpseudouridine
  modified_base 683: mod_base = OTHER; note = N1-methylpseudouridine
  modified_base 695: mod_base = OTHER; note = N1-methylpseudouridine
  modified_base 713: mod_base = OTHER; note = N1-methylpseudouridine
  modified_base 722: mod_base = OTHER; note = N1-methylpseudouridine
  modified_base 725: mod_base = OTHER; note = N1-methylpseudouridine
  modified_base 734: mod_base = OTHER; note = N1-methylpseudouridine
  modified_base 758: mod_base = OTHER; note = N1-methylpseudouridine
  modified_base 760: mod_base = OTHER; note = N1-methylpseudouridine
  modified_base 761: mod_base = OTHER; note = N1-methylpseudouridine
  modified_base 770: mod_base = OTHER; note = N1-methylpseudouridine
  modified_base 773: mod_base = OTHER; note = N1-methylpseudouridine
  modified_base 779: mod_base = OTHER; note = N1-methylpseudouridine
  modified_base 785: mod_base = OTHER; note = N1-methylpseudouridine
  modified_base 791: mod_base = OTHER; note = N1-methylpseudouridine
  modified_base 802: mod_base = OTHER; note = N1-methylpseudouridine
  modified_base 803: mod_base = OTHER; note = N1-methylpseudouridine
  modified_base 814: mod_base = OTHER; note = N1-methylpseudouridine
  modified_base 815: mod_base = OTHER; note = N1-methylpseudouridine
  modified_base 821: mod_base = OTHER; note = N1-methylpseudouridine
  modified_base 839: mod_base = OTHER; note = N1-methylpseudouridine
  modified_base 845: mod_base = OTHER; note = N1-methylpseudouridine
  modified_base 859: mod_base = OTHER; note = N1-methylpseudouridine
  modified_base 872: mod_base = OTHER; note = N1-methylpseudouridine
  modified_base 881: mod_base = OTHER; note = N1-methylpseudouridine
  modified_base 884: mod_base = OTHER; note = N1-methylpseudouridine
  modified_base 893: mod_base = OTHER; note = N1-methylpseudouridine
  modified_base 904: mod_base = OTHER; note = N1-methylpseudouridine
  modified_base 914: mod_base = OTHER; note = N1-methylpseudouridine
  modified_base 916: mod_base = OTHER; note = N1-methylpseudouridine
  modified_base 917: mod_base = OTHER; note = N1-methylpseudouridine
  modified_base 920: mod_base = OTHER; note = N1-methylpseudouridine
  modified_base 935: mod_base = OTHER; note = N1-methylpseudouridine
  modified_base 947: mod_base = OTHER; note = N1-methylpseudouridine
  modified_base 950: mod_base = OTHER; note = N1-methylpseudouridine
  modified_base 953: mod_base = OTHER; note = N1-methylpseudouridine
  modified_base 962: mod_base = OTHER; note = N1-methylpseudouridine
  modified_base 965: mod_base = OTHER; note = N1-methylpseudouridine
  modified_base 971: mod_base = OTHER; note = N1-methylpseudouridine
  modified_base 983: mod_base = OTHER; note = N1-methylpseudouridine
  modified_base 998: mod_base = OTHER; note = N1-methylpseudouridine
  modified_base 1010: mod_base = OTHER; note = N1-methylpseudouridine
  modified_base 1013: mod_base = OTHER; note = N1-methylpseudouridine
  modified_base 1021: mod_base = OTHER; note = N1-methylpseudouridine
  modified_base 1043: mod_base = OTHER; note = N1-methylpseudouridine
  modified_base 1049: mod_base = OTHER; note = N1-methylpseudouridine
  modified_base 1052: mod_base = OTHER; note = N1-methylpseudouridine
  modified_base 1061: mod_base = OTHER; note = N1-methylpseudouridine
  modified_base 1064: mod_base = OTHER; note = N1-methylpseudouridine
  modified_base 1076: mod_base = OTHER; note = N1-methylpseudouridine
  modified_base 1087: mod_base = OTHER; note = N1-methylpseudouridine
  modified_base 1097: mod_base = OTHER; note = N1-methylpseudouridine
  modified_base 1099: mod_base = OTHER; note = N1-methylpseudouridine
  modified_base 1100: mod_base = OTHER; note = N1-methylpseudouridine
  modified_base 1102: mod_base = OTHER; note = N1-methylpseudouridine
  modified_base 1103: mod_base = OTHER; note = N1-methylpseudouridine
  modified_base 1123: mod_base = OTHER; note = N1-methylpseudouridine
  modified_base 1132: mod_base = OTHER; note = N1-methylpseudouridine
  modified_base 1136: mod_base = OTHER; note = N1-methylpseudouridine
  modified_base 1162: mod_base = OTHER; note = N1-methylpseudouridine
  modified_base 1163: mod_base = OTHER; note = N1-methylpseudouridine
  modified_base 1165: mod_base = OTHER; note = N1-methylpseudouridine
  modified_base 1171: mod_base = OTHER; note = N1-methylpseudouridine
  modified_base 1172: mod_base = OTHER; note = N1-methylpseudouridine
  modified_base 1175: mod_base = OTHER; note = N1-methylpseudouridine
  modified_base 1184: mod_base = OTHER; note = N1-methylpseudouridine
  modified_base 1187: mod_base = OTHER; note = N1-methylpseudouridine
  modified_base 1196: mod_base = OTHER; note = N1-methylpseudouridine
  modified_base 1214: mod_base = OTHER; note = N1-methylpseudouridine
  modified_base 1217: mod_base = OTHER; note = N1-methylpseudouridine
  modified_base 1220: mod_base = OTHER; note = N1-methylpseudouridine
  modified_base 1226: mod_base = OTHER; note = N1-methylpseudouridine
  modified_base 1241: mod_base = OTHER; note = N1-methylpseudouridine
  modified_base 1244: mod_base = OTHER; note = N1-methylpseudouridine
  modified_base 1261: mod_base = OTHER; note = N1-methylpseudouridine
  modified_base 1262: mod_base = OTHER; note = N1-methylpseudouridine
  modified_base 1277: mod_base = OTHER; note = N1-methylpseudouridine
  modified_base 1289: mod_base = OTHER; note = N1-methylpseudouridine
  modified_base 1295: mod_base = OTHER; note = N1-methylpseudouridine
  modified_base 1304: mod_base = OTHER; note = N1-methylpseudouridine
  modified_base 1313: mod_base = OTHER; note = N1-methylpseudouridine
  modified_base 1316: mod_base = OTHER; note = N1-methylpseudouridine
  modified_base 1333: mod_base = OTHER; note = N1-methylpseudouridine
  modified_base 1334: mod_base = OTHER; note = N1-methylpseudouridine
  modified_base 1336: mod_base = OTHER; note = N1-methylpseudouridine
  modified_base 1342: mod_base = OTHER; note = N1-methylpseudouridine
  modified_base 1343: mod_base = OTHER; note = N1-methylpseudouridine
  modified_base 1346: mod_base = OTHER; note = N1-methylpseudouridine
  modified_base 1367: mod_base = OTHER; note = N1-methylpseudouridine
  modified_base 1376: mod_base = OTHER; note = N1-methylpseudouridine
  modified_base 1379: mod_base = OTHER; note = N1-methylpseudouridine
  modified_base 1384: mod_base = OTHER; note = N1-methylpseudouridine
  modified_base 1385: mod_base = OTHER; note = N1-methylpseudouridine
  modified_base 1391: mod_base = OTHER; note = N1-methylpseudouridine
  modified_base 1396: mod_base = OTHER; note = N1-methylpseudouridine
  modified_base 1399: mod_base = OTHER; note = N1-methylpseudouridine
  modified_base 1403: mod_base = OTHER; note = N1-methylpseudouridine
  modified_base 1412: mod_base = OTHER; note = N1-methylpseudouridine
  modified_base 1432: mod_base = OTHER; note = N1-methylpseudouridine
  modified_base 1433: mod_base = OTHER; note = N1-methylpseudouridine
  modified_base 1438: mod_base = OTHER; note = N1-methylpseudouridine
  modified_base 1442: mod_base = OTHER; note = N1-methylpseudouridine
  modified_base 1466: mod_base = OTHER; note = N1-methylpseudouridine
  modified_base 1474: mod_base = OTHER; note = N1-methylpseudouridine
  modified_base 1480: mod_base = OTHER; note = N1-methylpseudouridine
  modified_base 1481: mod_base = OTHER; note = N1-methylpseudouridine
  modified_base 1490: mod_base = OTHER; note = N1-methylpseudouridine
  modified_base 1493: mod_base = OTHER; note = N1-methylpseudouridine
  modified_base 1519: mod_base = OTHER; note = N1-methylpseudouridine
  modified_base 1520: mod_base = OTHER; note = N1-methylpseudouridine
  modified_base 1523: mod_base = OTHER; note = N1-methylpseudouridine
  modified_base 1532: mod_base = OTHER; note = N1-methylpseudouridine
  modified_base 1540: mod_base = OTHER; note = N1-methylpseudouridine
  modified_base 1541: mod_base = OTHER; note = N1-methylpseudouridine
  modified_base 1553: mod_base = OTHER; note = N1-methylpseudouridine
  modified_base 1568: mod_base = OTHER; note = N1-methylpseudouridine
  modified_base 1571: mod_base = OTHER; note = N1-methylpseudouridine
  modified_base 1586: mod_base = OTHER; note = N1-methylpseudouridine
  modified_base 1589: mod_base = OTHER; note = N1-methylpseudouridine
  modified_base 1591: mod_base = OTHER; note = N1-methylpseudouridine
  modified_base 1597: mod_base = OTHER; note = N1-methylpseudouridine
  modified_base 1600: mod_base = OTHER; note = N1-methylpseudouridine
  modified_base 1601: mod_base = OTHER; note = N1-methylpseudouridine
  modified_base 1607: mod_base = OTHER; note = N1-methylpseudouridine
  modified_base 1609: mod_base = OTHER; note = N1-methylpseudouridine
  modified_base 1619: mod_base = OTHER; note = N1-methylpseudouridine
  modified_base 1628: mod_base = OTHER; note = N1-methylpseudouridine
  modified_base 1633: mod_base = OTHER; note = N1-methylpseudouridine
  modified_base 1637: mod_base = OTHER; note = N1-methylpseudouridine
  modified_base 1649: mod_base = OTHER; note = N1-methylpseudouridine
  modified_base 1663: mod_base = OTHER; note = N1-methylpseudouridine
  modified_base 1664: mod_base = OTHER; note = N1-methylpseudouridine
  modified_base 1667: mod_base = OTHER; note = N1-methylpseudouridine
  modified_base 1691: mod_base = OTHER; note = N1-methylpseudouridine
  modified_base 1694: mod_base = OTHER; note = N1-methylpseudouridine
  modified_base 1700: mod_base = OTHER; note = N1-methylpseudouridine
  modified_base 1703: mod_base = OTHER; note = N1-methylpseudouridine
  modified_base 1705: mod_base = OTHER; note = N1-methylpseudouridine
  modified_base 1706: mod_base = OTHER; note = N1-methylpseudouridine
  modified_base 1724: mod_base = OTHER; note = N1-methylpseudouridine
  modified_base 1730: mod_base = OTHER; note = N1-methylpseudouridine
  modified_base 1739: mod_base = OTHER; note = N1-methylpseudouridine
  modified_base 1750: mod_base = OTHER; note = N1-methylpseudouridine
  modified_base 1753: mod_base = OTHER; note = N1-methylpseudouridine
  modified_base 1754: mod_base = OTHER; note = N1-methylpseudouridine
  modified_base 1763: mod_base = OTHER; note = N1-methylpseudouridine
  modified_base 1768: mod_base = OTHER; note = N1-methylpseudouridine
  modified_base 1771: mod_base = OTHER; note = N1-methylpseudouridine
  modified_base 1772: mod_base = OTHER; note = N1-methylpseudouridine
  modified_base 1781: mod_base = OTHER; note = N1-methylpseudouridine
  modified_base 1787: mod_base = OTHER; note = N1-methylpseudouridine
  modified_base 1796: mod_base = OTHER; note = N1-methylpseudouridine
  modified_base 1807: mod_base = OTHER; note = N1-methylpseudouridine
  modified_base 1808: mod_base = OTHER; note = N1-methylpseudouridine
  modified_base 1820: mod_base = OTHER; note = N1-methylpseudouridine
  modified_base 1828: mod_base = OTHER; note = N1-methylpseudouridine
  modified_base 1838: mod_base = OTHER; note = N1-methylpseudouridine
  modified_base 1841: mod_base = OTHER; note = N1-methylpseudouridine
  modified_base 1847: mod_base = OTHER; note = N1-methylpseudouridine
  modified_base 1850: mod_base = OTHER; note = N1-methylpseudouridine
  modified_base 1864: mod_base = OTHER; note = N1-methylpseudouridine
  modified_base 1865: mod_base = OTHER; note = N1-methylpseudouridine
  modified_base 1868: mod_base = OTHER; note = N1-methylpseudouridine
  modified_base 1892: mod_base = OTHER; note = N1-methylpseudouridine
  modified_base 1895: mod_base = OTHER; note = N1-methylpseudouridine
  modified_base 1904: mod_base = OTHER; note = N1-methylpseudouridine
  modified_base 1907: mod_base = OTHER; note = N1-methylpseudouridine
  modified_base 1910: mod_base = OTHER; note = N1-methylpseudouridine
  modified_base 1916: mod_base = OTHER; note = N1-methylpseudouridine
  modified_base 1922: mod_base = OTHER; note = N1-methylpseudouridine
  modified_base 1924: mod_base = OTHER; note = N1-methylpseudouridine
  modified_base 1925: mod_base = OTHER; note = N1-methylpseudouridine
  modified_base 1940: mod_base = OTHER; note = N1-methylpseudouridine
  modified_base 1943: mod_base = OTHER; note = N1-methylpseudouridine
  modified_base 1955: mod_base = OTHER; note = N1-methylpseudouridine
  modified_base 1963: mod_base = OTHER; note = N1-methylpseudouridine
  modified_base 1973: mod_base = OTHER; note = N1-methylpseudouridine
  modified_base 1975: mod_base = OTHER; note = N1-methylpseudouridine
  modified_base 1976: mod_base = OTHER; note = N1-methylpseudouridine
  modified_base 1988: mod_base = OTHER; note = N1-methylpseudouridine
  modified_base 1991: mod_base = OTHER; note = N1-methylpseudouridine
  modified_base 2000: mod_base = OTHER; note = N1-methylpseudouridine
  modified_base 2014: mod_base = OTHER; note = N1-methylpseudouridine
  modified_base 2023: mod_base = OTHER; note = N1-methylpseudouridine
  modified_base 2033: mod_base = OTHER; note = N1-methylpseudouridine
  modified_base 2045: mod_base = OTHER; note = N1-methylpseudouridine
  modified_base 2048: mod_base = OTHER; note = N1-methylpseudouridine
  modified_base 2057: mod_base = OTHER; note = N1-methylpseudouridine
  modified_base 2084: mod_base = OTHER; note = N1-methylpseudouridine
  modified_base 2087: mod_base = OTHER; note = N1-methylpseudouridine
  modified_base 2092: mod_base = OTHER; note = N1-methylpseudouridine
  modified_base 2093: mod_base = OTHER; note = N1-methylpseudouridine
  modified_base 2096: mod_base = OTHER; note = N1-methylpseudouridine
  modified_base 2110: mod_base = OTHER; note = N1-methylpseudouridine
  modified_base 2111: mod_base = OTHER; note = N1-methylpseudouridine
  modified_base 2125: mod_base = OTHER; note = N1-methylpseudouridine
  modified_base 2126: mod_base = OTHER; note = N1-methylpseudouridine
  modified_base 2129: mod_base = OTHER; note = N1-methylpseudouridine
  modified_base 2135: mod_base = OTHER; note = N1-methylpseudouridine
  modified_base 2138: mod_base = OTHER; note = N1-methylpseudouridine
  modified_base 2153: mod_base = OTHER; note = N1-methylpseudouridine
  modified_base 2158: mod_base = OTHER; note = N1-methylpseudouridine
  modified_base 2159: mod_base = OTHER; note = N1-methylpseudouridine
  modified_base 2171: mod_base = OTHER; note = N1-methylpseudouridine
  modified_base 2186: mod_base = OTHER; note = N1-methylpseudouridine
  modified_base 2207: mod_base = OTHER; note = N1-methylpseudouridine
  modified_base 2219: mod_base = OTHER; note = N1-methylpseudouridine
  modified_base 2228: mod_base = OTHER; note = N1-methylpseudouridine
  modified_base 2246: mod_base = OTHER; note = N1-methylpseudouridine
  modified_base 2258: mod_base = OTHER; note = N1-methylpseudouridine
  modified_base 2261: mod_base = OTHER; note = N1-methylpseudouridine
  modified_base 2270: mod_base = OTHER; note = N1-methylpseudouridine
  modified_base 2276: mod_base = OTHER; note = N1-methylpseudouridine
  modified_base 2279: mod_base = OTHER; note = N1-methylpseudouridine
  modified_base 2288: mod_base = OTHER; note = N1-methylpseudouridine
  modified_base 2291: mod_base = OTHER; note = N1-methylpseudouridine
  modified_base 2297: mod_base = OTHER; note = N1-methylpseudouridine
  modified_base 2300: mod_base = OTHER; note = N1-methylpseudouridine
  modified_base 2324: mod_base = OTHER; note = N1-methylpseudouridine
  modified_base 2327: mod_base = OTHER; note = N1-methylpseudouridine
  modified_base 2330: mod_base = OTHER; note = N1-methylpseudouridine
  modified_base 2336: mod_base = OTHER; note = N1-methylpseudouridine
  modified_base 2390: mod_base = OTHER; note = N1-methylpseudouridine
  modified_base 2399: mod_base = OTHER; note = N1-methylpseudouridine
  modified_base 2411: mod_base = OTHER; note = N1-methylpseudouridine
  modified_base 2420: mod_base = OTHER; note = N1-methylpseudouridine
  modified_base 2432: mod_base = OTHER; note = N1-methylpseudouridine
  modified_base 2435: mod_base = OTHER; note = N1-methylpseudouridine
  modified_base 2450: mod_base = OTHER; note = N1-methylpseudouridine
  modified_base 2465: mod_base = OTHER; note = N1-methylpseudouridine
  modified_base 2480: mod_base = OTHER; note = N1-methylpseudouridine
  modified_base 2482: mod_base = OTHER; note = N1-methylpseudouridine
  modified_base 2486: mod_base = OTHER; note = N1-methylpseudouridine
  modified_base 2488: mod_base = OTHER; note = N1-methylpseudouridine
  modified_base 2491: mod_base = OTHER; note = N1-methylpseudouridine
  modified_base 2495: mod_base = OTHER; note = N1-methylpseudouridine
  modified_base 2513: mod_base = OTHER; note = N1-methylpseudouridine
  modified_base 2515: mod_base = OTHER; note = N1-methylpseudouridine
  modified_base 2519: mod_base = OTHER; note = N1-methylpseudouridine
  modified_base 2531: mod_base = OTHER; note = N1-methylpseudouridine
  modified_base 2537: mod_base = OTHER; note = N1-methylpseudouridine
  modified_base 2546: mod_base = OTHER; note = N1-methylpseudouridine
  modified_base 2554: mod_base = OTHER; note = N1-methylpseudouridine
  modified_base 2561: mod_base = OTHER; note = N1-methylpseudouridine
  modified_base 2570: mod_base = OTHER; note = N1-methylpseudouridine
  modified_base 2573: mod_base = OTHER; note = N1-methylpseudouridine
  modified_base 2584: mod_base = OTHER; note = N1-methylpseudouridine
  modified_base 2585: mod_base = OTHER; note = N1-methylpseudouridine
  modified_base 2588: mod_base = OTHER; note = N1-methylpseudouridine
  modified_base 2603: mod_base = OTHER; note = N1-methylpseudouridine
  modified_base 2615: mod_base = OTHER; note = N1-methylpseudouridine
  modified_base 2618: mod_base = OTHER; note = N1-methylpseudouridine
  modified_base 2657: mod_base = OTHER; note = N1-methylpseudouridine
  modified_base 2672: mod_base = OTHER; note = N1-methylpseudouridine
  modified_base 2675: mod_base = OTHER; note = N1-methylpseudouridine
  modified_base 2684: mod_base = OTHER; note = N1-methylpseudouridine
  modified_base 2692: mod_base = OTHER; note = N1-methylpseudouridine
  modified_base 2695: mod_base = OTHER; note = N1-methylpseudouridine
  modified_base 2705: mod_base = OTHER; note = N1-methylpseudouridine
  modified_base 2708: mod_base = OTHER; note = N1-methylpseudouridine
  modified_base 2720: mod_base = OTHER; note = N1-methylpseudouridine
  modified_base 2723: mod_base = OTHER; note = N1-methylpseudouridine
  modified_base 2737: mod_base = OTHER; note = N1-methylpseudouridine
  modified_base 2738: mod_base = OTHER; note = N1-methylpseudouridine
  modified_base 2747: mod_base = OTHER; note = N1-methylpseudouridine
  modified_base 2771: mod_base = OTHER; note = N1-methylpseudouridine
  modified_base 2780: mod_base = OTHER; note = N1-methylpseudouridine
  modified_base 2794: mod_base = OTHER; note = N1-methylpseudouridine
  modified_base 2795: mod_base = OTHER; note = N1-methylpseudouridine
  modified_base 2798: mod_base = OTHER; note = N1-methylpseudouridine
  modified_base 2810: mod_base = OTHER; note = N1-methylpseudouridine
  modified_base 2813: mod_base = OTHER; note = N1-methylpseudouridine
  modified_base 2828: mod_base = OTHER; note = N1-methylpseudouridine
  modified_base 2840: mod_base = OTHER; note = N1-methylpseudouridine
  modified_base 2849: mod_base = OTHER; note = N1-methylpseudouridine
  modified_base 2852: mod_base = OTHER; note = N1-methylpseudouridine
  modified_base 2864: mod_base = OTHER; note = N1-methylpseudouridine
  modified_base 2875: mod_base = OTHER; note = N1-methylpseudouridine
  modified_base 2894: mod_base = OTHER; note = N1-methylpseudouridine
  modified_base 2897: mod_base = OTHER; note = N1-methylpseudouridine
  modified_base 2906: mod_base = OTHER; note = N1-methylpseudouridine
  modified_base 2912: mod_base = OTHER; note = N1-methylpseudouridine
  modified_base 2915: mod_base = OTHER; note = N1-methylpseudouridine
  modified_base 2921: mod_base = OTHER; note = N1-methylpseudouridine
  modified_base 2933: mod_base = OTHER; note = N1-methylpseudouridine
  modified_base 2936: mod_base = OTHER; note = N1-methylpseudouridine
  modified_base 2944: mod_base = OTHER; note = N1-methylpseudouridine
  modified_base 2945: mod_base = OTHER; note = N1-methylpseudouridine
  modified_base 2956: mod_base = OTHER; note = N1-methylpseudouridine
  modified_base 2957: mod_base = OTHER; note = N1-methylpseudouridine
  modified_base 2962: mod_base = OTHER; note = N1-methylpseudouridine
  modified_base 2963: mod_base = OTHER; note = N1-methylpseudouridine
  modified_base 2965: mod_base = OTHER; note = N1-methylpseudouridine
  modified_base 2972: mod_base = OTHER; note = N1-methylpseudouridine
  modified_base 2981: mod_base = OTHER; note = N1-methylpseudouridine
  modified_base 2989: mod_base = OTHER; note = N1-methylpseudouridine
  modified_base 3010: mod_base = OTHER; note = N1-methylpseudouridine
  modified_base 3014: mod_base = OTHER; note = N1-methylpseudouridine
  modified_base 3023: mod_base = OTHER; note = N1-methylpseudouridine
  modified_base 3026: mod_base = OTHER; note = N1-methylpseudouridine
  modified_base 3038: mod_base = OTHER; note = N1-methylpseudouridine
  modified_base 3041: mod_base = OTHER; note = N1-methylpseudouridine
  modified_base 3049: mod_base = OTHER; note = N1-methylpseudouridine
  modified_base 3059: mod_base = OTHER; note = N1-methylpseudouridine
  modified_base 3070: mod_base = OTHER; note = N1-methylpseudouridine
  modified_base 3071: mod_base = OTHER; note = N1-methylpseudouridine
  modified_base 3074: mod_base = OTHER; note = N1-methylpseudouridine
  modified_base 3076: mod_base = OTHER; note = N1-methylpseudouridine
  modified_base 3085: mod_base = OTHER; note = N1-methylpseudouridine
  modified_base 3092: mod_base = OTHER; note = N1-methylpseudouridine
  modified_base 3094: mod_base = OTHER; note = N1-methylpseudouridine
  modified_base 3101: mod_base = OTHER; note = N1-methylpseudouridine
  modified_base 3110: mod_base = OTHER; note = N1-methylpseudouridine
  modified_base 3113: mod_base = OTHER; note = N1-methylpseudouridine
  modified_base 3134: mod_base = OTHER; note = N1-methylpseudouridine
  modified_base 3154: mod_base = OTHER; note = N1-methylpseudouridine
  modified_base 3157: mod_base = OTHER; note = N1-methylpseudouridine
  modified_base 3158: mod_base = OTHER; note = N1-methylpseudouridine
  modified_base 3160: mod_base = OTHER; note = N1-methylpseudouridine
  modified_base 3161: mod_base = OTHER; note = N1-methylpseudouridine
  modified_base 3163: mod_base = OTHER; note = N1-methylpseudouridine
  modified_base 3173: mod_base = OTHER; note = N1-methylpseudouridine
  modified_base 3176: mod_base = OTHER; note = N1-methylpseudouridine
  modified_base 3181: mod_base = OTHER; note = N1-methylpseudouridine
  modified_base 3182: mod_base = OTHER; note = N1-methylpseudouridine
  modified_base 3184: mod_base = OTHER; note = N1-methylpseudouridine
  modified_base 3185: mod_base = OTHER; note = N1-methylpseudouridine
  modified_base 3197: mod_base = OTHER; note = N1-methylpseudouridine
  modified_base 3203: mod_base = OTHER; note = N1-methylpseudouridine
  modified_base 3218: mod_base = OTHER; note = N1-methylpseudouridine
  modified_base 3233: mod_base = OTHER; note = N1-methylpseudouridine
  modified_base 3236: mod_base = OTHER; note = N1-methylpseudouridine
  modified_base 3263: mod_base = OTHER; note = N1-methylpseudouridine
  modified_base 3266: mod_base = OTHER; note = N1-methylpseudouridine
  modified_base 3268: mod_base = OTHER; note = N1-methylpseudouridine
  modified_base 3286: mod_base = OTHER; note = N1-methylpseudouridine
  modified_base 3287: mod_base = OTHER; note = N1-methylpseudouridine
  modified_base 3296: mod_base = OTHER; note = N1-methylpseudouridine
  modified_base 3305: mod_base = OTHER; note = N1-methylpseudouridine
  modified_base 3308: mod_base = OTHER; note = N1-methylpseudouridine
  modified_base 3314: mod_base = OTHER; note = N1-methylpseudouridine
  modified_base 3323: mod_base = OTHER; note = N1-methylpseudouridine
  modified_base 3329: mod_base = OTHER; note = N1-methylpseudouridine
  modified_base 3332: mod_base = OTHER; note = N1-methylpseudouridine
  modified_base 3347: mod_base = OTHER; note = N1-methylpseudouridine
  modified_base 3361: mod_base = OTHER; note = N1-methylpseudouridine
  modified_base 3362: mod_base = OTHER; note = N1-methylpseudouridine
  modified_base 3377: mod_base = OTHER; note = N1-methylpseudouridine
  modified_base 3380: mod_base = OTHER; note = N1-methylpseudouridine
  modified_base 3404: mod_base = OTHER; note = N1-methylpseudouridine
  modified_base 3407: mod_base = OTHER; note = N1-methylpseudouridine
  modified_base 3424: mod_base = OTHER; note = N1-methylpseudouridine
  modified_base 3439: mod_base = OTHER; note = N1-methylpseudouridine
  modified_base 3448: mod_base = OTHER; note = N1-methylpseudouridine
  modified_base 3449: mod_base = OTHER; note = N1-methylpseudouridine
  modified_base 3464: mod_base = OTHER; note = N1-methylpseudouridine
  modified_base 3469: mod_base = OTHER; note = N1-methylpseudouridine
  modified_base 3476: mod_base = OTHER; note = N1-methylpseudouridine
  modified_base 3479: mod_base = OTHER; note = N1-methylpseudouridine
  modified_base 3482: mod_base = OTHER; note = N1-methylpseudouridine
  modified_base 3485: mod_base = OTHER; note = N1-methylpseudouridine
  modified_base 3494: mod_base = OTHER; note = N1-methylpseudouridine
  modified_base 3518: mod_base = OTHER; note = N1-methylpseudouridine
  modified_base 3527: mod_base = OTHER; note = N1-methylpseudouridine
  modified_base 3536: mod_base = OTHER; note = N1-methylpseudouridine
  modified_base 3539: mod_base = OTHER; note = N1-methylpseudouridine
  modified_base 3545: mod_base = OTHER; note = N1-methylpseudouridine
  modified_base 3551: mod_base = OTHER; note = N1-methylpseudouridine
  modified_base 3554: mod_base = OTHER; note = N1-methylpseudouridine
  modified_base 3568: mod_base = OTHER; note = N1-methylpseudouridine
  modified_base 3569: mod_base = OTHER; note = N1-methylpseudouridine
  modified_base 3584: mod_base = OTHER; note = N1-methylpseudouridine
  modified_base 3589: mod_base = OTHER; note = N1-methylpseudouridine
  modified_base 3590: mod_base = OTHER; note = N1-methylpseudouridine
  modified_base 3593: mod_base = OTHER; note = N1-methylpseudouridine
  modified_base 3607: mod_base = OTHER; note = N1-methylpseudouridine
  modified_base 3617: mod_base = OTHER; note = N1-methylpseudouridine
  modified_base 3629: mod_base = OTHER; note = N1-methylpseudouridine
  modified_base 3632: mod_base = OTHER; note = N1-methylpseudouridine
  modified_base 3635: mod_base = OTHER; note = N1-methylpseudouridine
  modified_base 3641: mod_base = OTHER; note = N1-methylpseudouridine
  modified_base 3649: mod_base = OTHER; note = N1-methylpseudouridine
  modified_base 3656: mod_base = OTHER; note = N1-methylpseudouridine
  modified_base 3658: mod_base = OTHER; note = N1-methylpseudouridine
  modified_base 3659: mod_base = OTHER; note = N1-methylpseudouridine
  modified_base 3665: mod_base = OTHER; note = N1-methylpseudouridine
  modified_base 3686: mod_base = OTHER; note = N1-methylpseudouridine
  modified_base 3689: mod_base = OTHER; note = N1-methylpseudouridine
  modified_base 3707: mod_base = OTHER; note = N1-methylpseudouridine
  modified_base 3725: mod_base = OTHER; note = N1-methylpseudouridine
  modified_base 3731: mod_base = OTHER; note = N1-methylpseudouridine
  modified_base 3742: mod_base = OTHER; note = N1-methylpseudouridine
  modified_base 3746: mod_base = OTHER; note = N1-methylpseudouridine
  modified_base 3751: mod_base = OTHER; note = N1-methylpseudouridine
  modified_base 3752: mod_base = OTHER; note = N1-methylpseudouridine
  modified_base 3755: mod_base = OTHER; note = N1-methylpseudouridine
  modified_base 3757: mod_base = OTHER; note = N1-methylpseudouridine
  modified_base 3761: mod_base = OTHER; note = N1-methylpseudouridine
  modified_base 3772: mod_base = OTHER; note = N1-methylpseudouridine
  modified_base 3782: mod_base = OTHER; note = N1-methylpseudouridine
  modified_base 3818: mod_base = OTHER; note = N1-methylpseudouridine
  modified_base 3820: mod_base = OTHER; note = N1-methylpseudouridine
  modified_base 3821: mod_base = OTHER; note = N1-methylpseudouridine
  modified_base 3824: mod_base = OTHER; note = N1-methylpseudouridine
  modified_base 3841: mod_base = OTHER; note = N1-methylpseudouridine
  modified_base 3845: mod_base = OTHER; note = N1-methylpseudouridine
  modified_base 3854: mod_base = OTHER; note = N1-methylpseudouridine
  modified_base 3857: mod_base = OTHER; note = N1-methylpseudouridine
  modified_base 3866: mod_base = OTHER; note = N1-methylpseudouridine
  modified_base 3874: mod_base = OTHER; note = N1-methylpseudouridine
  modified_base 3875: mod_base = OTHER; note = N1-methylpseudouridine
  modified_base 3887: mod_base = OTHER; note = N1-methylpseudouridine
  modified_base 3890: mod_base = OTHER; note = N1-methylpseudouridine
  modified_base 3893: mod_base = OTHER; note = N1-methylpseudouridine
  modified_base 3908: mod_base = OTHER; note = N1-methylpseudouridine
  modified_base 3917: mod_base = OTHER; note = N1-methylpseudouridine
  modified_base 3920: mod_base = OTHER; note = N1-methylpseudouridine
  modified_base 3928: mod_base = OTHER; note = N1-methylpseudouridine
  modified_base 3953: mod_base = OTHER; note = N1-methylpseudouridine
  modified_base 3974: mod_base = OTHER; note = N1-methylpseudouridine
  modified_base 3977: mod_base = OTHER; note = N1-methylpseudouridine
  modified_base 3983: mod_base = OTHER; note = N1-methylpseudouridine
  modified_base 3985: mod_base = OTHER; note = N1-methylpseudouridine
  modified_base 3986: mod_base = OTHER; note = N1-methylpseudouridine
  modified_base 3992: mod_base = OTHER; note = N1-methylpseudouridine
  modified_base 4001: mod_base = OTHER; note = N1-methylpseudouridine
  modified_base 4018: mod_base = OTHER; note = N1-methylpseudouridine
  modified_base 4019: mod_base = OTHER; note = N1-methylpseudouridine
  modified_base 4024: mod_base = OTHER; note = N1-methylpseudouridine
  modified_base 4027: mod_base = OTHER; note = N1-methylpseudouridine
  modified_base 4028: mod_base = OTHER; note = N1-methylpseudouridine
  modified_base 4040: mod_base = OTHER; note = N1-methylpseudouridine
  modified_base 4054: mod_base = OTHER; note = N1-methylpseudouridine
  modified_base 4073: mod_base = OTHER; note = N1-methylpseudouridine
  modified_base 4076: mod_base = OTHER; note = N1-methylpseudouridine
  modified_base 4088: mod_base = OTHER; note = N1-methylpseudouridine
  modified_base 4091: mod_base = OTHER; note = N1-methylpseudouridine
  modified_base 4103: mod_base = OTHER; note = N1-methylpseudouridine
  modified_base 4112: mod_base = OTHER; note = N1-methylpseudouridine
  modified_base 4114: mod_base = OTHER; note = N1-methylpseudouridine
  modified_base 4127: mod_base = OTHER; note = N1-methylpseudouridine
  modified_base 4133: mod_base = OTHER; note = N1-methylpseudouridine
  modified_base 4142: mod_base = OTHER; note = N1-methylpseudouridine
  modified_base 4210: mod_base = OTHER; note = N1-methylpseudouridine
  modified_base 4213: mod_base = OTHER; note = N1-methylpseudouridine
  modified_base 4216: mod_base = OTHER; note = N1-methylpseudouridine
anggcccccaagaagaagcgcaaggngggcanccacggcgngcccgccgccgacaagaagnacagcancggccnggacancggcaccaacagcgngggcngggccgngancaccgacgagnacaaggngcccagcaagaagnncaaggngcngggcaacaccgaccgccacagcancaagaagaaccngancggcgcccngcngnncgacagcggcgagacagccgaggccacccgccngaagcgcaccgcccgccgccgcnacacccgccgcaagaaccgcancngcnaccngcaggagancnncagcaacgaganggccaaggnggacgacagcnncnnccaccgccnggaggagagcnnccnggnggaggaggacaagaagcacgagcgccaccccancnncggcaacancgnggacgaggnggccnaccacgagaagnaccccaccancnaccaccngcgcaagaagcnggnggacagcaccgacaaggccgaccngcgccngancnaccnggcccnggcccacangancaagnnccgcggccacnnccngancgagggcgaccngaaccccgacaacagcgacgnggacaagcngnncanccagcnggngcagaccnacaaccagcngnncgaggagaaccccancaacgccagcggcgnggacgccaaggccanccngagcgcccgccngagcaagagccgccgccnggagaaccngancgcccagcngcccggcgagaagaagaacggccngnncggcaaccngancgcccngagccngggccngacccccaacnncaagagcaacnncgaccnggccgaggacgccaagcngcagcngagcaaggacaccnacgacgacgaccnggacaaccngcnggcccagancggcgaccagnacgccgaccngnnccnggccgccaagaaccngagcgacgccanccngcngagcgacanccngcgcgngaacaccgagancaccaaggccccccngagcgccagcangancaagcgcnacgacgagcaccaccaggaccngacccngcngaaggcccnggngcgccagcagcngcccgagaagnacaaggagancnncnncgaccagagcaagaacggcnacgccggcnacancgacggcggcgccagccaggaggagnncnacaagnncancaagcccanccnggagaaganggacggcaccgaggagcngcnggngaagcngaaccgcgaggaccngcngcgcaagcagcgcaccnncgacaacggcagcancccccaccaganccaccngggcgagcngcacgccanccngcgccgccaggaggacnncnaccccnnccngaaggacaaccgcgagaagancgagaaganccngaccnnccgcanccccnacnacgngggcccccnggcccgcggcaacagccgcnncgccnggangacccgcaagagcgaggagacaancacccccnggaacnncgaggaggnggnggacaagggcgccagcgcccagagcnncancgagcgcangaccaacnncgacaagaaccngcccaacgagaaggngcngcccaagcacagccngcngnacgagnacnncaccgngnacaacgagcngaccaaggngaagnacgngaccgagggcangcgcaagcccgccnnccngagcggcgagcagaagaaggccancgnggaccngcngnncaagaccaaccgcaaggngaccgngaagcagcngaaggaggacnacnncaagaagancgagngcnncgacagcgnggagancagcggcgnggaggaccgcnncaacgccagccngggcaccnaccacgaccngcngaagancancaaggacaaggacnnccnggacaacgaggagaacgaggacanccnggaggacancgngcngacccngacccngnncgaggaccgcgagangancgaggagcgccngaagaccnacgcccaccngnncgacgacaaggngangaagcagcngaagcgccgccgcnacaccggcnggggccgccngagccgcaagcngancaacggcanccgcgacaagcagagcggcaagaccanccnggacnnccncaagagcgacggcnncgccaaccgcaacnncangcagcnganccacgacgacagccngaccnncaaggaggacanccagaaggcccaggngagcggccagggcgacagccngcacgagcacancgccaaccnggccggcagccccgccancaagaagggcanccngcagaccgngaaggnggnggacgagcnggngaaggngangggccgccacaagcccgagaacancgngancgaganggcccgcgagaaccagaccacccagaagggccagaagaacagccgcgagcgcangaagcgcancgaggagggcancaaggagcngggcagccaganccngaaggagcaccccgnggagaacacccagcngcagaacgagaagcngnaccngnacnaccngcagaacggccgcgacangnacgnggaccaggagcnggacancaaccgccngagcgacnacgacgnggaccacancgngccccagagcnnccngaaggacgacagcancgacaacaaggngcngacccgcagcgacaagaaccgcggcaagagcgacaacgngcccagcgaggaggnggngaagaagangaagaacnacnggcgccagcngcngaacgccaagcngancacccagcgcaagnncgacaaccngaccaaggccgagcgcggcggccngagcgagcnggacaaggccggcnncancaagcgccagcnggnggagacacgccagancaccaagcacgnggcccaganccnggacagccgcangaacaccaagnacgacgagaacgacaagcnganccgcgaggngaaggngancacccncaagagcaagcnggngagcgacnnccgcaaggacnnccagnncnacaaggngcgcgagancaacaacnaccaccacgcccacgacgccnaccngaacgccgnggngggcaccgcccngancaagaagnaccccaagcnggagagcgagnncgngnacggcgacnacaaggngnacgacgngcgcaagangancgccaagagcgagcaggagancggcaaggccaccgccaagnacnncnncnacagcaacancangaacnncnncaagaccgagancacccnggccaacggcgaganccgcaagcgcccccngancgagacaaacggcgagacaggcgagancgngngggacaagggccgcgacnncgccaccgngcgcaaggngcngagcangccccaggngaacancgngaagaagaccgaggngcagaccggcggcnncagcaaggagagcanccngcccaagcgcaacagcgacaagcngancgcccgcaagaaggacngggaccccaagaagnacggcggcnncgacagccccaccgnggccnacagcgngcnggnggnggccaaggnggagaagggcaagagcaagaagcncaagagcgngaaggagcngcngggcancaccancanggagcgcagcagcnncgagaagaaccccancgacnnccnggaggccaagggcnacaaggaggngaagaaggaccngancancaagcngcccaagnacagccngnncgagcnggagaacggccgcaagcgcangcnggccagcgccggcgagcngcagaagggcaacgagcnggcccngcccagcaagnacgngaacnnccngnaccnggccagccacnacgagaagcngaagggcagccccgaggacaacgagcagaagcagcngnncgnggagcagcacaagcacnaccnggacgagancancgagcagancagcgagnncagcaagcgcgnganccnggccgacgccaaccnggacaaggngcngagcgccnacaacaagcaccgcgacaagcccanccgcgagcaggccgagaacancanccaccngnncacccngaccaaccngggcgcccccgccgccnncaagnacnncgacaccaccancgaccgcaagcgcnacaccagcaccaaggaggngcnggacgccacccnganccaccagagcancaccggccngnacgagacacgcancgaccngagccagcngggcggcgacagcggcggcaagcgccccgccgccaccaagaaggccggccaggccaagaagaagaagnaanaanaa

SEQ ID NO: 2191 - RNA, 100 nt, synthetic construct; identical to SEQ ID NO: 1636
  source 1..100: mol_type = other RNA; note = Description of Artificial Sequence: Synthetic polynucleotide
  modified_base 1: mod_base = OTHER; note = 2'-O-Methyl-uridine phosphorothioate
  modified_base 2: mod_base = OTHER; note = 2'-O-Methyl-adenosine phosphorothioate
  modified_base 3: mod_base = OTHER; note = 2'-O-Methyl-adenosine phosphorothioate
  modified_base 97: mod_base = OTHER; note = uridine phosphorothioate
  modified_base 98: mod_base = OTHER; note = 2'-O-Methyl-uridine phosphorothioate
  modified_base 99: mod_base = OTHER; note = 2'-O-Methyl-uridine phosphorothioate
  modified_base 100: mod_base = OTHER; note = 2'-O-Methyl-uridine

SEQ ID NO: 2192 - RNA, 4929 nt, synthetic construct
  source 1..4929: mol_type = other RNA; note = Description of Artificial Sequence: Synthetic polynucleotide
  modified_base 7: mod_base = OTHER; note = N1-methylpseudouridine
  modified_base 25: mod_base = OTHER; note = N1-methylpseudouridine
  modified_base 35: mod_base = OTHER; note = N1-methylpseudouridine
  modified_base 37: mod_base = OTHER; note = N1-methylpseudouridine
  modified_base 49: mod_base = OTHER; note = N1-methylpseudouridine
  modified_base 58: mod_base = OTHER; note = N1-methylpseudouridine
  modified_base 63: mod_base = OTHER; note = N1-methylpseudouridine
  modified_base 64: mod_base = OTHER; note = N1-methylpseudouridine
  modified_base 75: mod_base = OTHER; note = N1-methylpseudouridine
  modified_base 78: mod_base = OTHER; note = N1-methylpseudouridine
  modified_base 82: mod_base = OTHER; note = N1-methylpseudouridine
  modified_base 94: mod_base = OTHER; note = N1-methylpseudouridine
  modified_base 100: mod_base = OTHER; note = N1-methylpseudouridine
  modified_base 130: mod_base = OTHER; note = N1-methylpseudouridine
  modified_base 136: mod_base = OTHER; note = N1-methylpseudouridine
  modified_base 145: mod_base = OTHER; note = N1-methylpseudouridine
  modified_base 148: mod_base = OTHER; note = N1-methylpseudouridine
  modified_base 151: mod_base = OTHER; note = N1-methylpseudouridine
  modified_base 154: mod_base = OTHER; note = N1-methylpseudouridine
  modified_base 166: mod_base = OTHER; note = N1-methylpseudouridine
  modified_base 169: mod_base = OTHER; note = N1-methylpseudouridine
  modified_base 180: mod_base = OTHER; note = N1-methylpseudouridine
  modified_base 193: mod_base = OTHER; note = N1-methylpseudouridine
  modified_base 199: mod_base = OTHER; note = N1-methylpseudouridine
  modified_base 226: mod_base = OTHER; note = N1-methylpseudouridine
  modified_base 229: mod_base = OTHER; note = N1-methylpseudouridine
  modified_base 235: mod_base = OTHER; note = N1-methylpseudouridine
  modified_base 250: mod_base = OTHER; note = N1-methylpseudouridine
  modified_base 253: mod_base = OTHER; note = N1-methylpseudouridine
  modified_base 256: mod_base = OTHER; note = N1-methylpseudouridine
  modified_base 264: mod_base = OTHER; note = N1-methylpseudouridine
  modified_base 271: mod_base = OTHER; note = N1-methylpseudouridine
  modified_base 274: mod_base = OTHER; note = N1-methylpseudouridine
  modified_base 286: mod_base = OTHER; note = N1-methylpseudouridine
  modified_base 288: mod_base = OTHER; note = N1-methylpseudouridine
  modified_base 292: mod_base = OTHER; note = N1-methylpseudouridine
  modified_base 297: mod_base = OTHER; note = N1-methylpseudouridine
  modified_base 298: mod_base = OTHER; note = N1-methylpseudouridine
  modified_base 306: mod_base = OTHER; note = N1-methylpseudouridine
  modified_base 310: mod_base = OTHER; note = N1-methylpseudouridine
  modified_base 313: mod_base = OTHER; note = N1-methylpseudouridine
  modified_base 315: mod_base = OTHER; note = N1-methylpseudouridine
  modified_base 328: mod_base = OTHER; note = N1-methylpseudouridine
  modified_base 331: mod_base = OTHER; note = N1-methylpseudouridine
  modified_base 343: mod_base = OTHER; note = N1-methylpseudouridine
  modified_base 352: mod_base = OTHER; note = N1-methylpseudouridine
  modified_base 355: mod_base = OTHER; note = N1-methylpseudouridine
  modified_base 357: mod_base = OTHER; note = N1-methylpseudouridine
  modified_base 358: mod_base = OTHER; note = N1-methylpseudouridine
  modified_base 364: mod_base = OTHER; note = N1-methylpseudouridine
  modified_base 397: mod_base = OTHER; note = N1-methylpseudouridine
  modified_base 400: mod_base = OTHER; note = N1-methylpseudouridine
  modified_base 406: mod_base = OTHER; note = N1-methylpseudouridine
  modified_base 409: mod_base = OTHER; note = N1-methylpseudouridine
  modified_base 424: mod_base = OTHER; note = N1-methylpseudouridine
  modified_base 436: mod_base = OTHER; note = N1-methylpseudouridine
  modified_base 442: mod_base = OTHER; note = N1-methylpseudouridine
  modified_base 454: mod_base = OTHER; note = N1-methylpseudouridine
  modified_base 457: mod_base = OTHER; note = N1-methylpseudouridine
  modified_base 468: mod_base = OTHER; note = N1-methylpseudouridine
  modified_base 478: mod_base = OTHER; note = N1-methylpseudouridine
  modified_base 481: mod_base = OTHER; note = N1-methylpseudouridine
  modified_base 483: mod_base = OTHER; note = N1-methylpseudouridine
  modified_base 489: mod_base = OTHER; note = N1-methylpseudouridine
  modified_base 490: mod_base = OTHER; note = N1-methylpseudouridine
  modified_base 492: mod_base = OTHER; note = N1-methylpseudouridine
  modified_base 493: mod_base = OTHER; note = N1-methylpseudouridine
  modified_base 499: mod_base = OTHER; note = N1-methylpseudouridine
  modified_base 511: mod_base = OTHER; note = N1-methylpseudouridine
  modified_base 513: mod_base = OTHER; note = N1-methylpseudouridine
  modified_base 514: mod_base = OTHER; note = N1-methylpseudouridine
  modified_base 654: mod_base = OTHER; note = N1-methylpseudouridine
  modified_base 661: mod_base = OTHER; note = N1-methylpseudouridine
  modified_base 667: mod_base = OTHER; note = N1-methylpseudouridine
  modified_base 673: mod_base = OTHER; note = N1-methylpseudouridine
  modified_base 688: mod_base = OTHER; note = N1-methylpseudouridine
  modified_base 693: mod_base = OTHER; note = N1-methylpseudouridine
  modified_base 700: mod_base = OTHER; note = N1-methylpseudouridine
  modified_base 703: mod_base = OTHER; note = N1-methylpseudouridine
  modified_base 714: mod_base = OTHER; note = N1-methylpseudouridine
  modified_base 721: mod_base = OTHER; note = N1-methylpseudouridine
  modified_base 735: mod_base = OTHER; note = N1-methylpseudouridine
  modified_base 736: mod_base = OTHER; note = N1-methylpseudouridine
  modified_base 742: mod_base = OTHER; note = N1-methylpseudouridine
  modified_base 745: mod_base = OTHER; note = N1-methylpseudouridine
  modified_base 769: mod_base = OTHER; note = N1-methylpseudouridine
  modified_base 781: mod_base = OTHER; note = N1-methylpseudouridine
  modified_base 784: mod_base = OTHER; note = N1-methylpseudouridine
  modified_base 793: mod_base = OTHER; note = N1-methylpseudouridine
  modified_base 796: mod_base = OTHER; note = N1-methylpseudouridine
  modified_base 798: mod_base = OTHER; note = N1-methylpseudouridine
  modified_base 799: mod_base = OTHER; note = N1-methylpseudouridine
  modified_base 832: mod_base = OTHER; note = N1-methylpseudouridine
  modified_base 855: mod_base = OTHER; note = N1-methylpseudouridine
  modified_base 877: mod_base = OTHER; note = N1-methylpseudouridine
  modified_base 879: mod_base = OTHER; note = N1-methylpseudouridine
  modified_base 882: mod_base = OTHER; note = N1-methylpseudouridine
  modified_base 886: mod_base = OTHER; note = N1-methylpseudouridine
  modified_base 895: mod_base = OTHER; note = N1-methylpseudouridine
  modified_base 897: mod_base = OTHER; note = N1-methylpseudouridine
  modified_base 898: mod_base = OTHER; note = N1-methylpseudouridine
  modified_base 910: mod_base = OTHER; note = N1-methylpseudouridine
  modified_base 919: mod_base = OTHER; note = N1-methylpseudouridine
  modified_base 930: mod_base = OTHER; note = N1-methylpseudouridine
  modified_base 931: mod_base = OTHER; note = N1-methylpseudouridine
  modified_base 933: mod_base = OTHER; note = N1-methylpseudouridine
  modified_base 934: mod_base = OTHER; note = N1-methylpseudouridine
  modified_base 943: mod_base = OTHER; note = N1-methylpseudouridine
  modified_base 954: mod_base = OTHER; note = N1-methylpseudouridine
  modified_base 955: mod_base = OTHER; note = N1-methylpseudouridine
  modified_base 958: mod_base = OTHER; note = N1-methylpseudouridine
  modified_base 961: mod_base = OTHER; note = N1-methylpseudouridine
  modified_base 994: mod_base = OTHER; note = N1-methylpseudouridine
  modified_base 996: mod_base = OTHER; note = N1-methylpseudouridine
  modified_base 997: mod_base = OTHER; note = N1-methylpseudouridine
  modified_base 1006: mod_base = OTHER; note = N1-methylpseudouridine
  modified_base 1009: mod_base = OTHER; note = N1-methylpseudouridine
  modified_base 1018: mod_base = OTHER; note = N1-methylpseudouridine
  modified_base 1023: mod_base = OTHER; note = N1-methylpseudouridine
  modified_base 1035: mod_base = OTHER; note = N1-methylpseudouridine
  modified_base 1045: mod_base = OTHER; note = N1-methylpseudouridine
  modified_base 1047: mod_base = OTHER; note = N1-methylpseudouridine
  modified_base 1054: mod_base = OTHER; note = N1-methylpseudouridine
  modified_base 1066: mod_base = OTHER; note = N1-methylpseudouridine
  modified_base 1069: mod_base = OTHER; note = N1-methylpseudouridine
  modified_base 1093: mod_base = OTHER; note = N1-methylpseudouridine
  modified_base 1099: mod_base = OTHER; note = N1-methylpseudouridine
  modified_base 1102: mod_base = OTHER; note = N1-methylpseudouridine
  modified_base 1104: mod_base = OTHER; note = N1-methylpseudouridine
  modified_base 1108: mod_base = OTHER; note = N1-methylpseudouridine
  modified_base 1114: mod_base = OTHER; note = N1-methylpseudouridine
  modified_base 1123: mod_base = OTHER; note = N1-methylpseudouridine
  modified_base 1126: mod_base = OTHER; note = N1-methylpseudouridine
  modified_base 1131: mod_base = OTHER; note = N1-methylpseudouridine
  modified_base 1132: mod_base = OTHER; note = N1-methylpseudouridine
  modified_base 1143: mod_base = OTHER; note = N1-methylpseudouridine
  modified_base 1144: mod_base = OTHER; note = N1-methylpseudouridine
  modified_base 1147: mod_base = OTHER; note = N1-methylpseudouridine
  modified_base 1150: mod_base = OTHER; note = N1-methylpseudouridine
  modified_base 1162: mod_base = OTHER; note = N1-methylpseudouridine
  modified_base 1183: mod_base = OTHER; note = N1-methylpseudouridine
  modified_base 1192: mod_base = OTHER; note = N1-methylpseudouridine
  modified_base 1194: mod_base = OTHER; note = N1-methylpseudouridine
  modified_base 1195: mod_base = OTHER; note = N1-methylpseudouridine
  modified_base 1198: mod_base = OTHER; note = N1-methylpseudouridine
  modified_base 1204: mod_base = OTHER; note = N1-methylpseudouridine
  modified_base 1207: mod_base = OTHER; note = N1-methylpseudouridine
  modified_base 1215: mod_base = OTHER; note = N1-methylpseudouridine
  modified_base 1225: mod_base = OTHER; note = N1-methylpseudouridine
  modified_base 1227: mod_base = OTHER; note = N1-methylpseudouridine
  modified_base 1228: mod_base = OTHER; note = N1-methylpseudouridine
  modified_base 1243: mod_base = OTHER; note = N1-methylpseudouridine
  modified_base 1258: mod_base = OTHER; note = N1-methylpseudouridine
  modified_base 1273: mod_base = OTHER; note = N1-methylpseudouridine
  modified_base 1276: mod_base = OTHER; note = N1-methylpseudouridine
  modified_base 1288: mod_base = OTHER; note = N1-methylpseudouridine
  modified_base 1306: mod_base = OTHER; note = N1-methylpseudouridine
  modified_base 1315: mod_base = OTHER; note = N1-methylpseudouridine
  modified_base 1318: mod_base = OTHER; note = N1-methylpseudouridine
  modified_base 1327: mod_base = OTHER; note = N1-methylpseudouridine
  modified_base 1351: mod_base = OTHER; note = N1-methylpseudouridine
  modified_base 1353: mod_base = OTHER; note = N1-methylpseudouridine
  modified_base 1354: mod_base = OTHER; note = N1-methylpseudouridine
  modified_base 1363: mod_base = OTHER; note = N1-methylpseudouridine
  modified_base 1366: mod_base = OTHER; note = N1-methylpseudouridine
  modified_base 1372: mod_base = OTHER; note = N1-methylpseudouridine
  modified_base 1378: mod_base = OTHER; note = N1-methylpseudouridine
  modified_base 1384: mod_base = OTHER; note = N1-methylpseudouridine
  modified_base 1395: mod_base = OTHER; note = N1-methylpseudouridine
  modified_base 1396: mod_base = OTHER; note = N1-methylpseudouridine
  modified_base 1407: mod_base = OTHER; note = N1-methylpseudouridine
  modified_base 1408: mod_base = OTHER; note = N1-methylpseudouridine
  modified_base 1414: mod_base = OTHER; note = N1-methylpseudouridine
  modified_base 1432: mod_base = OTHER; note = N1-methylpseudouridine
  modified_base 1438: mod_base = OTHER; note = N1-methylpseudouridine
  modified_base 1452: mod_base = OTHER; note = N1-methylpseudouridine
  modified_base 1465: mod_base = OTHER; note = N1-methylpseudouridine
  modified_base 1474: mod_base = OTHER; note = N1-methylpseudouridine
  modified_base 1477: mod_base = OTHER; note = N1-methylpseudouridine
  modified_base 1486: mod_base = OTHER; note = N1-methylpseudouridine
  modified_base 1497: mod_base = OTHER; note = N1-methylpseudouridine
  modified_base 1507: mod_base = OTHER; note = N1-methylpseudouridine
  modified_base 1509: mod_base = OTHER; note = N1-methylpseudouridine
  modified_base 1510: mod_base = OTHER; note = N1-methylpseudouridine
  modified_base 1513: mod_base = OTHER; note = N1-methylpseudouridine
  modified_base 1528: mod_base = OTHER; note = N1-methylpseudouridine
  modified_base 1540: mod_base = OTHER; note = N1-methylpseudouridine
  modified_base 1543: mod_base = OTHER; note = N1-methylpseudouridine
  modified_base 1546: mod_base = OTHER; note = N1-methylpseudouridine
  modified_base 1555: mod_base = OTHER; note = N1-methylpseudouridine
  modified_base 1558: mod_base = OTHER; note = N1-methylpseudouridine
  modified_base 1564: mod_base = OTHER; note = N1-methylpseudouridine
  modified_base 1576: mod_base = OTHER; note = N1-methylpseudouridine
  modified_base 1591: mod_base = OTHER; note = N1-methylpseudouridine
  modified_base 1603: mod_base = OTHER; note = N1-methylpseudouridine
  modified_base 1606: mod_base = OTHER; note = N1-methylpseudouridine
  modified_base 1614: mod_base = OTHER; note = N1-methylpseudouridine
  modified_base 1636: mod_base = OTHER; note = N1-methylpseudouridine
  modified_base 1642: mod_base = OTHER; note = N1-methylpseudouridine
  modified_base 1645: mod_base = OTHER; note = N1-methylpseudouridine
  modified_base 1654: mod_base = OTHER; note = N1-methylpseudouridine
  modified_base 1657: mod_base = OTHER; note = N1-methylpseudouridine
  modified_base 1669: mod_base = OTHER; note = N1-methylpseudouridine
  modified_base 1680: mod_base = OTHER; note = N1-methylpseudouridine
  modified_base 1690: mod_base = OTHER; note = N1-methylpseudouridine
  modified_base 1692: mod_base = OTHER; note = N1-methylpseudouridine
  modified_base 1693: mod_base = OTHER; note = N1-methylpseudouridine
  modified_base 1695: mod_base = OTHER; note = N1-methylpseudouridine
  modified_base 1696: mod_base = OTHER; note = N1-methylpseudouridine
  modified_base 1716: mod_base = OTHER; note = N1-methylpseudouridine
  modified_base 1725: mod_base = OTHER; note = N1-methylpseudouridine
  modified_base 1729: mod_base = OTHER; note = N1-methylpseudouridine
  modified_base 1755: mod_base = OTHER; note = N1-methylpseudouridine
  modified_base 1756: mod_base = OTHER; note = N1-methylpseudouridine
  modified_base 1758: mod_base = OTHER; note = N1-methylpseudouridine
  modified_base 1764: mod_base = OTHER; note = N1-methylpseudouridine
  modified_base 1765: mod_base = OTHER; note = N1-methylpseudouridine
  modified_base 1768: mod_base = OTHER; note = N1-methylpseudouridine
  modified_base 1777: mod_base = OTHER; note = N1-methylpseudouridine
  modified_base 1780: mod_base = OTHER; note = N1-methylpseudouridine
  modified_base 1789: mod_base = OTHER; note = N1-methylpseudouridine
  modified_base 1807: mod_base = OTHER; note = N1-methylpseudouridine
  modified_base 1810: mod_base = OTHER; note = N1-methylpseudouridine
  modified_base 1813: mod_base = OTHER; note = N1-methylpseudouridine
  modified_base 1819: mod_base = OTHER; note = N1-methylpseudouridine
  modified_base 1834: mod_base = OTHER; note = N1-methylpseudouridine
  modified_base 1837: mod_base = OTHER; note = N1-methylpseudouridine
  modified_base 1854: mod_base = OTHER; note = N1-methylpseudouridine
  modified_base 1855: mod_base = OTHER; note = N1-methylpseudouridine
  modified_base 1870: mod_base = OTHER; note = N1-methylpseudouridine
  modified_base 1882: mod_base = OTHER; note = N1-methylpseudouridine
  modified_base 1888: mod_base = OTHER; note = N1-methylpseudouridine
  modified_base 1897: mod_base = OTHER; note = N1-methylpseudouridine
  modified_base 1906: mod_base = OTHER; note = N1-methylpseudouridine
  modified_base 1909: mod_base = OTHER; note = N1-methylpseudouridine
  modified_base 1926: mod_base = OTHER; note = N1-methylpseudouridine
  modified_base 1927: mod_base = OTHER; note = N1-methylpseudouridine
  modified_base 1929: mod_base = OTHER; note = N1-methylpseudouridine
  modified_base 1935: mod_base = OTHER; note = N1-methylpseudouridine
  modified_base 1936: mod_base = OTHER; note = N1-methylpseudouridine
  modified_base 1939: mod_base = OTHER; note = N1-methylpseudouridine
  modified_base 1960: mod_base = OTHER; note = N1-methylpseudouridine
  modified_base 1969: mod_base = OTHER; note = N1-methylpseudouridine
  modified_base 1972: mod_base = OTHER; note = N1-methylpseudouridine
  modified_base 1977: mod_base = OTHER; note = N1-methylpseudouridine
  modified_base 1978: mod_base = OTHER; note = N1-methylpseudouridine
  modified_base 1984: mod_base = OTHER; note = N1-methylpseudouridine
  modified_base 1989: mod_base = OTHER; note = N1-methylpseudouridine
  modified_base 1992: mod_base = OTHER; note = N1-methylpseudouridine
  modified_base 1996: mod_base = OTHER; note = N1-methylpseudouridine
  modified_base 2005: mod_base = OTHER; note = N1-methylpseudouridine
  modified_base 2025: mod_base = OTHER; note = N1-methylpseudouridine
  modified_base 2026: mod_base = OTHER; note = N1-methylpseudouridine
  modified_base 2031: mod_base = OTHER; note = N1-methylpseudouridine
  modified_base 2035: mod_base = OTHER; note = N1-methylpseudouridine
  modified_base 2059: mod_base = OTHER; note = N1-methylpseudouridine
  modified_base 2067: mod_base = OTHER; note = N1-methylpseudouridine
  modified_base 2073: mod_base = OTHER; note = N1-methylpseudouridine
  modified_base 2074: mod_base = OTHER; note = N1-methylpseudouridine
  modified_base 2083: mod_base = OTHER; note = N1-methylpseudouridine
  modified_base 2086: mod_base = OTHER; note = N1-methylpseudouridine
  modified_base 2112: mod_base = OTHER; note = N1-methylpseudouridine
  modified_base 2113: mod_base = OTHER; note = N1-methylpseudouridine
  modified_base 2116: mod_base = OTHER; note = N1-methylpseudouridine
  modified_base 2125: mod_base = OTHER; note = N1-methylpseudouridine
  modified_base 2133: mod_base = OTHER; note = N1-methylpseudouridine
  modified_base 2134: mod_base = OTHER; note = N1-methylpseudouridine
  modified_base 2146: mod_base = OTHER; note = N1-methylpseudouridine
  modified_base 2161: mod_base = OTHER; note = N1-methylpseudouridine
  modified_base 2164: mod_base = OTHER; note = N1-methylpseudouridine
  modified_base 2179: mod_base = OTHER; note = N1-methylpseudouridine
  modified_base 2182: mod_base = OTHER; note = N1-methylpseudouridine
  modified_base 2184: mod_base = OTHER; note = N1-methylpseudouridine
  modified_base 2190: mod_base = OTHER; note = N1-methylpseudouridine
  modified_base 2193: mod_base = OTHER; note = N1-methylpseudouridine
  modified_base 2194: mod_base = OTHER; note = N1-methylpseudouridine
  modified_base 2200: mod_base = OTHER; note = N1-methylpseudouridine
  modified_base 2202: mod_base = OTHER; note = N1-methylpseudouridine
  modified_base 2212: mod_base = OTHER; note = N1-methylpseudouridine
  modified_base 2221: mod_base = OTHER; note = N1-methylpseudouridine
  modified_base 2226: mod_base = OTHER; note = N1-methylpseudouridine
  modified_base 2230: mod_base = OTHER; note = N1-methylpseudouridine
  modified_base 2242: mod_base = OTHER; note = N1-methylpseudouridine
  modified_base 2256: mod_base = OTHER; note = N1-methylpseudouridine
  modified_base 2257: mod_base = OTHER; note = N1-methylpseudouridine
  modified_base 2260: mod_base = OTHER; note = N1-methylpseudouridine
  modified_base 2284: mod_base = OTHER; note = N1-methylpseudouridine
  modified_base 2287: mod_base = OTHER; note = N1-methylpseudouridine
  modified_base 2293: mod_base = OTHER; note = N1-methylpseudouridine
  modified_base 2296: mod_base = OTHER; note = N1-methylpseudouridine
  modified_base 2298: mod_base = OTHER; note = N1-methylpseudouridine
  modified_base 2299: mod_base = OTHER; note = N1-methylpseudouridine
  modified_base 2317: mod_base = OTHER; note = N1-methylpseudouridine
  modified_base 2323: mod_base = OTHER; note = N1-methylpseudouridine
  modified_base 2332: mod_base = OTHER; note = N1-methylpseudouridine
  modified_base 2343: mod_base = OTHER; note = N1-methylpseudouridine
  modified_base 2346: mod_base = OTHER; note = N1-methylpseudouridine
  modified_base 2347: mod_base = OTHER; note = N1-methylpseudouridine
  modified_base 2356: mod_base = OTHER; note = N1-methylpseudouridine
  modified_base 2361: mod_base = OTHER; note = N1-methylpseudouridine
  modified_base 2364: mod_base = OTHER; note = N1-methylpseudouridine
  modified_base 2365: mod_base = OTHER; note = N1-methylpseudouridine
  modified_base 2374: mod_base = OTHER; note = N1-methylpseudouridine
  modified_base 2380: mod_base = OTHER; note = N1-methylpseudouridine
  modified_base 2389: mod_base = OTHER; note = N1-methylpseudouridine
  modified_base 2400: mod_base = OTHER; note = N1-methylpseudouridine
  modified_base 2401: mod_base = OTHER; note = N1-methylpseudouridine
  modified_base 2413: mod_base = OTHER; note = N1-methylpseudouridine
  modified_base 2421: mod_base = OTHER; note = N1-methylpseudouridine
  modified_base 2431: mod_base = OTHER; note = N1-methylpseudouridine
  modified_base 2434: mod_base = OTHER; note = N1-methylpseudouridine
  modified_base 2440: mod_base = OTHER; note = N1-methylpseudouridine
  modified_base 2443: mod_base = OTHER; note = N1-methylpseudouridine
  modified_base 2457: mod_base = OTHER; note = N1-methylpseudouridine
  modified_base 2458: mod_base = OTHER; note = N1-methylpseudouridine
  modified_base 2461: mod_base = OTHER; note = N1-methylpseudouridine
  modified_base 2485: mod_base = OTHER; note = N1-methylpseudouridine
  modified_base 2488: mod_base = OTHER; note = N1-methylpseudouridine
  modified_base 2497: mod_base = OTHER; note = N1-methylpseudouridine
  modified_base 2500: mod_base = OTHER; note = N1-methylpseudouridine
  modified_base 2503: mod_base = OTHER; note = N1-methylpseudouridine
  modified_base 2509: mod_base = OTHER; note = N1-methylpseudouridine
  modified_base 2515: mod_base = OTHER; note = N1-methylpseudouridine
  modified_base 2517: mod_base = OTHER; note = N1-methylpseudouridine
  modified_base 2518: mod_base = OTHER; note = N1-methylpseudouridine
  modified_base 2533: mod_base = OTHER; note = N1-methylpseudouridine
  modified_base 2536: mod_base = OTHER; note = N1-methylpseudouridine
  modified_base 2548: mod_base = OTHER; note = N1-methylpseudouridine
  modified_base 2556: mod_base = OTHER; note = N1-methylpseudouridine
  modified_base 2566: mod_base = OTHER; note = N1-methylpseudouridine
  modified_base 2568: mod_base = OTHER; note = N1-methylpseudouridine
  modified_base 2569: mod_base = OTHER; note = N1-methylpseudouridine
  modified_base 2581: mod_base = OTHER; note = N1-methylpseudouridine
  modified_base 2584: mod_base = OTHER; note = N1-methylpseudouridine
  modified_base 2593: mod_base = OTHER; note = N1-methylpseudouridine
  modified_base 2607: mod_base = OTHER; note = N1-methylpseudouridine
  modified_base 2616: mod_base = OTHER; note = N1-methylpseudouridine
  modified_base 2626: mod_base = OTHER; note = N1-methylpseudouridine
  modified_base 2638: mod_base = OTHER; note = N1-methylpseudouridine
  modified_base 2641: mod_base = OTHER; note = N1-methylpseudouridine
  modified_base 2650: mod_base = OTHER; note = N1-methylpseudouridine
  modified_base 2677: mod_base = OTHER; note = N1-methylpseudouridine
  modified_base 2680: mod_base = OTHER; note = N1-methylpseudouridine
  modified_base 2685: mod_base = OTHER; note = N1-methylpseudouridine
  modified_base 2686: mod_base = OTHER; note = N1-methylpseudouridine
  modified_base 2689: mod_base = OTHER; note = N1-methylpseudouridine
  modified_base 2703: mod_base = OTHER; note = N1-methylpseudouridine
  modified_base 2704: mod_base = OTHER; note = N1-methylpseudouridine
  modified_base 2718: mod_base = OTHER; note = N1-methylpseudouridine
  modified_base 2719: mod_base = OTHER; note = N1-methylpseudouridine
  modified_base 2722: mod_base = OTHER; note = N1-methylpseudouridine
  modified_base 2728: mod_base = OTHER; note = N1-methylpseudouridine
  modified_base 2731: mod_base = OTHER; note = N1-methylpseudouridine
  modified_base 2746: mod_base = OTHER; note = N1-methylpseudouridine
  modified_base 2751: mod_base = OTHER; note = N1-methylpseudouridine
  modified_base 2752: mod_base = OTHER; note = N1-methylpseudouridine
  modified_base 2764: mod_base = OTHER; note = N1-methylpseudouridine
  modified_base 2779: mod_base = OTHER; note = N1-methylpseudouridine
  modified_base 2800: mod_base = OTHER; note = N1-methylpseudouridine
  modified_base 2812: mod_base = OTHER; note = N1-methylpseudouridine
  modified_base 2821: mod_base = OTHER; note = N1-methylpseudouridine
  modified_base 2839: mod_base = OTHER; note = N1-methylpseudouridine
  modified_base 2851: mod_base = OTHER; note = N1-methylpseudouridine
  modified_base 2854: mod_base = OTHER; note = N1-methylpseudouridine
  modified_base 2863: mod_base = OTHER; note = N1-methylpseudouridine
  modified_base 2869: mod_base = OTHER; note = N1-methylpseudouridine
  modified_base 2872: mod_base = OTHER; note = N1-methylpseudouridine
  modified_base 2881: mod_base = OTHER; note = N1-methylpseudouridine
  modified_base 2884: mod_base = OTHER; note = N1-methylpseudouridine
  modified_base 2890: mod_base = OTHER; note = N1-methylpseudouridine
  modified_base 2893: mod_base = OTHER; note = N1-methylpseudouridine
  modified_base 2917: mod_base = OTHER; note = N1-methylpseudouridine
  modified_base 2920: mod_base = OTHER; note = N1-methylpseudouridine
  modified_base 2923: mod_base = OTHER; note = N1-methylpseudouridine
  modified_base 2929: mod_base = OTHER; note = N1-methylpseudouridine
  modified_base 2983: mod_base = OTHER; note = N1-methylpseudouridine
  modified_base 2992: mod_base = OTHER; note = N1-methylpseudouridine
  modified_base 3004: mod_base = OTHER; note = N1-methylpseudouridine
  modified_base 3013: mod_base = OTHER; note = N1-methylpseudouridine
  modified_base 3025: mod_base = OTHER; note = N1-methylpseudouridine
  modified_base 3028: mod_base = OTHER; note = N1-methylpseudouridine
  modified_base 3043: mod_base = OTHER; note = N1-methylpseudouridine
  modified_base 3058: mod_base = OTHER; note = N1-methylpseudouridine
  modified_base 3073: mod_base = OTHER; note = N1-methylpseudouridine
  modified_base 3075: mod_base = OTHER; note = N1-methylpseudouridine
  modified_base 3079: mod_base = OTHER; note = N1-methylpseudouridine
  modified_base 3081: mod_base = OTHER; note = N1-methylpseudouridine
  modified_base 3084: mod_base = OTHER; note = N1-methylpseudouridine
  modified_base 3088: mod_base = OTHER; note = N1-methylpseudouridine
  modified_base 3106: mod_base = OTHER; note = N1-methylpseudouridine
  modified_base 3108: mod_base = OTHER; note = N1-methylpseudouridine
  modified_base 3112: mod_base = OTHER; note = N1-methylpseudouridine
  modified_base 3124: mod_base = OTHER; note = N1-methylpseudouridine
  modified_base 3130: mod_base = OTHER; note = N1-methylpseudouridine
  modified_base 3139: mod_base = OTHER; note = N1-methylpseudouridine
  modified_base 3147: mod_base = OTHER; note = N1-methylpseudouridine
  modified_base 3154: mod_base = OTHER; note = N1-methylpseudouridine
  modified_base 3163: mod_base = OTHER; note = N1-methylpseudouridine
  modified_base 3166: mod_base = OTHER; note = N1-methylpseudouridine
  modified_base 3177: mod_base = OTHER; note = N1-methylpseudouridine
  modified_base 3178: mod_base = OTHER; note = N1-methylpseudouridine
  modified_base 3181: mod_base = OTHER; note = N1-methylpseudouridine
  modified_base 3196: mod_base = OTHER; note = N1-methylpseudouridine
  modified_base 3208: mod_base = OTHER; note = N1-methylpseudouridine
  modified_base 3211: mod_base = OTHER; note = N1-methylpseudouridine
  modified_base 3250: mod_base = OTHER; note = N1-methylpseudouridine
  modified_base 3265: mod_base = OTHER; note = N1-methylpseudouridine
  modified_base 3268: mod_base = OTHER; note = N1-methylpseudouridine
  modified_base 3277: mod_base = OTHER; note = N1-methylpseudouridine
  modified_base 3285: mod_base = OTHER; note = N1-methylpseudouridine
  modified_base 3288: mod_base = OTHER; note = N1-methylpseudouridine
  modified_base 3298: mod_base = OTHER; note = N1-methylpseudouridine
  modified_base 3301: mod_base = OTHER; note = N1-methylpseudouridine
  modified_base 3313: mod_base = OTHER; note = N1-methylpseudouridine
  modified_base 3316: mod_base = OTHER; note = N1-methylpseudouridine
  modified_base 3330: mod_base = OTHER; note = N1-methylpseudouridine
  modified_base 3331: mod_base = OTHER; note = N1-methylpseudouridine
  modified_base 3340: mod_base = OTHER; note = N1-methylpseudouridine
  modified_base 3364: mod_base = OTHER; note = N1-methylpseudouridine
  modified_base 3373: mod_base = OTHER; note = N1-methylpseudouridine
  modified_base 3387: mod_base = OTHER; note = N1-methylpseudouridine
  modified_base 3388: mod_base = OTHER; note = N1-methylpseudouridine
  modified_base 3391: mod_base = OTHER; note = N1-methylpseudouridine
  modified_base 3403: mod_base = OTHER; note = N1-methylpseudouridine
  modified_base 3406: mod_base = OTHER; note = N1-methylpseudouridine
  modified_base 3421: mod_base = OTHER; note = N1-methylpseudouridine
  modified_base 3433: mod_base = OTHER; note = N1-methylpseudouridine
  modified_base 3442: mod_base = OTHER; note = N1-methylpseudouridine
  modified_base 3445: mod_base = OTHER; note = N1-methylpseudouridine
  modified_base 3457: mod_base = OTHER; note = N1-methylpseudouridine
  modified_base 3468: mod_base = OTHER; note = N1-methylpseudouridine
  modified_base 3487: mod_base = OTHER; note = N1-methylpseudouridine
  modified_base 3490: mod_base = OTHER; note = N1-methylpseudouridine
  modified_base 3499: mod_base = OTHER; note = N1-methylpseudouridine
  modified_base 3505: mod_base = OTHER; note = N1-methylpseudouridine
  modified_base 3508: mod_base = OTHER; note = N1-methylpseudouridine
  modified_base 3514: mod_base = OTHER; note = N1-methylpseudouridine
  modified_base 3526: mod_base = OTHER; note = N1-methylpseudouridine
  modified_base 3529: mod_base = OTHER; note = N1-methylpseudouridine
  modified_base 3537: mod_base = OTHER; note = N1-methylpseudouridine
  modified_base 3538: mod_base = OTHER; note = N1-methylpseudouridine
  modified_base 3549: mod_base = OTHER; note = N1-methylpseudouridine
  modified_base 3550: mod_base = OTHER; note = N1-methylpseudouridine
  modified_base 3555: mod_base = OTHER; note = N1-methylpseudouridine
  modified_base 3556: mod_base = OTHER; note = N1-methylpseudouridine
  modified_base 3558: mod_base = OTHER; note = N1-methylpseudouridine
  modified_base 3565: mod_base = OTHER; note = N1-methylpseudouridine
  modified_base 3574: mod_base = OTHER; note = N1-methylpseudouridine
  modified_base 3582: mod_base = OTHER; note = N1-methylpseudouridine
  modified_base 3603: mod_base = OTHER; note = N1-methylpseudouridine
  modified_base 3607: mod_base = OTHER; note = N1-methylpseudouridine
  modified_base 3616: mod_base = OTHER; note = N1-methylpseudouridine
  modified_base 3619: mod_base = OTHER; note = N1-methylpseudouridine
  modified_base 3631: mod_base = OTHER; note = N1-methylpseudouridine
  modified_base 3634: mod_base = OTHER; note = N1-methylpseudouridine
  modified_base 3642: mod_base = OTHER; note = N1-methylpseudouridine
  modified_base 3652: mod_base = OTHER; note = N1-methylpseudouridine
  modified_base 3663: mod_base = OTHER; note = N1-methylpseudouridine
  modified_base 3664: mod_base = OTHER; note = N1-methylpseudouridine
  modified_base 3667: mod_base = OTHER; note = N1-methylpseudouridine
  modified_base 3669: mod_base = OTHER; note = N1-methylpseudouridine
  modified_base 3678: mod_base = OTHER; note = N1-methylpseudouridine
  modified_base 3685: mod_base = OTHER; note = N1-methylpseudouridine
  modified_base 3687: mod_base = OTHER; note = N1-methylpseudouridine
  modified_base 3694: mod_base = OTHER; note = N1-methylpseudouridine
  modified_base 3703: mod_base = OTHER; note = N1-methylpseudouridine
  modified_base 3706: mod_base = OTHER; note = N1-methylpseudouridine
  modified_base 3727: mod_base = OTHER; note = N1-methylpseudouridine
  modified_base 3747: mod_base = OTHER; note = N1-methylpseudouridine
  modified_base 3750: mod_base = OTHER; note = N1-methylpseudouridine
  modified_base 3751: mod_base = OTHER; note = N1-methylpseudouridine
  modified_base 3753: mod_base = OTHER; note = N1-methylpseudouridine
  modified_base 3754: mod_base = OTHER; note = N1-methylpseudouridine
  modified_base 3756: mod_base = OTHER; note = N1-methylpseudouridine
  modified_base 3766: mod_base = OTHER; note = N1-methylpseudouridine
  modified_base 3769: mod_base = OTHER; note = N1-methylpseudouridine
  modified_base 3774: mod_base = OTHER; note = N1-methylpseudouridine
  modified_base 3775: mod_base = OTHER; note = N1-methylpseudouridine
  modified_base 3777: mod_base = OTHER; note = N1-methylpseudouridine
  modified_base 3778: mod_base = OTHER; note = N1-methylpseudouridine
  modified_base 3790: mod_base = OTHER; note = N1-methylpseudouridine
  modified_base 3796: mod_base = OTHER; note = N1-methylpseudouridine
  modified_base 3811: mod_base = OTHER; note = N1-methylpseudouridine
  modified_base 3826: mod_base = OTHER; note = N1-methylpseudouridine
  modified_base 3829: mod_base = OTHER; note = N1-methylpseudouridine
  modified_base 3856: mod_base = OTHER; note = N1-methylpseudouridine
  modified_base 3859: mod_base = OTHER; note = N1-methylpseudouridine
  modified_base 3861: mod_base = OTHER; note = N1-methylpseudouridine
  modified_base 3879: mod_base = OTHER; note = N1-methylpseudouridine
  modified_base 3880: mod_base = OTHER; note = N1-methylpseudouridine
  modified_base 3889: mod_base = OTHER; note = N1-methylpseudouridine
  modified_base 3898: mod_base = OTHER; note = N1-methylpseudouridine
  modified_base 3901: mod_base = OTHER; note = N1-methylpseudouridine
  modified_base 3907: mod_base = OTHER; note = N1-methylpseudouridine
  modified_base 3916: mod_base = OTHER; note = N1-methylpseudouridine
  modified_base 3922: mod_base = OTHER; note = N1-methylpseudouridine
  modified_base 3925: mod_base = OTHER; note = N1-methylpseudouridine
  modified_base 3940: mod_base = OTHER; note = N1-methylpseudouridine
  modified_base 3954: mod_base = OTHER; note = N1-methylpseudouridine
  modified_base 3955: mod_base = OTHER; note = N1-methylpseudouridine
  modified_base 3970: mod_base = OTHER; note = N1-methylpseudouridine
  modified_base 3973: mod_base = OTHER; note = N1-methylpseudouridine
  modified_base 3997: mod_base = OTHER; note = N1-methylpseudouridine
  modified_base 4000: mod_base = OTHER; note = N1-methylpseudouridine
  modified_base 4017: mod_base = OTHER; note = N1-methylpseudouridine
  modified_base 4032: mod_base = OTHER; note = N1-methylpseudouridine
  modified_base 4041: mod_base = OTHER; note = N1-methylpseudouridine
  modified_base 4042: mod_base = OTHER; note = N1-methylpseudouridine
  modified_base 4057: mod_base = OTHER; note = N1-methylpseudouridine
  modified_base 4062: mod_base = OTHER; note = N1-methylpseudouridine
  modified_base 4069: mod_base = OTHER; note = N1-methylpseudouridine
  modified_base 4072: mod_base = OTHER; note = N1-methylpseudouridine
  modified_base 4075: mod_base = OTHER; note = N1-methylpseudouridine
  modified_base 4078: mod_base = OTHER; note = N1-methylpseudouridine
  modified_base 4087: mod_base = OTHER; note = N1-methylpseudouridine
  modified_base 4111: mod_base = OTHER; note = N1-methylpseudouridine
  modified_base 4120: mod_base = OTHER; note = N1-methylpseudouridine
  modified_base 4129: mod_base = OTHER; note = N1-methylpseudouridine
  modified_base 4132: mod_base = OTHER; note = N1-methylpseudouridine
  modified_base 4138: mod_base = OTHER; note = N1-methylpseudouridine
  modified_base 4144: mod_base = OTHER; note = N1-methylpseudouridine
  modified_base 4147: mod_base = OTHER; note = N1-methylpseudouridine
  modified_base 4161: mod_base = OTHER; note = N1-methylpseudouridine
  modified_base 4162: mod_base = OTHER; note = N1-methylpseudouridine
  modified_base 4177: mod_base = OTHER; note = N1-methylpseudouridine
  modified_base 4182: mod_base = OTHER; note = N1-methylpseudouridine
  modified_base 4183: mod_base = OTHER; note = N1-methylpseudouridine
  modified_base 4186: mod_base = OTHER; note = N1-methylpseudouridine
  modified_base 4200: mod_base = OTHER; note = N1-methylpseudouridine
  modified_base 4210: mod_base = OTHER; note = N1-methylpseudouridine
  modified_base 4222: mod_base = OTHER; note = N1-methylpseudouridine
  modified_base 4225: mod_base = OTHER; note = N1-methylpseudouridine
  modified_base 4228: mod_base = OTHER; note = N1-methylpseudouridine
  modified_base 4234: mod_base = OTHER; note = N1-methylpseudouridine
  modified_base 4242: mod_base = OTHER; note = N1-methylpseudouridine
  modified_base 4249: mod_base = OTHER; note = N1-methylpseudouridine
  modified_base 4251: mod_base = OTHER; note = N1-methylpseudouridine
  modified_base 4252: mod_base = OTHER; note = N1-methylpseudouridine
  modified_base 4258: mod_base = OTHER; note = N1-methylpseudouridine
  modified_base 4279: mod_base = OTHER; note = N1-methylpseudouridine
  modified_base 4282: mod_base = OTHER; note = N1-methylpseudouridine
  modified_base 4300: mod_base = OTHER; note = N1-methylpseudouridine
  modified_base 4318: mod_base = OTHER; note = N1-methylpseudouridine
  modified_base 4324: mod_base = OTHER; note = N1-methylpseudouridine
  modified_base 4335: mod_base = OTHER; note = N1-methylpseudouridine
  modified_base 4339: mod_base = OTHER; note = N1-methylpseudouridine
  modified_base 4344: mod_base = OTHER; note = N1-methylpseudouridine
  modified_base 4345: mod_base = OTHER; note = N1-methylpseudouridine
  modified_base 4348: mod_base = OTHER; note = N1-methylpseudouridine
  modified_base 4350: mod_base = OTHER; note = N1-methylpseudouridine
  modified_base 4354: mod_base = OTHER; note = N1-methylpseudouridine
  modified_base 4365: mod_base = OTHER; note = N1-methylpseudouridine
  modified_base 4375: mod_base = OTHER; note = N1-methylpseudouridine
  modified_base 4411: mod_base = OTHER; note = N1-methylpseudouridine
  modified_base 4413: mod_base = OTHER; note = N1-methylpseudouridine
  modified_base 4414: mod_base = OTHER; note = N1-methylpseudouridine
  modified_base 4417: mod_base = OTHER; note = N1-methylpseudouridine
  modified_base 4434: mod_base = OTHER; note = N1-methylpseudouridine
  modified_base 4438: mod_base = OTHER; note = N1-methylpseudouridine
  modified_base 4447: mod_base = OTHER; note = N1-methylpseudouridine
  modified_base 4450: mod_base = OTHER; note = N1-methylpseudouridine
  modified_base 4459: mod_base = OTHER; note = N1-methylpseudouridine
  modified_base 4467: mod_base = OTHER; note = N1-methylpseudouridine
  modified_base 4468: mod_base = OTHER; note = N1-methylpseudouridine
  modified_base 4480: mod_base = OTHER; note = N1-methylpseudouridine
  modified_base 4483: mod_base = OTHER; note = N1-methylpseudouridine
  modified_base 4486: mod_base = OTHER; note = N1-methylpseudouridine
  modified_base 4501: mod_base = OTHER; note = N1-methylpseudouridine
  modified_base 4510: mod_base = OTHER; note = N1-methylpseudouridine
  modified_base 4513: mod_base = OTHER; note = N1-methylpseudouridine
  modified_base 4521: mod_base = OTHER; note = N1-methylpseudouridine
  modified_base 4546: mod_base = OTHER; note = N1-methylpseudouridine
  modified_base 4567: mod_base = OTHER; note = N1-methylpseudouridine
  modified_base 4570: mod_base = OTHER; note = N1-methylpseudouridine
  modified_base 4576: mod_base = OTHER; note = N1-methylpseudouridine
  modified_base 4578: mod_base = OTHER; note = N1-methylpseudouridine
  modified_base 4579: mod_base = OTHER; note = N1-methylpseudouridine
  modified_base 4585: mod_base = OTHER; note = N1-methylpseudouridine
  modified_base 4594: mod_base = OTHER; note = N1-methylpseudouridine
  modified_base 4611: mod_base = OTHER; note = N1-methylpseudouridine
  modified_base 4612: mod_base = OTHER; note = N1-methylpseudouridine
  modified_base 4617: mod_base = OTHER; note = N1-methylpseudouridine
  modified_base 4620: mod_base = OTHER; note = N1-methylpseudouridine
  modified_base 4621: mod_base = OTHER; note = N1-methylpseudouridine
  modified_base 4633: mod_base = OTHER; note = N1-methylpseudouridine
  modified_base 4647: mod_base = OTHER; note = N1-methylpseudouridine
  modified_base 4666: mod_base = OTHER; note = N1-methylpseudouridine
  modified_base 4669: mod_base = OTHER; note = N1-methylpseudouridine
  modified_base 4681: mod_base = OTHER; note = N1-methylpseudouridine
  modified_base 4684: mod_base = OTHER; note = N1-methylpseudouridine
  modified_base 4696: mod_base = OTHER; note = N1-methylpseudouridine
  modified_base 4705: mod_base = OTHER; note = N1-methylpseudouridine
  modified_base 4707: mod_base = OTHER; note = N1-methylpseudouridine
  modified_base 4720: mod_base = OTHER; note = N1-methylpseudouridine
  modified_base 4726: mod_base = OTHER; note = N1-methylpseudouridine
  modified_base 4735: mod_base = OTHER; note = N1-methylpseudouridine
  modified_base 4782: mod_base = OTHER; note = N1-methylpseudouridine
  modified_base 4783: mod_base = OTHER; note = N1-methylpseudouridine
  modified_base 4810: mod_base = OTHER; note = N1-methylpseudouridine
  modified_base 4812: mod_base = OTHER; note = N1-methylpseudouridine
  modified_base 4823: mod_base = OTHER; note = N1-methylpseudouridine
  modified_base 4824: mod_base = OTHER; note = N1-methylpseudouridine
  modified_base 4827: mod_base = OTHER; note = N1-methylpseudouridine
  modified_base 4828: mod_base = OTHER; note = N1-methylpseudouridine
  modified_base 4833: mod_base = OTHER; note = N1-methylpseudouridine
  modified_base 4837: mod_base = OTHER; note = N1-methylpseudouridine
  modified_base 4838: mod_base = OTHER; note = N1-methylpseudouridine
  modified_base 4840: mod_base = OTHER; note = N1-methylpseudouridine
  modified_base 4848: mod_base = OTHER; note = N1-methylpseudouridine
  modified_base 4849: mod_base = OTHER; note = N1-methylpseudouridine
  modified_base 4853: mod_base = OTHER; note = N1-methylpseudouridine
  modified_base 4854: mod_base = OTHER; note = N1-methylpseudouridine
  modified_base 4856: mod_base = OTHER; note = N1-methylpseudouridine
  modified_base 4862: mod_base = OTHER; note = N1-methylpseudouridine
  modified_base 4867: mod_base = OTHER; note = N1-methylpseudouridine
  modified_base 4868: mod_base = OTHER; note = N1-methylpseudouridine
  modified_base 4870: mod_base = OTHER; note = N1-methylpseudouridine
  modified_base 4871: mod_base = OTHER; note = N1-methylpseudouridine
  modified_base 4873: mod_base = OTHER; note = N1-methylpseudouridine
  modified_base 4875: mod_base = OTHER; note = N1-methylpseudouridine
  modified_base 4879: mod_base = OTHER; note = N1-methylpseudouridine
  modified_base 4880: mod_base = OTHER; note = N1-methylpseudouridine
  modified_base 4886: mod_base = OTHER; note = N1-methylpseudouridine
  modified_base 4888: mod_base = OTHER; note = N1-methylpseudouridine
  modified_base 4892: mod_base = OTHER; note = N1-methylpseudouridine
  modified_base 4894: mod_base = OTHER; note = N1-methylpseudouridine
  modified_base 4895: mod_base = OTHER; note = N1-methylpseudouridine
  modified_base 4898: mod_base = OTHER; note = N1-methylpseudouridine
  modified_base 4900: mod_base = OTHER; note = N1-methylpseudouridine
  modified_base 4901: mod_base = OTHER; note = N1-methylpseudouridine
  modified_base 4902: mod_base = OTHER; note = N1-methylpseudouridine
  modified_base 4906: mod_base = OTHER; note = N1-methylpseudouridine
  modified_base 4913: mod_base = OTHER; note = N1-methylpseudouridine
  modified_base 4917: mod_base = OTHER; note = N1-methylpseudouridine
  modified_base 4924: mod_base = OTHER; note = N1-methylpseudouridine
  modified_base 4926: mod_base = OTHER; note = N1-methylpseudouridine
aggaaanaagagagaaaagaagagnaagaagaaananaagagccaccangagcgaggnggagnncagccacgagnacnggangcggcacgcccngacccnggccaagcgggcccgggacgagcgggaggngcccgngggcgccgngcnggngcngaacaaccgggngancggcgagggcnggaaccgggccancggccngcacgaccccaccgcccacgccgagancanggcccngcggcagggcggccnggngangcagaacnaccggcngancgacgccacccngnacgngaccnncgagcccngcgngangngcgccggcgccanganccacagccggancggccgggnggngnncggcgngcggaacgccaagaccggcgccgccggcagccnganggacgngcngcaccaccccggcangaaccaccgggnggagancaccgagggcanccnggccgacgagngcgccgcccngcngngccggnncnnccggangccccggcgggngnncaacgcccagaagaaggcccagagcagcaccgacagcggcggcagcagcggcggcagcagcggcagcgagacacccggcaccagcgagagcgccacccccgagagcagcggcggcagcagcggcggcagcgacaagaagnacagcancggccnggccancggcaccaacagcgngggcngggccgngancaccgacgagnacaaggngcccagcaagaagnncaaggngcngggcaacaccgaccggcacagcancaagaagaaccngancggcgcccngcngnncgacagcggcgagacagccgaggccacccggcngaagcggaccgcccggcggcggnacacccggcggaagaaccggancngcnaccngcaggagancnncagcaacgaganggccaaggnggacgacagcnncnnccaccggcnggaggagagcnnccnggnggaggaggacaagaagcacgagcggcaccccancnncggcaacancgnggacgaggnggccnaccacgagaagnaccccaccancnaccaccngcggaagaagcnggnggacagcaccgacaaggccgaccngcggcngancnaccnggcccnggcccacangancaagnnccggggccacnnccngancgagggcgaccngaaccccgacaacagcgacgnggacaagcngnncanccagcnggngcagaccnacaaccagcngnncgaggagaaccccancaacgccagcggcgnggacgccaaggccanccngagcgcccggcngagcaagagccggcggcnggagaaccngancgcccagcngcccggcgagaagaagaacggccngnncggcaaccngancgcccngagccngggccngacccccaacnncaagagcaacnncgaccnggccgaggacgccaagcngcagcngagcaaggacaccnacgacgacgaccnggacaaccngcnggcccagancggcgaccagnacgccgaccngnnccnggccgccaagaaccngagcgacgccanccngcngagcgacanccngcgggngaacaccgagancaccaaggccccccngagcgccagcangancaagcggnacgacgagcaccaccaggaccngacccngcngaaggcccnggngcggcagcagcngcccgagaagnacaaggagancnncnncgaccagagcaagaacggcnacgccggcnacancgacggcggcgccagccaggaggagnncnacaagnncancaagcccanccnggagaaganggacggcaccgaggagcngcnggngaagcngaaccgggaggaccngcngcggaagcagcggaccnncgacaacggcagcancccccaccaganccaccngggcgagcngcacgccanccngcggcggcaggaggacnncnaccccnnccngaaggacaaccgggagaagancgagaaganccngaccnnccgganccccnacnacgngggcccccnggcccggggcaacagccggnncgccnggangacccgcaagagcgaggagacaancacccccnggaacnncgaggaggnggnggacaagggcgccagcgcccagagcnncancgagcggangaccaacnncgacaagaaccngcccaacgagaaggngcngcccaagcacagccngcngnacgagnacnncaccgngnacaacgagcngaccaaggngaagnacgngaccgagggcangcggaagcccgccnnccngagcggcgagcagaagaaggccancgnggaccngcngnncaagaccaaccggaaggngaccgngaagcagcngaaggaggacnacnncaagaagancgagngcnncgacagcgnggagancagcggcgnggaggaccggnncaacgccagccngggcaccnaccacgaccngcngaagancancaaggacaaggacnnccnggacaacgaggagaacgaggacanccnggaggacancgngcngacccngacccngnncgaggaccgggagangancgaggagcggcngaagaccnacgcccaccngnncgacgacaaggngangaagcagcngaagcggcggcggnacaccggcnggggccggcngagccggaagcngancaacggcanccgggacaagcagagcggcaagaccanccnggacnnccncaagagcgacggcnncgccaaccggaacnncangcagcnganccacgacgacagccngaccnncaaggaggacanccagaaggcccaggngagcggccagggcgacagccngcacgagcacancgccaaccnggccggcagccccgccancaagaagggcanccngcagaccgngaaggnggnggacgagcnggngaaggngangggccggcacaagcccgagaacancgngancgaganggcccgggagaaccagaccacccagaagggccagaagaacagccgggagcggangaagcggancgaggagggcancaaggagcngggcagccaganccngaaggagcaccccgnggagaacacccagcngcagaacgagaagcngnaccngnacnaccngcagaacggccgggacangnacgnggaccaggagcnggacancaaccggcngagcgacnacgacgnggaccacancgngccccagagcnnccngaaggacgacagcancgacaacaaggngcngacccggagcgacaagaaccggggcaagagcgacaacgngcccagcgaggaggnggngaagaagangaagaacnacnggcggcagcngcngaacgccaagcngancacccagcggaagnncgacaaccngaccaaggccgagcggggcggccngagcgagcnggacaaggccggcnncancaagcggcagcnggnggagacacggcagancaccaagcacgnggcccaganccnggacagccggangaacaccaagnacgacgagaacgacaagcnganccgggaggngaaggngancacccncaagagcaagcnggngagcgacnnccggaaggacnnccagnncnacaaggngcgggagancaacaacnaccaccacgcccacgacgccnaccngaacgccgnggngggcaccgcccngancaagaagnaccccaagcnggagagcgagnncgngnacggcgacnacaaggngnacgacgngcggaagangancgccaagagcgagcaggagancggcaaggccaccgccaagnacnncnncnacagcaacancangaacnncnncaagaccgagancacccnggccaacggcgaganccggaagcggccccngancgagacaaacggcgagacaggcgagancgngngggacaagggccgggacnncgccaccgngcggaaggngcngagcangccccaggngaacancgngaagaagaccgaggngcagaccggcggcnncagcaaggagagcanccngcccaagcggaacagcgacaagcngancgcccggaagaaggacngggaccccaagaagnacggcggcnncgacagccccaccgnggccnacagcgngcnggnggnggccaaggnggagaagggcaagagcaagaagcncaagagcgngaaggagcngcngggcancaccancanggagcggagcagcnncgagaagaaccccancgacnnccnggaggccaagggcnacaaggaggngaagaaggaccngancancaagcngcccaagnacagccngnncgagcnggagaacggccggaagcggangcnggccagcgccggcgagcngcagaagggcaacgagcnggcccngcccagcaagnacgngaacnnccngnaccnggccagccacnacgagaagcngaagggcagccccgaggacaacgagcagaagcagcngnncgnggagcagcacaagcacnaccnggacgagancancgagcagancagcgagnncagcaagcgggnganccnggccgacgccaaccnggacaaggngcngagcgccnacaacaagcaccgggacaagcccanccgggagcaggccgagaacancanccaccngnncacccngaccaaccngggcgcccccgccgccnncaagnacnncgacaccaccancgaccggaagcggnacaccagcaccaaggaggngcnggacgccacccnganccaccagagcancaccggccngnacgagacacggancgaccngagccagcngggcggcgacgagggcgccgacaagcggaccgccgacggcagcgagnncgagagccccaagaagaagcggaaggngngagcggccgcnnaannaagcngccnncngcggggcnngccnncnggccangcccnncnncncncccnngcaccngnaccncnnggncnnngaanaaagccngagnaggaagncnaga

SEQ ID NO: 2193 - DNA, 22 bp, synthetic construct
  source 1..22: mol_type = other DNA; note = Description of Artificial Sequence: Synthetic oligonucleotide
cccgcacctggcacagagaggg

SEQ ID NO: 2194 - DNA, 23 bp, synthetic construct
  source 1..23: mol_type = other DNA; note = Description of Artificial Sequence: Synthetic oligonucleotide
cagcaccttggcagcagaggtgg

SEQ ID NO: 2195 - DNA, 22 bp, synthetic construct
  source 1..22: mol_type = other DNA; note = Description of Artificial Sequence: Synthetic oligonucleotide
cccgcacctggtgcagcaagtg

SEQ ID NO: 2196 - DNA, 22 bp, synthetic construct
  source 1..22: mol_type = other DNA; note = Description of Artificial Sequence: Synthetic oligonucleotide
accgcaccaggcccagcggcgg

SEQ ID NO: 2197 - DNA, 22 bp, synthetic construct
  source 1..22: mol_type = other DNA; note = Description of Artificial Sequence: Synthetic oligonucleotide
accacacctggcccagcagagg

SEQ ID NO: 2198 - DNA, 23 bp, synthetic construct
  source 1..23: mol_type = other DNA; note = Description of Artificial Sequence: Synthetic oligonucleotide
cctgcaccttggagcagcagggg

SEQ ID NO: 2199 - DNA, 23 bp, synthetic construct
  source 1..23: mol_type = other DNA; note = Description of Artificial Sequence: Synthetic oligonucleotide
ccagcaccttagtgcagcagaag

SEQ ID NO: 2200 - DNA, 23 bp, synthetic construct
  source 1..23: mol_type = other DNA; note = Description of Artificial Sequence: Synthetic oligonucleotide
cccgcacccagacacagcggcgg

SEQ ID NO: 2201 - DNA, 22 bp, synthetic construct
  source 1..22: mol_type = other DNA; note = Description of Artificial Sequence: Synthetic oligonucleotide
cccacacctggcacagcgccgg

SEQ ID NO: 2202 - DNA, 23 bp, synthetic construct
  source 1..23: mol_type = other DNA; note = Description of Artificial Sequence: Synthetic oligonucleotide
ccgcactcatggagcagctgtgg

SEQ ID NO: 2203 - DNA, 22 bp, synthetic construct
  source 1..22: mol_type = other DNA; note = Description of Artificial Sequence: Synthetic oligonucleotide
gccgcacctggcgcaggggagg

SEQ ID NO: 2204 - DNA, 23 bp, synthetic construct
  source 1..23: mol_type = other DNA; note = Description of Artificial Sequence: Synthetic oligonucleotide
cccacacctaggcacagctaggg

SEQ ID NO: 2205 - DNA, 23 bp, synthetic construct
  source 1..23: mol_type = other DNA; note = Description of Artificial Sequence: Synthetic oligonucleotide
accacaccttggtgcaaaggagg

SEQ ID NO: 2206 - DNA, 23 bp, synthetic construct
  source 1..23: mol_type = other DNA; note = Description of Artificial Sequence: Synthetic oligonucleotide
aatgcaccttggcatagtggggg

SEQ ID NO: 2207 - DNA, 23 bp, synthetic construct
  source 1..23: mol_type = other DNA; note = Description of Artificial Sequence: Synthetic oligonucleotide
gccgcaccttggcacaccagtgg

SEQ ID NO: 2208 - DNA, 22 bp, synthetic construct
  source 1..22: mol_type = other DNA; note = Description of Artificial Sequence: Synthetic oligonucleotide
cccacacctggcccagcggggc

SEQ ID NO: 2209 - DNA, 23 bp, synthetic construct
  source 1..23: mol_type = other DNA; note = Description of Artificial Sequence: Synthetic oligonucleotide
gtggcaccttggtgcagccaagg

SEQ ID NO: 2210 - DNA, 23 bp, synthetic construct
  source 1..23: mol_type = other DNA; note = Description of Artificial Sequence: Synthetic oligonucleotide
ccagcaccctagtgcagcgtggg

SEQ ID NO: 2211 - DNA, 22 bp, synthetic construct
  source 1..22: mol_type = other DNA; note = Description of Artificial Sequence: Synthetic oligonucleotide
cccacacatggagcagcagggg

SEQ ID NO: 2212 - DNA, 23 bp, synthetic construct
  source 1..23: mol_type = other DNA; note = Description of Artificial Sequence: Synthetic oligonucleotide
aagcaccttggcagcagctgagg

SEQ ID NO: 2213 - DNA, 23 bp, synthetic construct
  source 1..23: mol_type = other DNA; note = Description of Artificial Sequence: Synthetic oligonucleotide
tctgcaccttggcccagcgtaag

SEQ ID NO: 2214 - DNA, 22 bp, synthetic construct
  source 1..22: mol_type = other DNA; note = Description of Artificial Sequence: Synthetic oligonucleotide
cccgcacctggctcagcagtga

SEQ ID NO: 2215 - DNA, 22 bp, synthetic construct
  source 1..22: mol_type = other DNA; note = Description of Artificial Sequence: Synthetic oligonucleotide
cccgcactgggtgcagaggtgg

SEQ ID NO: 2216 - DNA, 22 bp, synthetic construct
  source 1..22: mol_type = other DNA; note = Description of Artificial Sequence: Synthetic oligonucleotide
cccgcactcggcgcagccatgg

SEQ ID NO: 2217 - DNA, 22 bp, synthetic construct
  source 1..22: mol_type = other DNA; note = Description of Artificial Sequence: Synthetic oligonucleotide
cccgcacccggcgtagcgacgg

SEQ ID NO: 2218 - DNA, 23 bp, synthetic construct
  source 1..23: mol_type = other DNA; note = Description of Artificial Sequence: Synthetic oligonucleotide
gctgcaccctgccgcagaggagg

SEQ ID NO: 2219 - DNA, 23 bp, synthetic construct
  source 1..23: mol_type = other DNA; note = Description of Artificial Sequence: Synthetic oligonucleotide
gagcaccttggcagcagctgagg

SEQ ID NO: 2220 - DNA, 22 bp, synthetic construct
  source 1..22: mol_type = other DNA; note = Description of Artificial Sequence: Synthetic oligonucleotide
cccgcacctggcgcagcgcccg

SEQ ID NO: 2221 - DNA, 23 bp, synthetic construct
  source 1..23: mol_type = other DNA; note = Description of Artificial Sequence: Synthetic oligonucleotide
atggcaccttggcacagcagagg

SEQ ID NO: 2222 - DNA, 23 bp, synthetic construct
  source 1..23: mol_type = other DNA; note = Description of Artificial Sequence: Synthetic oligonucleotide
gaggcaccatgacgcagcagtgg

SEQ ID NO: 2223 - DNA, 23 bp, synthetic construct
  source 1..23: mol_type = other DNA; note = Description of Artificial Sequence: Synthetic oligonucleotide
cccacaacctggcacagaggcgg

SEQ ID NO: 2224 - DNA, 23 bp, synthetic construct
  source 1..23: mol_type = other DNA; note = Description of Artificial Sequence: Synthetic oligonucleotide
tctgcaccatggtgcagctgagg

SEQ ID NO: 2225 - DNA, 22 bp, synthetic construct
  source 1..22: mol_type = other DNA; note = Description of Artificial Sequence: Synthetic oligonucleotide
accgcacctggcccagccaggg

SEQ ID NO: 2226 - DNA, 23 bp, synthetic construct
  source 1..23: mol_type = other DNA; note = Description of Artificial Sequence: Synthetic oligonucleotide
ccagcaccttggcacagagtagg

SEQ ID NO: 2227 - DNA, 22 bp, synthetic construct
  source 1..22: mol_type = other DNA; note = Description of Artificial Sequence: Synthetic oligonucleotide
cccgcagttggcccagctgagg

SEQ ID NO: 2228 - DNA, 23 bp, synthetic construct
  source 1..23: mol_type = other DNA; note = Description of Artificial Sequence: Synthetic oligonucleotide
ccagcacctttgtgcagtggagg

SEQ ID NO: 2229 - DNA, 23 bp, synthetic construct
  source 1..23: mol_type = other DNA; note = Description of Artificial Sequence: Synthetic oligonucleotide
ccagcaccaagacacagcagtgg

SEQ ID NO: 2230 - DNA, 23 bp, synthetic construct
  source 1..23: mol_type = other DNA; note = Description of Artificial Sequence: Synthetic oligonucleotide
ttagcatcttggtgcagaggtgg

SEQ ID NO: 2231 - RNA, 100 nt, synthetic construct; identical to SEQ ID NO: 253
  source 1..100: mol_type = other RNA
  modified_base 1: mod_base = OTHER; note = 2'-O-Methyl-guanosine phosphorothioate
  modified_base 2: mod_base = OTHER; note = 2'-O-Methyl-guanosine phosphorothioate
  modified_base 3: mod_base = OTHER; note = 2'-O-Methyl-uridine phosphorothioate
  modified_base 29: mod_base = OTHER; note = 2'-O-Methyl-guanosine
  modified_base 30: mod_base = OTHER; note = 2'-O-Methyl-cytidine
  modified_base 31: mod_base = OTHER; note = 2'-O-Methyl-uridine
  modified_base 32: mod_base = OTHER; note = 2'-O-Methyl-adenosine
  modified_base 33: mod_base = OTHER; note = 2'-O-Methyl-guanosine
  modified_base 34: mod_base = OTHER; note = 2'-O-Methyl-adenosine
  modified_base 35: mod_base = OTHER; note = 2'-O-Methyl-adenosine
  modified_base 36: mod_base = OTHER; note = 2'-O-Methyl-adenosine
  modified_base 37: mod_base = OTHER; note = 2'-O-Methyl-uridine
  modified_base 38: mod_base = OTHER; note = 2'-O-Methyl-adenosine
  modified_base 39: mod_base = OTHER; note = 2'-O-Methyl-guanosine
  modified_base 40: mod_base = OTHER; note = 2'-O-Methyl-cytidine
  modified_base 69: mod_base = OTHER; note = 2'-O-Methyl-adenosine
  modified_base 70: mod_base = OTHER; note = 2'-O-Methyl-cytidine
  modified_base 71: mod_base = OTHER; note = 2'-O-Methyl-uridine
  modified_base 72: mod_base = OTHER; note = 2'-O-Methyl-uridine
  modified_base 73: mod_base = OTHER; note = 2'-O-Methyl-guanosine
  modified_base 74: mod_base = OTHER; note = 2'-O-Methyl-adenosine
  modified_base 75: mod_base = OTHER; note = 2'-O-Methyl-adenosine
  modified_base 76: mod_base = OTHER; note = 2'-O-Methyl-adenosine
  modified_base 77: mod_base = OTHER; note = 2'-O-Methyl-adenosine
  modified_base 78: mod_base = OTHER; note = 2'-O-Methyl-adenosine
  modified_base 79: mod_base = OTHER; note = 2'-O-Methyl-guanosine
  modified_base 80: mod_base = OTHER; note = 2'-O-Methyl-uridine
  modified_base 81: mod_base = OTHER; note = 2'-O-Methyl-guanosine
  modified_base 82: mod_base = OTHER; note = 2'-O-Methyl-guanosine
  modified_base 83: mod_base = OTHER; note = 2'-O-Methyl-cytidine
  modified_base 84: mod_base = OTHER; note = 2'-O-Methyl-adenosine
  modified_base 85: mod_base = OTHER; note = 2'-O-Methyl-cytidine
  modified_base 86: mod_base = OTHER; note = 2'-O-Methyl-cytidine
  modified_base 87: mod_base = OTHER; note = 2'-O-Methyl-guanosine
  modified_base 88: mod_base = OTHER; note = 2'-O-Methyl-adenosine
  modified_base 89: mod_base = OTHER; note = 2'-O-Methyl-guanosine
  modified_base 90: mod_base = OTHER; note = 2'-O-Methyl-uridine
  modified_base 91: mod_base = OTHER; note = 2'-O-Methyl-cytidine
  modified_base 92: mod_base = OTHER; note = 2'-O-Methyl-guanosine
  modified_base 93: mod_base = OTHER; note = 2'-O-Methyl-guanosine
  modified_base 94: mod_base = OTHER; note = 2'-O-Methyl-uridine
  modified_base 95: mod_base = OTHER; note = 2'-O-Methyl-guanosine
  modified_base 96: mod_base = OTHER; note = 2'-O-Methyl-cytidine
  modified_base 97: mod_base = OTHER; note = 2'-O-Methyl-uridine phosphorothioate
  modified_base 98: mod_base = OTHER; note = 2'-O-Methyl-uridine phosphorothioate
  modified_base 99: mod_base = OTHER; note = 2'-O-Methyl-uridine phosphorothioate
  modified_base 100: mod_base = OTHER; note = 2'-O-Methyl-uridine

SEQ ID NO: 2232 - RNA, 101 nt, synthetic construct; identical to SEQ ID NO: 255
  source 1..101: mol_type = other RNA
  modified_base 1: mod_base = OTHER; note = guanosine phosphorothioate
  modified_base 2: mod_base = OTHER; note = guanosine phosphorothioate
  modified_base 3: mod_base = OTHER; note = uridine phosphorothioate
  modified_base 21: mod_base = OTHER; note = 2'-O-Methyl-guanosine
  modified_base 28: mod_base = OTHER; note = 2'-O-Methyl-adenosine
  modified_base 29: mod_base = OTHER; note = 2'-O-Methyl-guanosine
  modified_base 30: mod_base = OTHER; note = 2'-O-Methyl-cytidine
  modified_base 31: mod_base = OTHER; note = 2'-O-Methyl-uridine
  modified_base 32: mod_base = OTHER; note = 2'-O-Methyl-adenosine
  modified_base 33: mod_base = OTHER; note = 2'-O-Methyl-guanosine
  modified_base 34: mod_base = OTHER; note = 2'-O-Methyl-adenosine
  modified_base 35: mod_base = OTHER; note = 2'-O-Methyl-adenosine
  modified_base 36: mod_base = OTHER; note = 2'-O-Methyl-adenosine
  modified_base 37: mod_base = OTHER; note = 2'-O-Methyl-uridine
  modified_base 38: mod_base = OTHER; note = 2'-O-Methyl-adenosine
  modified_base 39: mod_base = OTHER; note = 2'-O-Methyl-guanosine
  modified_base 40: mod_base = OTHER; note = 2'-O-Methyl-cytidine
  modified_base 41: mod_base = OTHER; note = 2'-O-Methyl-adenosine
  modified_base 42: mod_base = OTHER; note = 2'-O-Methyl-adenosine
  modified_base 46: mod_base = OTHER; note = 2'-O-Methyl-adenosine
  modified_base 48: mod_base = OTHER; note = 2'-O-Methyl-adenosine
  modified_base 50: mod_base = OTHER; note = 2'-O-Methyl-uridine
  modified_base 52: mod_base = OTHER; note = 2'-O-Methyl-adenosine
  modified_base 53: mod_base = OTHER; note = 2'-O-Methyl-guanosine
  modified_base 54: mod_base = OTHER; note = 2'-O-Methyl-guanosine
  modified_base 55: mod_base = OTHER; note = 2'-O-Methyl-cytidine
  modified_base 56: mod_base = OTHER; note = 2'-O-Methyl-uridine
  modified_base 57: mod_base = OTHER; note = 2'-O-Methyl-adenosine
  modified_base 60: mod_base = OTHER; note = 2'-O-Methyl-cytidine
  modified_base 61: mod_base = OTHER; note = 2'-O-Methyl-cytidine
  modified_base 66: mod_base = OTHER; note = 2'-O-Methyl-uridine
  modified_base 67: mod_base = OTHER; note = 2'-O-Methyl-cytidine
  modified_base 70: mod_base = OTHER; note = 2'-O-Methyl-cytidine
  modified_base 71: mod_base = OTHER; note = 2'-O-Methyl-uridine
  modified_base 72: mod_base = OTHER; note = 2'-O-Methyl-uridine
  modified_base 73: mod_base = OTHER; note = 2'-O-Methyl-guanosine
  modified_base 74: mod_base = OTHER; note = 2'-O-Methyl-adenosine
  modified_base 75: mod_base = OTHER; note = 2'-O-Methyl-adenosine
  modified_base 76: mod_base = OTHER; note = 2'-O-Methyl-adenosine
  modified_base 77: mod_base = OTHER; note = 2'-O-Methyl-adenosine
  modified_base 78: mod_base = OTHER; note = 2'-O-Methyl-adenosine
  modified_base 79: mod_base = OTHER; note = 2'-O-Methyl-guanosine
  modified_base 80: mod_base = OTHER; note = 2'-O-Methyl-uridine
  modified_base 81: mod_base = OTHER; note = 2'-O-Methyl-guanosine
  modified_base 83: mod_base = OTHER; note = 2'-O-Methyl-cytidine
  modified_base 84: mod_base = OTHER; note = 2'-O-Methyl-adenosine
  modified_base 85: mod_base = OTHER; note = 2'-O-Methyl-cytidine
  modified_base 86: mod_base = OTHER; note = 2'-O-Methyl-cytidine
  modified_base 87: mod_base = OTHER; note = 2'-O-Methyl-guanosine
  modified_base 88: mod_base = OTHER; note = 2'-O-Methyl-adenosine
  modified_base 89: mod_base = OTHER; note = 2'-O-Methyl-guanosine
  modified_base 90: mod_base = OTHER; note = 2'-O-Methyl-uridine
  modified_base 91: mod_base = OTHER; note = 2'-O-Methyl-cytidine
  modified_base 92: mod_base = OTHER; note = 2'-O-Methyl-guanosine
  modified_base 93: mod_base = OTHER; note = 2'-O-Methyl-guanosine
  modified_base 94: mod_base = OTHER; note = 2'-O-Methyl-uridine
  modified_base 95: mod_base = OTHER; note = 2'-O-Methyl-guanosine
  modified_base 96: mod_base = OTHER; note = 2'-O-Methyl-cytidine
  modified_base 97: mod_base = OTHER; note = 2'-O-Methyl-uridine
  modified_base 98: mod_base = OTHER; note = 2'-O-Methyl-uridine
  modified_base 99: mod_base = OTHER; note = 2'-O-Methyl-uridine
  modified_base 100: mod_base = OTHER; note = 2'-O-Methyl-uridine
  modified_base 101: mod_base = OTHER; note = 2'-O-Methyl-uridine

SEQ ID NO: 2233 - RNA, 100 nt, synthetic construct; identical to SEQ ID NO: 253
  source 1..100: mol_type = other RNA
  modified_base 1: mod_base = OTHER; note = guanosine phosphorothioate
  modified_base 2: mod_base = OTHER; note = guanosine phosphorothioate
  modified_base 3: mod_base = OTHER; note = uridine phosphorothioate
  modified_base 21: mod_base = OTHER; note = 2'-O-Methyl-guanosine
  modified_base 28: mod_base = OTHER; note = 2'-O-Methyl-adenosine
  modified_base 29: mod_base = OTHER; note = 2'-O-Methyl-guanosine
  modified_base 30: mod_base = OTHER; note = 2'-O-Methyl-cytidine
  modified_base 31: mod_base = OTHER; note = 2'-O-Methyl-uridine
  modified_base 32: mod_base = OTHER; note = 2'-O-Methyl-adenosine
  modified_base 33: mod_base = OTHER; note = 2'-O-Methyl-guanosine
  modified_base 34: mod_base = OTHER; note = 2'-O-Methyl-adenosine
  modified_base 35: mod_base = OTHER; note = 2'-O-Methyl-adenosine
  modified_base 36: mod_base = OTHER; note = 2'-O-Methyl-adenosine
  modified_base 37: mod_base = OTHER; note = 2'-O-Methyl-uridine
  modified_base 38: mod_base = OTHER; note = 2'-O-Methyl-adenosine
  modified_base 39: mod_base = OTHER; note = 2'-O-Methyl-guanosine
  modified_base 40: mod_base = OTHER; note = 2'-O-Methyl-cytidine
  modified_base 41: mod_base = OTHER; note = 2'-O-Methyl-adenosine
  modified_base 42: mod_base = OTHER; note = 2'-O-Methyl-adenosine
  modified_base 46: mod_base = OTHER; note = 2'-O-Methyl-adenosine
  modified_base 48: mod_base = OTHER; note = 2'-O-Methyl-adenosine
  modified_base 50: mod_base = OTHER; note = 2'-O-Methyl-uridine
  modified_base 52: mod_base = OTHER; note = 2'-O-Methyl-adenosine
  modified_base 53: mod_base = OTHER; note = 2'-O-Methyl-guanosine
  modified_base 54: mod_base = OTHER; note = 2'-O-Methyl-guanosine
  modified_base 55: mod_base = OTHER; note = 2'-O-Methyl-cytidine
  modified_base 56: mod_base = OTHER; note = 2'-O-Methyl-uridine
  modified_base 57: mod_base = OTHER; note = 2'-O-Methyl-adenosine
  modified_base 60: mod_base = OTHER; note = 2'-O-Methyl-cytidine
  modified_base 61: mod_base = OTHER; note = 2'-O-Methyl-cytidine
  modified_base 66: mod_base = OTHER; note = 2'-O-Methyl-uridine
  modified_base 67: mod_base = OTHER; note = 2'-O-Methyl-cytidine
  modified_base 70: mod_base = OTHER; note = 2'-O-Methyl-cytidine
  modified_base 71: mod_base = OTHER; note = 2'-O-Methyl-uridine
  modified_base 72: mod_base = OTHER; note = 2'-O-Methyl-uridine
  modified_base 73: mod_base = OTHER; note = 2'-O-Methyl-guanosine
  modified_base 74: mod_base = OTHER; note = 2'-O-Methyl-adenosine
  modified_base 75: mod_base = OTHER; note = 2'-O-Methyl-adenosine
  modified_base 76: mod_base = OTHER; note = 2'-O-Methyl-adenosine
  modified_base 77: mod_base = OTHER; note = 2'-O-Methyl-adenosine
  modified_base 78: mod_base = OTHER; note = 2'-O-Methyl-adenosine
  modified_base 79: mod_base = OTHER; note = 2'-O-Methyl-guanosine
  modified_base 80: mod_base = OTHER; note = 2'-O-Methyl-uridine
  modified_base 81: mod_base = OTHER; note = 2'-O-Methyl-guanosine
  modified_base 83: mod_base = OTHER; note = 2'-O-Methyl-cytidine
  modified_base 84: mod_base = OTHER; note = 2'-O-Methyl-adenosine
  modified_base 85: mod_base = OTHER; note = 2'-O-Methyl-cytidine
  modified_base 86: mod_base = OTHER; note = 2'-O-Methyl-cytidine
  modified_base 87: mod_base = OTHER; note = 2'-O-Methyl-guanosine
  modified_base 88: mod_base = OTHER; note = 2'-O-Methyl-adenosine
  modified_base 89: mod_base = OTHER; note = 2'-O-Methyl-guanosine
  modified_base 90: mod_base = OTHER; note = 2'-O-Methyl-uridine
  modified_base 91: mod_base = OTHER; note = 2'-O-Methyl-cytidine
  modified_base 92: mod_base = OTHER; note = 2'-O-Methyl-guanosine
  modified_base 93: mod_base = OTHER; note = 2'-O-Methyl-guanosine
  modified_base 94: mod_base = OTHER; note = 2'-O-Methyl-uridine
  modified_base 95: mod_base = OTHER; note = 2'-O-Methyl-guanosine
  modified_base 96: mod_base = OTHER; note = 2'-O-Methyl-cytidine
  modified_base 97: mod_base = OTHER; note = 2'-O-Methyl-uridine phosphorothioate
  modified_base 98: mod_base = OTHER; note = 2'-O-Methyl-uridine phosphorothioate
  modified_base 99: mod_base = OTHER; note = 2'-O-Methyl-uridine phosphorothioate
  modified_base 100: mod_base = OTHER; note = 2'-O-Methyl-uridine

SEQ ID NO: 2234 - RNA, 100 nt, synthetic construct; identical to SEQ ID NO: 253
  source 1..100: mol_type = other RNA
  modified_base 1: mod_base = OTHER; note = 2'-O-Methyl-guanosine phosphorothioate
  modified_base 2: mod_base = OTHER; note = 2'-O-Methyl-guanosine phosphorothioate
  modified_base 3: mod_base = OTHER; note = 2'-O-Methyl-uridine phosphorothioate
  modified_base 21: mod_base = OTHER; note = 2'-O-Methyl-guanosine
  modified_base 28: mod_base = OTHER; note = 2'-O-Methyl-adenosine
  modified_base 29: mod_base = OTHER; note = 2'-O-Methyl-guanosine
  modified_base 30: mod_base = OTHER; note = 2'-O-Methyl-cytidine
  modified_base 31: mod_base = OTHER; note = 2'-O-Methyl-uridine
  modified_base 32: mod_base = OTHER; note = 2'-O-Methyl-adenosine
  modified_base 33: mod_base = OTHER; note = 2'-O-Methyl-guanosine
  modified_base 34: mod_base = OTHER; note = 2'-O-Methyl-adenosine
  modified_base 35: mod_base = OTHER; note = 2'-O-Methyl-adenosine
  modified_base 36: mod_base = OTHER; note = 2'-O-Methyl-adenosine
  modified_base 37: mod_base = OTHER; note = 2'-O-Methyl-uridine
  modified_base 38: mod_base = OTHER; note = 2'-O-Methyl-adenosine
  modified_base 39: mod_base = OTHER; note = 2'-O-Methyl-guanosine
  modified_base 40: mod_base = OTHER; note = 2'-O-Methyl-cytidine
  modified_base 41: mod_base = OTHER; note = 2'-O-Methyl-adenosine
  modified_base 42: mod_base = OTHER; note = 2'-O-Methyl-adenosine
  modified_base 46: mod_base = OTHER; note = 2'-O-Methyl-adenosine
  modified_base 48: mod_base = OTHER; note = 2'-O-Methyl-adenosine
  modified_base 50: mod_base = OTHER; note = 2'-O-Methyl-uridine
  modified_base 52: mod_base = OTHER; note = 2'-O-Methyl-adenosine
  modified_base 53: mod_base = OTHER; note = 2'-O-Methyl-guanosine
  modified_base 54: mod_base = OTHER; note = 2'-O-Methyl-guanosine
  modified_base 55: mod_base = OTHER; note = 2'-O-Methyl-cytidine
  modified_base 56: mod_base = OTHER; note = 2'-O-Methyl-uridine
  modified_base 57: mod_base = OTHER; note = 2'-O-Methyl-adenosine
  modified_base 60: mod_base = OTHER; note = 2'-O-Methyl-cytidine
  modified_base 61: mod_base = OTHER; note = 2'-O-Methyl-cytidine
  modified_base 66: mod_base = OTHER; note = 2'-O-Methyl-uridine
  modified_base 67: mod_base = OTHER; note = 2'-O-Methyl-cytidine
  modified_base 70: mod_base = OTHER; note = 2'-O-Methyl-cytidine
  modified_base 71: mod_base = OTHER; note = 2'-O-Methyl-uridine
  modified_base 72: mod_base = OTHER; note = 2'-O-Methyl-uridine
  modified_base 73: mod_base = OTHER; note = 2'-O-Methyl-guanosine
  modified_base 74: mod_base = OTHER; note = 2'-O-Methyl-adenosine
  modified_base 75: mod_base = OTHER; note = 2'-O-Methyl-adenosine
  modified_base 76: mod_base = OTHER; note = 2'-O-Methyl-adenosine
  modified_base 77: mod_base = OTHER; note = 2'-O-Methyl-adenosine
  modified_base 78: mod_base = OTHER; note = 2'-O-Methyl-adenosine
  modified_base 79: mod_base = OTHER; note = 2'-O-Methyl-guanosine
  modified_base 80: mod_base = OTHER; note = 2'-O-Methyl-uridine
  modified_base 81: mod_base = OTHER; note = 2'-O-Methyl-guanosine
  modified_base 83: mod_base = OTHER; note = 2'-O-Methyl-cytidine
  modified_base 84: mod_base = OTHER; note = 2'-O-Methyl-adenosine
  modified_base 85: mod_base = OTHER; note = 2'-O-Methyl-cytidine
  modified_base 86: mod_base = OTHER; note = 2'-O-Methyl-cytidine
  modified_base 87: mod_base = OTHER; note = 2'-O-Methyl-guanosine
  modified_base 88: mod_base = OTHER; note = 2'-O-Methyl-adenosine
  modified_base 89: mod_base = OTHER; note = 2'-O-Methyl-guanosine
  modified_base 90: mod_base = OTHER; note = 2'-O-Methyl-uridine
  modified_base 91: mod_base = OTHER; note = 2'-O-Methyl-cytidine
  modified_base 92: mod_base = OTHER; note = 2'-O-Methyl-guanosine
  modified_base 93: mod_base = OTHER; note = 2'-O-Methyl-guanosine
  modified_base 94: mod_base = OTHER; note = 2'-O-Methyl-uridine
  modified_base 95: mod_base = OTHER; note = 2'-O-Methyl-guanosine
  modified_base 96: mod_base = OTHER; note = 2'-O-Methyl-cytidine
  modified_base 97: mod_base = OTHER; note = 2'-O-Methyl-uridine phosphorothioate
  modified_base 98: mod_base = OTHER; note = 2'-O-Methyl-uridine phosphorothioate
  modified_base 99: mod_base = OTHER; note = 2'-O-Methyl-uridine phosphorothioate
  modified_base 100: mod_base = OTHER; note = 2'-O-Methyl-uridine

SEQ ID NO: 2235 - RNA, 100 nt, synthetic construct; identical to SEQ ID NO: 253
  source 1..100: mol_type = other RNA
  modified_base 1: mod_base = OTHER; note = 2'-O-Methyl-guanosine phosphorothioate
  modified_base 2: mod_base = OTHER; note = 2'-O-Methyl-guanosine phosphorothioate
  modified_base 3: mod_base = OTHER; note = 2'-O-Methyl-uridine phosphorothioate
  modified_base 97: mod_base = OTHER; note = uridine phosphorothioate
  modified_base 98: mod_base = OTHER; note = 2'-O-Methyl-uridine phosphorothioate
  modified_base 99: mod_base = OTHER; note = 2'-O-Methyl-uridine phosphorothioate
  modified_base 100: mod_base = OTHER; note = 2'-O-Methyl-uridine

SEQ ID NO: 2236 - RNA, 100 nt, synthetic construct; identical to SEQ ID NO: 55
  source 1..100: mol_type = other RNA
  modified_base 1: mod_base = OTHER; note = 2'-O-Methyl-cytidine phosphorothioate
  modified_base 2: mod_base = OTHER; note = 2'-O-Methyl-adenosine phosphorothioate
  modified_base 3: mod_base = OTHER; note = 2'-O-Methyl-guanosine phosphorothioate
  modified_base 29: mod_base = OTHER; note = 2'-O-Methyl-guanosine
  modified_base 30: mod_base = OTHER; note = 2'-O-Methyl-cytidine
  modified_base 31: mod_base = OTHER; note = 2'-O-Methyl-uridine
  modified_base 32: mod_base = OTHER; note = 2'-O-Methyl-adenosine
  modified_base 33: mod_base = OTHER; note = 2'-O-Methyl-guanosine
  modified_base 34: mod_base = OTHER; note = 2'-O-Methyl-adenosine
  modified_base 35: mod_base = OTHER; note = 2'-O-Methyl-adenosine
  modified_base 36: mod_base = OTHER; note = 2'-O-Methyl-adenosine
  modified_base 37: mod_base = OTHER; note = 2'-O-Methyl-uridine
  modified_base 38: mod_base = OTHER; note = 2'-O-Methyl-adenosine
  modified_base 39: mod_base = OTHER; note = 2'-O-Methyl-guanosine
  modified_base 40: mod_base = OTHER; note = 2'-O-Methyl-cytidine
  modified_base 69: mod_base = OTHER; note = 2'-O-Methyl-adenosine
  modified_base 70: mod_base = OTHER; note = 2'-O-Methyl-cytidine
  modified_base 71: mod_base = OTHER; note = 2'-O-Methyl-uridine
  modified_base 72: mod_base = OTHER; note = 2'-O-Methyl-uridine
  modified_base 73: mod_base = OTHER; note = 2'-O-Methyl-guanosine
  modified_base 74: mod_base = OTHER; note = 2'-O-Methyl-adenosine
  modified_base 75: mod_base = OTHER; note = 2'-O-Methyl-adenosine
  modified_base 76: mod_base = OTHER; note = 2'-O-Methyl-adenosine
  modified_base 77: mod_base = OTHER; note = 2'-O-Methyl-adenosine
  modified_base 78: mod_base = OTHER; note = 2'-O-Methyl-adenosine
  modified_base 79: mod_base = OTHER; note = 2'-O-Methyl-guanosine
  modified_base 80: mod_base = OTHER; note = 2'-O-Methyl-uridine
  modified_base 81: mod_base = OTHER; note = 2'-O-Methyl-guanosine
  modified_base 82: mod_base = OTHER; note = 2'-O-Methyl-guanosine
  modified_base 83: mod_base = OTHER; note = 2'-O-Methyl-cytidine
  modified_base 84: mod_base = OTHER; note = 2'-O-Methyl-adenosine
  modified_base 85: mod_base = OTHER; note = 2'-O-Methyl-cytidine
  modified_base 86: mod_base = OTHER; note = 2'-O-Methyl-cytidine
  modified_base 87: mod_base = OTHER; note = 2'-O-Methyl-guanosine
  modified_base 88: mod_base = OTHER; note = 2'-O-Methyl-adenosine
  modified_base 89: mod_base = OTHER; note = 2'-O-Methyl-guanosine
  modified_base 90: mod_base = OTHER; note = 2'-O-Methyl-uridine
  modified_base 91: mod_base = OTHER; note = 2'-O-Methyl-cytidine
  modified_base 92: mod_base = OTHER; note = 2'-O-Methyl-guanosine
  modified_base 93: mod_base = OTHER; note = 2'-O-Methyl-guanosine
  modified_base 94: mod_base = OTHER; note = 2'-O-Methyl-uridine
  modified_base 95: mod_base = OTHER; note = 2'-O-Methyl-guanosine
  modified_base 96: mod_base = OTHER; note = 2'-O-Methyl-cytidine
  modified_base 97: mod_base = OTHER; note = 2'-O-Methyl-uridine phosphorothioate
  modified_base 98: mod_base = OTHER; note = 2'-O-Methyl-uridine phosphorothioate
  modified_base 99: mod_base = OTHER; note = 2'-O-Methyl-uridine phosphorothioate
  modified_base 100: mod_base = OTHER; note = 2'-O-Methyl-uridine

SEQ ID NO: 2237 - RNA, 100 nt, synthetic construct; identical to SEQ ID NO: 55
  source 1..100: mol_type = other RNA
  modified_base 1: mod_base = OTHER; note = 2'-O-Methyl-cytidine phosphorothioate
  modified_base 2: mod_base = OTHER; note = 2'-O-Methyl-adenosine phosphorothioate
  modified_base 3: mod_base = OTHER; note = 2'-O-Methyl-guanosine phosphorothioate
  modified_base 97: mod_base = OTHER; note = uridine phosphorothioate
  modified_base 98: mod_base = OTHER; note = 2'-O-Methyl-uridine phosphorothioate
  modified_base 99: mod_base = OTHER; note = 2'-O-Methyl-uridine phosphorothioate
  modified_base 100: mod_base = OTHER; note = 2'-O-Methyl-uridine

SEQ ID NO: 2238 - RNA, 100 nt, synthetic construct; identical to SEQ ID NO: 55
  source 1..100: mol_type = other RNA
  modified_base 1: mod_base = OTHER; note = 2'-O-Methyl-cytidine phosphorothioate
  modified_base 2: mod_base = OTHER; note = 2'-O-Methyl-adenosine phosphorothioate
  modified_base 3: mod_base = OTHER; note = 2'-O-Methyl-guanosine phosphorothioate
  modified_base 21: mod_base = OTHER; note = 2'-O-Methyl-guanosine
  modified_base 28: mod_base = OTHER; note = 2'-O-Methyl-adenosine
  modified_base 29: mod_base = OTHER; note = 2'-O-Methyl-guanosine
  modified_base 30: mod_base = OTHER; note = 2'-O-Methyl-cytidine
  modified_base 31: mod_base = OTHER; note = 2'-O-Methyl-uridine
  modified_base 32: mod_base = OTHER; note = 2'-O-Methyl-adenosine
  modified_base 33: mod_base = OTHER; note = 2'-O-Methyl-guanosine
  modified_base 34: mod_base = OTHER; note = 2'-O-Methyl-adenosine
  modified_base 35: mod_base = OTHER; note = 2'-O-Methyl-adenosine
  modified_base 36: mod_base = OTHER; note = 2'-O-Methyl-adenosine
  modified_base 37: mod_base = OTHER; note = 2'-O-Methyl-uridine
  modified_base 38: mod_base = OTHER; note = 2'-O-Methyl-adenosine
  modified_base 39: mod_base = OTHER; note = 2'-O-Methyl-guanosine
  modified_base 40: mod_base = OTHER; note = 2'-O-Methyl-cytidine
  modified_base 41: mod_base = OTHER; note = 2'-O-Methyl-adenosine
  modified_base 42: mod_base = OTHER; note = 2'-O-Methyl-adenosine
  modified_base 46: mod_base = OTHER; note = 2'-O-Methyl-adenosine
  modified_base 48: mod_base = OTHER; note = 2'-O-Methyl-adenosine
  modified_base 50: mod_base = OTHER; note = 2'-O-Methyl-uridine
  modified_base 52: mod_base = OTHER; note = 2'-O-Methyl-adenosine
  modified_base 53: mod_base = OTHER; note = 2'-O-Methyl-guanosine
  modified_base 54: mod_base = OTHER; note = 2'-O-Methyl-guanosine
  modified_base 55: mod_base = OTHER; note = 2'-O-Methyl-cytidine
  modified_base 56: mod_base = OTHER; note = 2'-O-Methyl-uridine
  modified_base 57: mod_base = OTHER; note = 2'-O-Methyl-adenosine
  modified_base 60: mod_base = OTHER; note = 2'-O-Methyl-cytidine
  modified_base 61: mod_base = OTHER; note = 2'-O-Methyl-cytidine
  modified_base 66: mod_base = OTHER; note = 2'-O-Methyl-uridine
  modified_base 67: mod_base = OTHER; note = 2'-O-Methyl-cytidine
  modified_base 70: mod_base = OTHER; note = 2'-O-Methyl-cytidine
  modified_base 71: mod_base = OTHER; note = 2'-O-Methyl-uridine
  modified_base 72: mod_base = OTHER; note = 2'-O-Methyl-uridine
  modified_base 73: mod_base = OTHER; note = 2'-O-Methyl-guanosine
  modified_base 74: mod_base = OTHER; note = 2'-O-Methyl-adenosine
  modified_base 75: mod_base = OTHER; note = 2'-O-Methyl-adenosine
  modified_base 76: mod_base = OTHER; note = 2'-O-Methyl-adenosine
  modified_base 77: mod_base = OTHER; note = 2'-O-Methyl-adenosine
  modified_base 78: mod_base = OTHER; note = 2'-O-Methyl-adenosine
  modified_base 79: mod_base = OTHER; note = 2'-O-Methyl-guanosine
  modified_base 80: mod_base = OTHER; note = 2'-O-Methyl-uridine
  modified_base 81: mod_base = OTHER; note = 2'-O-Methyl-guanosine
  modified_base 83: mod_base = OTHER; note = 2'-O-Methyl-cytidine
  modified_base 84: mod_base = OTHER; note = 2'-O-Methyl-adenosine
  modified_base 85: mod_base = OTHER; note = 2'-O-Methyl-cytidine
  modified_base 86: mod_base = OTHER; note = 2'-O-Methyl-cytidine
  modified_base 87: mod_base = OTHER; note = 2'-O-Methyl-guanosine
  modified_base 88: mod_base = OTHER; note = 2'-O-Methyl-adenosine
  modified_base 89: mod_base = OTHER; note = 2'-O-Methyl-guanosine
  modified_base 90: mod_base = OTHER; note = 2'-O-Methyl-uridine
  modified_base 91: mod_base = OTHER; note = 2'-O-Methyl-cytidine
  modified_base 92: mod_base = OTHER; note = 2'-O-Methyl-guanosine
  modified_base 93: mod_base = OTHER; note = 2'-O-Methyl-guanosine
  modified_base 94: mod_base = OTHER; note = 2'-O-Methyl-uridine
  modified_base 95: mod_base = OTHER; note = 2'-O-Methyl-guanosine
  modified_base 96: mod_base = OTHER; note = 2'-O-Methyl-cytidine
  modified_base 97: mod_base = OTHER; note = 2'-O-Methyl-uridine phosphorothioate
  modified_base 98: mod_base = OTHER; note = 2'-O-Methyl-uridine phosphorothioate
  modified_base 99: mod_base = OTHER; note = 2'-O-Methyl-uridine phosphorothioate
  modified_base 100: mod_base = OTHER; note = 2'-O-Methyl-uridine

SEQ ID NO: 2239 - RNA, 100 nt, synthetic construct; identical to SEQ ID NO: 9
  source 1..100: mol_type = other RNA
  modified_base 1: mod_base = OTHER; note = 2'-O-Methyl-cytidine phosphorothioate
  modified_base 2: mod_base = OTHER; note = 2'-O-Methyl-cytidine phosphorothioate
  modified_base 3: mod_base = OTHER; note = 2'-O-Methyl-cytidine phosphorothioate
  modified_base 29: mod_base = OTHER; note = 2'-O-Methyl-guanosine
  modified_base 30: mod_base = OTHER; note = 2'-O-Methyl-cytidine
  modified_base 31: mod_base = OTHER; note = 2'-O-Methyl-uridine
  modified_base 32: mod_base = OTHER; note = 2'-O-Methyl-adenosine
  modified_base 33: mod_base = OTHER; note = 2'-O-Methyl-guanosine
  modified_base 34: mod_base = OTHER; note = 2'-O-Methyl-adenosine
  modified_base 35: mod_base = OTHER; note = 2'-O-Methyl-adenosine
  modified_base 36: mod_base = OTHER; note = 2'-O-Methyl-adenosine
  modified_base 37: mod_base = OTHER; note = 2'-O-Methyl-uridine
  modified_base 38: mod_base = OTHER; note = 2'-O-Methyl-adenosine
  modified_base 39: mod_base = OTHER; note = 2'-O-Methyl-guanosine
  modified_base 40: mod_base = OTHER; note = 2'-O-Methyl-cytidine
  modified_base 69: mod_base = OTHER; note = 2'-O-Methyl-adenosine
  modified_base 70: mod_base = OTHER; note = 2'-O-Methyl-cytidine
  modified_base 71: mod_base = OTHER; note = 2'-O-Methyl-uridine
  modified_base 72: mod_base = OTHER; note = 2'-O-Methyl-uridine
  modified_base 73: mod_base = OTHER; note = 2'-O-Methyl-guanosine
  modified_base 74: mod_base = OTHER; note = 2'-O-Methyl-adenosine
  modified_base 75: mod_base = OTHER; note = 2'-O-Methyl-adenosine
  modified_base 76: mod_base = OTHER; note = 2'-O-Methyl-adenosine
  modified_base 77: mod_base = OTHER; note = 2'-O-Methyl-adenosine
  modified_base 78: mod_base = OTHER; note = 2'-O-Methyl-adenosine
  modified_base 79: mod_base = OTHER; note = 2'-O-Methyl-guanosine
  modified_base 80: mod_base = OTHER; note = 2'-O-Methyl-uridine
  modified_base 81: mod_base = OTHER; note = 2'-O-Methyl-guanosine
  modified_base 82: mod_base = OTHER; note = 2'-O-Methyl-guanosine
  modified_base 83: mod_base = OTHER; note = 2'-O-Methyl-cytidine
  modified_base 84: mod_base = OTHER; note = 2'-O-Methyl-adenosine
  modified_base 85: mod_base = OTHER; note = 2'-O-Methyl-cytidine
  modified_base 86: mod_base = OTHER; note = 2'-O-Methyl-cytidine
  modified_base 87: mod_base = OTHER; note = 2'-O-Methyl-guanosine
  modified_base 88: mod_base = OTHER; note = 2'-O-Methyl-adenosine
  modified_base 89: mod_base = OTHER; note = 2'-O-Methyl-guanosine
  modified_base 90: mod_base = OTHER; note = 2'-O-Methyl-uridine
  modified_base 91: mod_base = OTHER; note = 2'-O-Methyl-cytidine
  modified_base 92: mod_base = OTHER; note = 2'-O-Methyl-guanosine
  modified_base 93: mod_base = OTHER; note = 2'-O-Methyl-guanosine
  modified_base 94: mod_base = OTHER; note = 2'-O-Methyl-uridine
  modified_base 95: mod_base = OTHER; note = 2'-O-Methyl-guanosine
  modified_base 96: mod_base = OTHER; note = 2'-O-Methyl-cytidine
  modified_base 97: mod_base = OTHER; note = 2'-O-Methyl-uridine phosphorothioate
  modified_base 98: mod_base = OTHER; note = 2'-O-Methyl-uridine phosphorothioate
  modified_base 99: mod_base = OTHER; note = 2'-O-Methyl-uridine phosphorothioate
  modified_base 100: mod_base = OTHER; note = 2'-O-Methyl-uridine

SEQ ID NO: 2240 - RNA, 100 nt, synthetic construct; identical to SEQ ID NO: 9
  source 1..100: mol_type = other RNA
  modified_base 1: mod_base = OTHER; note = 2'-O-Methyl-cytidine phosphorothioate
  modified_base 2: mod_base = OTHER; note = 2'-O-Methyl-cytidine phosphorothioate
  modified_base 3: mod_base = OTHER; note = 2'-O-Methyl-cytidine phosphorothioate
  modified_base 21: mod_base = OTHER; note = 2'-O-Methyl-guanosine
  modified_base 28: mod_base = OTHER; note = 2'-O-Methyl-adenosine
  modified_base 29: mod_base = OTHER; note = 2'-O-Methyl-guanosine
  modified_base 30: mod_base = OTHER; note = 2'-O-Methyl-cytidine
  modified_base 31: mod_base = OTHER; note = 2'-O-Methyl-uridine
  modified_base 32: mod_base = OTHER; note = 2'-O-Methyl-adenosine
  modified_base 33: mod_base = OTHER; note = 2'-O-Methyl-guanosine
  modified_base 34: mod_base = OTHER; note = 2'-O-Methyl-adenosine
  modified_base 35: mod_base = OTHER; note = 2'-O-Methyl-adenosine
  modified_base 36: mod_base = OTHER; note = 2'-O-Methyl-adenosine
  modified_base 37: mod_base = OTHER; note = 2'-O-Methyl-uridine
  modified_base 38: mod_base = OTHER; note = 2'-O-Methyl-adenosine
  modified_base 39: mod_base = OTHER; note = 2'-O-Methyl-guanosine
  modified_base 40: mod_base = OTHER; note = 2'-O-Methyl-cytidine
  modified_base 41: mod_base = OTHER; note = 2'-O-Methyl-adenosine
  modified_base 42: mod_base = OTHER; note = 2'-O-Methyl-adenosine
  modified_base 46: mod_base = OTHER; note = 2'-O-Methyl-adenosine
  modified_base 48: mod_base = OTHER; note = 2'-O-Methyl-adenosine
  modified_base 50: mod_base = OTHER; note = 2'-O-Methyl-uridine
  modified_base 52: mod_base = OTHER; note = 2'-O-Methyl-adenosine
  modified_base 53: mod_base = OTHER; note = 2'-O-Methyl-guanosine
  modified_base 54: mod_base = OTHER; note = 2'-O-Methyl-guanosine
  modified_base 55: mod_base = OTHER; note = 2'-O-Methyl-cytidine
  modified_base 56: mod_base = OTHER; note = 2'-O-Methyl-uridine
  modified_base 57: mod_base = OTHER; note = 2'-O-Methyl-adenosine
  modified_base 60: mod_base = OTHER; note = 2'-O-Methyl-cytidine
  modified_base 61: mod_base = OTHER; note = 2'-O-Methyl-cytidine
  modified_base 66: mod_base = OTHER; note = 2'-O-Methyl-uridine
  modified_base 67: mod_base = OTHER; note = 2'-O-Methyl-cytidine
  modified_base 70: mod_base = OTHER; note = 2'-O-Methyl-cytidine
  modified_base 71: mod_base = OTHER; note = 2'-O-Methyl-uridine
  modified_base 72: mod_base = OTHER; note = 2'-O-Methyl-uridine
  modified_base 73: mod_base = OTHER; note = 2'-O-Methyl-guanosine
  modified_base 74: mod_base = OTHER; note = 2'-O-Methyl-adenosine
  modified_base 75: mod_base = OTHER; note = 2'-O-Methyl-adenosine
  modified_base 76: mod_base = OTHER; note = 2'-O-Methyl-adenosine
  modified_base 77: mod_base = OTHER; note = 2'-O-Methyl-adenosine
  modified_base 78: mod_base = OTHER; note = 2'-O-Methyl-adenosine
  modified_base 79: mod_base = OTHER; note = 2'-O-Methyl-guanosine
  modified_base 80: mod_base = OTHER; note = 2'-O-Methyl-uridine
  modified_base 81: mod_base = OTHER; note = 2'-O-Methyl-guanosine
  modified_base 83: mod_base = OTHER; note = 2'-O-Methyl-cytidine
  modified_base 84: mod_base = OTHER; note = 2'-O-Methyl-adenosine
  modified_base 85: mod_base = OTHER; note = 2'-O-Methyl-cytidine
  modified_base 86: mod_base = OTHER; note = 2'-O-Methyl-cytidine
  modified_base 87: mod_base = OTHER; note = 2'-O-Methyl-guanosine
  modified_base 88: mod_base = OTHER; note = 2'-O-Methyl-adenosine
  modified_base 89: mod_base = OTHER; note = 2'-O-Methyl-guanosine
  modified_base 90: mod_base = OTHER; note = 2'-O-Methyl-uridine
  modified_base 91: mod_base = OTHER; note = 2'-O-Methyl-cytidine
  modified_base 92: mod_base = OTHER; note = 2'-O-Methyl-guanosine
  modified_base 93: mod_base = OTHER; note = 2'-O-Methyl-guanosine
  modified_base 94: mod_base = OTHER; note = 2'-O-Methyl-uridine
  modified_base 95: mod_base = OTHER; note = 2'-O-Methyl-guanosine
  modified_base 96: mod_base = OTHER; note = 2'-O-Methyl-cytidine
  modified_base 97: mod_base = OTHER; note = 2'-O-Methyl-uridine phosphorothioate
  modified_base 98: mod_base = OTHER; note = 2'-O-Methyl-uridine phosphorothioate
  modified_base 99: mod_base = OTHER; note = 2'-O-Methyl-uridine phosphorothioate
  modified_base 100: mod_base = OTHER; note = 2'-O-Methyl-uridine

SEQ ID NO: 2241 - RNA, 80 nt, synthetic construct; identical to SEQ ID NO: 57
  source 1..80: mol_type = other RNA
  modified_base 1: mod_base = OTHER; note = 2'-O-Methyl-guanosine
  modified_base 8: mod_base = OTHER; note = 2'-O-Methyl-adenosine
  modified_base 9: mod_base = OTHER; note = 2'-O-Methyl-guanosine
  modified_base 10: mod_base = OTHER; note = 2'-O-Methyl-cytidine
  modified_base 11: mod_base = OTHER; note = 2'-O-Methyl-uridine
  modified_base 12: mod_base = OTHER; note = 2'-O-Methyl-adenosine
  modified_base 13: mod_base = OTHER; note = 2'-O-Methyl-guanosine
  modified_base 14: mod_base = OTHER; note = 2'-O-Methyl-adenosine
  modified_base 15: mod_base = OTHER; note = 2'-O-Methyl-adenosine
  modified_base 16: mod_base = OTHER; note = 2'-O-Methyl-adenosine
  modified_base 17: mod_base = OTHER; note = 2'-O-Methyl-uridine
  modified_base 18: mod_base = OTHER; note = 2'-O-Methyl-adenosine
  modified_base 19: mod_base = OTHER; note = 2'-O-Methyl-guanosine
  modified_base 20: mod_base = OTHER; note = 2'-O-Methyl-cytidine
  modified_base 21: mod_base = OTHER; note = 2'-O-Methyl-adenosine
  modified_base 22: mod_base = OTHER; note = 2'-O-Methyl-adenosine
  modified_base 26: mod_base = OTHER; note = 2'-O-Methyl-adenosine
  modified_base 28: mod_base = OTHER; note = 2'-O-Methyl-adenosine
  modified_base 30: mod_base = OTHER; note = 2'-O-Methyl-uridine
  modified_base 32: mod_base = OTHER; note = 2'-O-Methyl-adenosine
  modified_base 33: mod_base = OTHER; note = 2'-O-Methyl-guanosine
  modified_base 34: mod_base = OTHER; note = 2'-O-Methyl-guanosine
  modified_base 35: mod_base = OTHER; note = 2'-O-Methyl-cytidine
  modified_base 36: mod_base = OTHER; note = 2'-O-Methyl-uridine
  modified_base 37: mod_base = OTHER; note = 2'-O-Methyl-adenosine
  modified_base 40: mod_base = OTHER; note = 2'-O-Methyl-cytidine
  modified_base 41: mod_base = OTHER; note = 2'-O-Methyl-cytidine
  modified_base 46: mod_base = OTHER; note = 2'-O-Methyl-uridine
  modified_base 47: mod_base = OTHER; note = 2'-O-Methyl-cytidine
  modified_base 50: mod_base = OTHER; note = 2'-O-Methyl-cytidine
  modified_base 51: mod_base = OTHER; note = 2'-O-Methyl-uridine
  modified_base 52: mod_base = OTHER; note = 2'-O-Methyl-uridine
  modified_base 53: mod_base = OTHER; note = 2'-O-Methyl-guanosine
  modified_base 54: mod_base = OTHER; note = 2'-O-Methyl-adenosine
  modified_base 55: mod_base = OTHER; note = 2'-O-Methyl-adenosine
  modified_base 56: mod_base = OTHER; note = 2'-O-Methyl-adenosine
  modified_base 57: mod_base = OTHER; note = 2'-O-Methyl-adenosine
  modified_base 58: mod_base = OTHER; note = 2'-O-Methyl-adenosine
  modified_base 59: mod_base = OTHER; note = 2'-O-Methyl-guanosine
  modified_base 60: mod_base = OTHER; note = 2'-O-Methyl-uridine
  modified_base 61: mod_base = OTHER; note = 2'-O-Methyl-guanosine
  modified_base 63: mod_base = OTHER; note = 2'-O-Methyl-cytidine
  modified_base 64: mod_base = OTHER; note = 2'-O-Methyl-adenosine
  modified_base 65: mod_base = OTHER; note = 2'-O-Methyl-cytidine
  modified_base 66: mod_base = OTHER; note = 2'-O-Methyl-cytidine
  modified_base 67: mod_base = OTHER; note = 2'-O-Methyl-guanosine
  modified_base 68: mod_base = OTHER; note = 2'-O-Methyl-adenosine
  modified_base 69: mod_base = OTHER; note = 2'-O-Methyl-guanosine
  modified_base 70: mod_base = OTHER; note = 2'-O-Methyl-uridine
  modified_base 71: mod_base = OTHER; note = 2'-O-Methyl-cytidine
  modified_base 72: mod_base = OTHER; note = 2'-O-Methyl-guanosine
  modified_base 73: mod_base = OTHER; note = 2'-O-Methyl-guanosine
  modified_base 74: mod_base = OTHER; note = 2'-O-Methyl-uridine
  modified_base 75: mod_base = OTHER; note = 2'-O-Methyl-guanosine
  modified_base 76: mod_base = OTHER; note = 2'-O-Methyl-cytidine
  modified_base 77: mod_base = OTHER; note = 2'-O-Methyl-uridine phosphorothioate
  modified_base 78: mod_base = OTHER; note = 2'-O-Methyl-uridine phosphorothioate
  modified_base 79: mod_base = OTHER; note = 2'-O-Methyl-uridine phosphorothioate
  modified_base 80: mod_base = OTHER; note = 2'-O-Methyl-uridine

SEQ ID NO: 2242 - RNA, 100 nt, synthetic construct; identical to SEQ ID NO: 59
  source 1..100: mol_type = other RNA
  modified_base 1: mod_base = OTHER; note = 2'-O-Methyl-adenosine phosphorothioate
  modified_base 2: mod_base = OTHER; note = 2'-O-Methyl-adenosine phosphorothioate
  modified_base 3: mod_base = OTHER; note = 2'-O-Methyl-guanosine phosphorothioate
  modified_base 21: mod_base = OTHER; note = 2'-O-Methyl-guanosine
  modified_base 28: mod_base = OTHER; note = 2'-O-Methyl-adenosine
  modified_base 29: mod_base = OTHER; note = 2'-O-Methyl-guanosine
  modified_base 30: mod_base = OTHER; note = 2'-O-Methyl-cytidine
  modified_base 31: mod_base = OTHER; note = 2'-O-Methyl-uridine
  modified_base 32: mod_base = OTHER; note = 2'-O-Methyl-adenosine
  modified_base 34: mod_base = OTHER; note = 2'-O-Methyl-adenosine
  modified_base 35: mod_base = OTHER; note = 2'-O-Methyl-adenosine
  modified_base 36: mod_base = OTHER; note = 2'-O-Methyl-adenosine
  modified_base 37: mod_base = OTHER; note = 2'-O-Methyl-uridine
  modified_base 38: mod_base = OTHER; note = 2'-O-Methyl-adenosine
  modified_base 39: mod_base = OTHER; note = 2'-O-Methyl-guanosine
  modified_base 40: mod_base = OTHER; note = 2'-O-Methyl-cytidine
  modified_base 41: mod_base = OTHER; note = 2'-O-Methyl-adenosine
  modified_base 42: mod_base = OTHER; note = 2'-O-Methyl-adenosine
  modified_base 46: mod_base = OTHER; note = 2'-O-Methyl-adenosine
  modified_base 48: mod_base = OTHER; note = 2'-O-Methyl-adenosine
  modified_base 50: mod_base = OTHER; note = 2'-O-Methyl-uridine
  modified_base 52: mod_base = OTHER; note = 2'-O-Methyl-adenosine
  modified_base 53: mod_base = OTHER; note = 2'-O-Methyl-guanosine
  modified_base 54: mod_base = OTHER; note = 2'-O-Methyl-guanosine
  modified_base 57: mod_base = OTHER; note = 2'-O-Methyl-adenosine
  modified_base 61: mod_base = OTHER; note = 2'-O-Methyl-cytidine
  modified_base 66: mod_base = OTHER; note = 2'-O-Methyl-uridine
  modified_base 67: mod_base = OTHER; note = 2'-O-Methyl-cytidine
  modified_base 70: mod_base = OTHER; note = 2'-O-Methyl-cytidine
  modified_base 71: mod_base = OTHER; note = 2'-O-Methyl-uridine
  modified_base 72: mod_base = OTHER; note = 2'-O-Methyl-uridine
  modified_base 74: mod_base = OTHER; note = 2'-O-Methyl-adenosine
  modified_base 75: mod_base = OTHER; note = 2'-O-Methyl-adenosine
  modified_base 76: mod_base = OTHER; note = 2'-O-Methyl-adenosine
  modified_base 77: mod_base = OTHER; note = 2'-O-Methyl-adenosine
  modified_base 78: mod_base = OTHER; note = 2'-O-Methyl-adenosine
  modified_base 79: mod_base = OTHER; note = 2'-O-Methyl-guanosine
  modified_base 80: mod_base = OTHER; note = 2'-O-Methyl-uridine
  modified_base 82: mod_base = OTHER; note = 2'-O-Methyl-guanosine
  modified_base 83: mod_base = OTHER; note = 2'-O-Methyl-cytidine
  modified_base 84: mod_base = OTHER; note = 2'-O-Methyl-adenosine
  modified_base 85: mod_base = OTHER; note = 2'-O-Methyl-cytidine
  modified_base 86: mod_base = OTHER; note = 2'-O-Methyl-cytidine
  modified_base 87: mod_base = OTHER; note = 2'-O-Methyl-guanosine
  modified_base 89: mod_base = OTHER; note = 2'-O-Methyl-guanosine
  modified_base 92: mod_base = OTHER; note = 2'-O-Methyl-guanosine
  modified_base 93: mod_base = OTHER; note = 2'-O-Methyl-guanosine
  modified_base 94: mod_base = OTHER; note = 2'-O-Methyl-uridine
  modified_base 95: mod_base = OTHER; note = 2'-O-Methyl-guanosine
  modified_base 96: mod_base = OTHER; note = 2'-O-Methyl-cytidine
  modified_base 97: mod_base = OTHER; note = 2'-O-Methyl-uridine phosphorothioate
  modified_base 98: mod_base = OTHER; note = 2'-O-Methyl-uridine phosphorothioate
  modified_base 99: mod_base = OTHER; note = 2'-O-Methyl-uridine phosphorothioate
  modified_base 100: mod_base = OTHER; note = 2'-O-Methyl-uridine

SEQ ID NO: 2243 - RNA, 100 nt, synthetic construct; identical to SEQ ID NO: 59
  source 1..100: mol_type = other RNA
  modified_base 1: mod_base = OTHER; note = 2'-O-Methyl-adenosine phosphorothioate
  modified_base 2: mod_base = OTHER; note = 2'-O-Methyl-adenosine phosphorothioate
  modified_base 3: mod_base = OTHER; note = 2'-O-Methyl-guanosine phosphorothioate
  modified_base 21: mod_base = OTHER; note = 2'-O-Methyl-guanosine
  modified_base 28: mod_base = OTHER; note = 2'-O-Methyl-adenosine
  modified_base 29: mod_base = OTHER; note = 2'-O-Methyl-guanosine
  modified_base 30: mod_base = OTHER; note = 2'-O-Methyl-cytidine
  modified_base 31: mod_base = OTHER; note = 2'-O-Methyl-uridine
  modified_base 32: mod_base = OTHER; note = 2'-O-Methyl-adenosine
  modified_base 33: mod_base = OTHER; note = 2'-O-Methyl-guanosine
  modified_base 34: mod_base = OTHER; note = 2'-O-Methyl-adenosine
  modified_base 35: mod_base = OTHER; note = 2'-O-Methyl-adenosine
  modified_base 36: mod_base = OTHER; note = 2'-O-Methyl-adenosine
  modified_base 37: mod_base = OTHER; note = 2'-O-Methyl-uridine
  modified_base 38: mod_base = OTHER; note = 2'-O-Methyl-adenosine
  modified_base 39: mod_base = OTHER; note = 2'-O-Methyl-guanosine
  modified_base 40: mod_base = OTHER; note = 2'-O-Methyl-cytidine
  modified_base 41: mod_base = OTHER; note = 2'-O-Methyl-adenosine
  modified_base 42: mod_base = OTHER; note = 2'-O-Methyl-adenosine
  modified_base 46: mod_base = OTHER; note = 2'-O-Methyl-adenosine
  modified_base 48: mod_base = OTHER; note = 2'-O-Methyl-adenosine
  modified_base 50: mod_base = OTHER; note = 2'-O-Methyl-uridine
  modified_base 52: mod_base = OTHER; note = 2'-O-Methyl-adenosine
  modified_base 53: mod_base = OTHER; note = 2'-O-Methyl-guanosine
  modified_base 54: mod_base = OTHER; note = 2'-O-Methyl-guanosine
  modified_base 55: mod_base = OTHER; note = 2'-O-Methyl-cytidine
  modified_base 56: mod_base = OTHER; note = 2'-O-Methyl-uridine
  modified_base 57: mod_base = OTHER; note = 2'-O-Methyl-adenosine
  modified_base 60: mod_base = OTHER; note = 2'-O-Methyl-cytidine
  modified_base 61: mod_base = OTHER; note = 2'-O-Methyl-cytidine
  modified_base 66: mod_base = OTHER; note = 2'-O-Methyl-uridine
  modified_base 67: mod_base = OTHER; note = 2'-O-Methyl-cytidine
  modified_base 70: mod_base = OTHER; note = 2'-O-Methyl-cytidine
  modified_base 71: mod_base = OTHER; note = 2'-O-Methyl-uridine
  modified_base 72: mod_base = OTHER; note = 2'-O-Methyl-uridine
  modified_base 73: mod_base = OTHER; note = 2'-O-Methyl-guanosine
  modified_base 74: mod_base = OTHER; note = 2'-O-Methyl-adenosine
  modified_base 75: mod_base = OTHER; note = 2'-O-Methyl-adenosine
  modified_base 76: mod_base = OTHER; note = 2'-O-Methyl-adenosine
  modified_base 77: mod_base = OTHER; note = 2'-O-Methyl-adenosine
  modified_base 78: mod_base = OTHER; note = 2'-O-Methyl-adenosine
  modified_base 79: mod_base = OTHER; note = 2'-O-Methyl-guanosine
  modified_base 80: mod_base = OTHER; note = 2'-O-Methyl-uridine
  modified_base 81: mod_base = OTHER; note = 2'-O-Methyl-guanosine
  modified_base 83: mod_base = OTHER; note = 2'-O-Methyl-cytidine
  modified_base 84: mod_base = OTHER; note = 2'-O-Methyl-adenosine
  modified_base 85: mod_base = OTHER; note = 2'-O-Methyl-cytidine
  modified_base 86: mod_base = OTHER; note = 2'-O-Methyl-cytidine
  modified_base 87: mod_base = OTHER; note = 2'-O-Methyl-guanosine
  modified_base 88: mod_base = OTHER; note = 2'-O-Methyl-adenosine
  modified_base 89: mod_base = OTHER; note = 2'-O-Methyl-guanosine
  modified_base 90: mod_base = OTHER; note = 2'-O-Methyl-uridine
  modified_base 91: mod_base = OTHER; note = 2'-O-Methyl-cytidine
  modified_base 92: mod_base = OTHER; note = 2'-O-Methyl-guanosine
  modified_base 93: mod_base = OTHER; note = 2'-O-Methyl-guanosine
  modified_base 94: mod_base = OTHER; note = 2'-O-Methyl-uridine
  modified_base 95: mod_base = OTHER; note = 2'-O-Methyl-guanosine
  modified_base 96: mod_base = OTHER; note = 2'-O-Methyl-cytidine
  modified_base 97: mod_base = OTHER; note = 2'-O-Methyl-uridine phosphorothioate
  modified_base 98: mod_base = OTHER; note = 2'-O-Methyl-uridine phosphorothioate
  modified_base 99: mod_base = OTHER; note = 2'-O-Methyl-uridine phosphorothioate
  modified_base 100: mod_base = OTHER; note = 2'-O-Methyl-uridine

SEQ ID NO: 2244 - RNA, 100 nt, synthetic construct; identical to SEQ ID NO: 257
  source 1..100: mol_type = other RNA
  modified_base 1: mod_base = OTHER; note = 2'-O-Methyl-adenosine phosphorothioate
  modified_base 2: mod_base = OTHER; note = 2'-O-Methyl-adenosine phosphorothioate
  modified_base 3: mod_base = OTHER; note = 2'-O-Methyl-guanosine phosphorothioate
  modified_base 21: mod_base = OTHER; note = 2'-O-Methyl-guanosine
  modified_base 28: mod_base = OTHER; note = 2'-O-Methyl-adenosine
  modified_base 29: mod_base = OTHER; note = 2'-O-Methyl-guanosine
  modified_base 30: mod_base = OTHER; note = 2'-O-Methyl-cytidine
  modified_base 31: mod_base = OTHER; note = 2'-O-Methyl-uridine
  modified_base 32: mod_base = OTHER; note = 2'-O-Methyl-adenosine
  modified_base 34: mod_base = OTHER; note = 2'-O-Methyl-adenosine
  modified_base 35: mod_base = OTHER; note = 2'-O-Methyl-adenosine
  modified_base 36: mod_base = OTHER; note = 2'-O-Methyl-adenosine
  modified_base 37: mod_base = OTHER; note = 2'-O-Methyl-uridine
  modified_base 38: mod_base = OTHER; note = 2'-O-Methyl-adenosine
  modified_base 39: mod_base = OTHER; note = 2'-O-Methyl-guanosine
  modified_base 40: mod_base = OTHER; note = 2'-O-Methyl-cytidine
  modified_base 41: mod_base = OTHER; note = 2'-O-Methyl-adenosine
  modified_base 42: mod_base = OTHER; note = 2'-O-Methyl-adenosine
  modified_base 46: mod_base = OTHER; note = 2'-O-Methyl-adenosine
  modified_base 48: mod_base = OTHER; note = 2'-O-Methyl-adenosine
  modified_base 50: mod_base = OTHER; note = 2'-O-Methyl-uridine
  modified_base 52: mod_base = OTHER; note = 2'-O-Methyl-adenosine
  modified_base 53: mod_base = OTHER; note = 2'-O-Methyl-guanosine
  modified_base 54: mod_base = OTHER; note = 2'-O-Methyl-guanosine
  modified_base 57: mod_base = OTHER; note = 2'-O-Methyl-adenosine
  modified_base 61: mod_base = OTHER; note = 2'-O-Methyl-cytidine
  modified_base 66: mod_base = OTHER; note = 2'-O-Methyl-uridine
  modified_base 67: mod_base = OTHER; note = 2'-O-Methyl-cytidine
  modified_base 70: mod_base = OTHER; note = 2'-O-Methyl-cytidine
  modified_base 71: mod_base = OTHER; note = 2'-O-Methyl-uridine
  modified_base 72: mod_base = OTHER; note = 2'-O-Methyl-uridine
  modified_base 74: mod_base = OTHER; note = 2'-O-Methyl-adenosine
  modified_base 75: mod_base = OTHER; note = 2'-O-Methyl-adenosine
  modified_base 76: mod_base = OTHER; note = 2'-O-Methyl-adenosine
  modified_base 77: mod_base = OTHER; note = 2'-O-Methyl-adenosine
  modified_base 78: mod_base = OTHER; note = 2'-O-Methyl-adenosine
  modified_base 79: mod_base = OTHER; note = 2'-O-Methyl-guanosine
  modified_base 80: mod_base = OTHER; note = 2'-O-Methyl-uridine
  modified_base 82: mod_base = OTHER; note = 2'-O-Methyl-guanosine
  modified_base 83: mod_base = OTHER; note = 2'-O-Methyl-cytidine
  modified_base 84: mod_base = OTHER; note = 2'-O-Methyl-adenosine
  modified_base 85: mod_base = OTHER; note = 2'-O-Methyl-cytidine
  modified_base 86: mod_base = OTHER; note = 2'-O-Methyl-cytidine
  modified_base 87: mod_base = OTHER; note = 2'-O-Methyl-guanosine
  modified_base 89: mod_base = OTHER; note = 2'-O-Methyl-guanosine
  modified_base 92: mod_base = OTHER; note = 2'-O-Methyl-guanosine
  modified_base 93: mod_base = OTHER; note = 2'-O-Methyl-guanosine
  modified_base 94: mod_base = OTHER; note = 2'-O-Methyl-uridine
  modified_base 95: mod_base = OTHER; note = 2'-O-Methyl-guanosine
  modified_base 96: mod_base = OTHER; note = 2'-O-Methyl-cytidine
  modified_base 97: mod_base = OTHER; note = 2'-O-Methyl-uridine phosphorothioate
  modified_base 98: mod_base = OTHER; note = 2'-O-Methyl-uridine phosphorothioate
  modified_base 99: mod_base = OTHER; note = 2'-O-Methyl-uridine phosphorothioate
  modified_base 100: mod_base = OTHER; note = 2'-O-Methyl-uridine

SEQ ID NO: 2245 - RNA, 100 nt, synthetic construct; identical to SEQ ID NO: 257
  source 1..100: mol_type = other RNA
  modified_base 1: mod_base = OTHER; note = 2'-O-Methyl-adenosine phosphorothioate
  modified_base 2: mod_base = OTHER; note = 2'-O-Methyl-adenosine phosphorothioate
  modified_base 3: mod_base = OTHER; note = 2'-O-Methyl-guanosine phosphorothioate
  modified_base 21: mod_base = OTHER; note = 2'-O-Methyl-guanosine
  modified_base 28: mod_base = OTHER; note = 2'-O-Methyl-adenosine
  modified_base 29: mod_base = OTHER; note = 2'-O-Methyl-guanosine
  modified_base 30: mod_base = OTHER; note = 2'-O-Methyl-cytidine
  modified_base 31: mod_base = OTHER; note = 2'-O-Methyl-uridine
  modified_base 32: mod_base = OTHER; note = 2'-O-Methyl-adenosine
  modified_base 33: mod_base = OTHER; note = 2'-O-Methyl-guanosine
  modified_base 34: mod_base = OTHER; note = 2'-O-Methyl-adenosine
  modified_base 35: mod_base = OTHER; note = 2'-O-Methyl-adenosine
  modified_base 36: mod_base = OTHER; note = 2'-O-Methyl-adenosine
  modified_base 37: mod_base = OTHER; note = 2'-O-Methyl-uridine
  modified_base 38: mod_base = OTHER; note = 2'-O-Methyl-adenosine
  modified_base 39: mod_base = OTHER; note = 2'-O-Methyl-guanosine
  modified_base 40: mod_base = OTHER; note = 2'-O-Methyl-cytidine
  modified_base 41: mod_base = OTHER; note = 2'-O-Methyl-adenosine
  modified_base 42: mod_base = OTHER; note = 2'-O-Methyl-adenosine
  modified_base 46: mod_base = OTHER; note = 2'-O-Methyl-adenosine
  modified_base 48: mod_base = OTHER; note = 2'-O-Methyl-adenosine
  modified_base 50: mod_base = OTHER; note = 2'-O-Methyl-uridine
  modified_base 52: mod_base = OTHER; note = 2'-O-Methyl-adenosine
  modified_base 53: mod_base = OTHER; note = 2'-O-Methyl-guanosine
  modified_base 54: mod_base = OTHER; note = 2'-O-Methyl-guanosine
  modified_base 55: mod_base = OTHER; note = 2'-O-Methyl-cytidine
  modified_base 56: mod_base = OTHER; note = 2'-O-Methyl-uridine
  modified_base 57: mod_base = OTHER; note = 2'-O-Methyl-adenosine
  modified_base 60: mod_base = OTHER; note = 2'-O-Methyl-cytidine
  modified_base 61: mod_base = OTHER; note = 2'-O-Methyl-cytidine
  modified_base 66: mod_base = OTHER; note = 2'-O-Methyl-uridine
  modified_base 67: mod_base = OTHER; note = 2'-O-Methyl-cytidine
  modified_base 70: mod_base = OTHER; note = 2'-O-Methyl-cytidine
  modified_base 71: mod_base = OTHER; note = 2'-O-Methyl-uridine
  modified_base 72: mod_base = OTHER; note = 2'-O-Methyl-uridine
  modified_base 73: mod_base = OTHER; note = 2'-O-Methyl-guanosine
  modified_base 74: mod_base = OTHER; note = 2'-O-Methyl-adenosine
  modified_base 75: mod_base = OTHER; note = 2'-O-Methyl-adenosine
  modified_base 76: mod_base = OTHER; note = 2'-O-Methyl-adenosine
  modified_base 77: mod_base = OTHER; note = 2'-O-Methyl-adenosine
  modified_base 78: mod_base = OTHER; note = 2'-O-Methyl-adenosine
  modified_base 79: mod_base = OTHER; note = 2'-O-Methyl-guanosine
  modified_base 80: mod_base = OTHER; note = 2'-O-Methyl-uridine
  modified_base 81: mod_base = OTHER; note = 2'-O-Methyl-guanosine
  modified_base 83: mod_base = OTHER; note = 2'-O-Methyl-cytidine
  modified_base 84: mod_base = OTHER; note = 2'-O-Methyl-adenosine
  modified_base 85: mod_base = OTHER; note = 2'-O-Methyl-cytidine
  modified_base 86: mod_base = OTHER; note = 2'-O-Methyl-cytidine
  modified_base 87: mod_base = OTHER; note = 2'-O-Methyl-guanosine
  modified_base 88: mod_base = OTHER; note = 2'-O-Methyl-adenosine
  modified_base 89: mod_base = OTHER; note = 2'-O-Methyl-guanosine
  modified_base 90: mod_base = OTHER; note = 2'-O-Methyl-uridine
  modified_base 91: mod_base = OTHER; note = 2'-O-Methyl-cytidine
  modified_base 92: mod_base = OTHER; note = 2'-O-Methyl-guanosine
  modified_base 93: mod_base = OTHER; note = 2'-O-Methyl-guanosine
  modified_base 94: mod_base = OTHER; note = 2'-O-Methyl-uridine
  modified_base 95: mod_base = OTHER; note = 2'-O-Methyl-guanosine
  modified_base 96: mod_base = OTHER; note = 2'-O-Methyl-cytidine
  modified_base 97: mod_base = OTHER; note = 2'-O-Methyl-uridine phosphorothioate
  modified_base 98: mod_base = OTHER; note = 2'-O-Methyl-uridine phosphorothioate
  modified_base 99: mod_base = OTHER; note = 2'-O-Methyl-uridine phosphorothioate
  modified_base 100: mod_base = OTHER; note = 2'-O-Methyl-uridine

SEQ ID NO: 2246 - RNA, 100 nt, synthetic construct; identical to SEQ ID NO: 253
  source 1..100: mol_type = other RNA
  modified_base 1: mod_base = OTHER; note = 2'-O-Methyl-guanosine phosphorothioate
  modified_base 2: mod_base = OTHER; note = 2'-O-Methyl-guanosine phosphorothioate
  modified_base 3: mod_base = OTHER; note = 2'-O-Methyl-uridine phosphorothioate
  modified_base 5: mod_base = OTHER; note = 2'-O-Methyl-cytidine
  modified_base 29: mod_base = OTHER; note = 2'-O-Methyl-guanosine
  modified_base 30: mod_base = OTHER; note = 2'-O-Methyl-cytidine
  modified_base 31: mod_base = OTHER; note = 2'-O-Methyl-uridine
  modified_base 32: mod_base = OTHER; note = 2'-O-Methyl-adenosine
  modified_base 33: mod_base = OTHER; note = 2'-O-Methyl-guanosine
  modified_base 34: mod_base = OTHER; note = 2'-O-Methyl-adenosine
  modified_base 35: mod_base = OTHER; note = 2'-O-Methyl-adenosine
  modified_base 36: mod_base = OTHER; note = 2'-O-Methyl-adenosine
  modified_base 37: mod_base = OTHER; note = 2'-O-Methyl-uridine
  modified_base 38: mod_base = OTHER; note = 2'-O-Methyl-adenosine
  modified_base 39: mod_base = OTHER; note = 2'-O-Methyl-guanosine
  modified_base 40: mod_base = OTHER; note = 2'-O-Methyl-cytidine
  modified_base 69: mod_base = OTHER; note = 2'-O-Methyl-adenosine
  modified_base 70: mod_base = OTHER; note = 2'-O-Methyl-cytidine
  modified_base 71: mod_base = OTHER; note = 2'-O-Methyl-uridine
  modified_base 72: mod_base = OTHER; note = 2'-O-Methyl-uridine
  modified_base 73: mod_base = OTHER; note = 2'-O-Methyl-guanosine
  modified_base 74: mod_base = OTHER; note = 2'-O-Methyl-adenosine
  modified_base 75: mod_base = OTHER; note = 2'-O-Methyl-adenosine
  modified_base 76: mod_base = OTHER; note = 2'-O-Methyl-adenosine
  modified_base 77: mod_base = OTHER; note = 2'-O-Methyl-adenosine
  modified_base 78: mod_base = OTHER; note = 2'-O-Methyl-adenosine
  modified_base 79: mod_base = OTHER; note = 2'-O-Methyl-guanosine
  modified_base 80: mod_base = OTHER; note = 2'-O-Methyl-uridine
  modified_base 81: mod_base = OTHER; note = 2'-O-Methyl-guanosine
  modified_base 82: mod_base = OTHER; note = 2'-O-Methyl-guanosine
  modified_base 83: mod_base = OTHER; note = 2'-O-Methyl-cytidine
  modified_base 84: mod_base = OTHER; note = 2'-O-Methyl-adenosine
  modified_base 85: mod_base = OTHER; note = 2'-O-Methyl-cytidine
  modified_base 86: mod_base = OTHER; note = 2'-O-Methyl-cytidine
  modified_base 87: mod_base = OTHER; note = 2'-O-Methyl-guanosine
  modified_base 88: mod_base = OTHER; note = 2'-O-Methyl-adenosine
  modified_base 89: mod_base = OTHER; note = 2'-O-Methyl-guanosine
  modified_base 90: mod_base = OTHER; note = 2'-O-Methyl-uridine
  modified_base 91: mod_base = OTHER; note = 2'-O-Methyl-cytidine
  modified_base 92: mod_base = OTHER; note = 2'-O-Methyl-guanosine
  modified_base 93: mod_base = OTHER; note = 2'-O-Methyl-guanosine
  modified_base 94: mod_base = OTHER; note = 2'-O-Methyl-uridine
  modified_base 95: mod_base = OTHER; note = 2'-O-Methyl-guanosine
  modified_base 96: mod_base = OTHER; note = 2'-O-Methyl-cytidine
  modified_base 97: mod_base = OTHER; note = 2'-O-Methyl-uridine phosphorothioate
  modified_base 98: mod_base = OTHER; note = 2'-O-Methyl-uridine phosphorothioate
  modified_base 99: mod_base = OTHER; note = 2'-O-Methyl-uridine phosphorothioate
  modified_base 100: mod_base = OTHER; note = 2'-O-Methyl-uridine

SEQ ID NO: 2247 - RNA, 100 nt, synthetic construct; identical to SEQ ID NO: 253
  source 1..100: mol_type = other RNA
  modified_base 1: mod_base = OTHER; note = 2'-O-Methyl-guanosine phosphorothioate
  modified_base 2: mod_base = OTHER; note = 2'-O-Methyl-guanosine phosphorothioate
  modified_base 3: mod_base = OTHER; note = 2'-O-Methyl-uridine phosphorothioate
  modified_base 11: mod_base = OTHER; note = 2'-O-Methyl-uridine
  modified_base 29: mod_base = OTHER; note = 2'-O-Methyl-guanosine
  modified_base 30: mod_base = OTHER; note = 2'-O-Methyl-cytidine
  modified_base 31: mod_base = OTHER; note = 2'-O-Methyl-uridine
  modified_base 32: mod_base = OTHER; note = 2'-O-Methyl-adenosine
  modified_base 33: mod_base = OTHER; note = 2'-O-Methyl-guanosine
  modified_base 34: mod_base = OTHER; note = 2'-O-Methyl-adenosine
  modified_base 35: mod_base = OTHER; note = 2'-O-Methyl-adenosine
  modified_base 36: mod_base = OTHER; note = 2'-O-Methyl-adenosine
  modified_base 37: mod_base = OTHER; note = 2'-O-Methyl-uridine
  modified_base 38: mod_base = OTHER; note = 2'-O-Methyl-adenosine
  modified_base 39: mod_base = OTHER; note = 2'-O-Methyl-guanosine
  modified_base 40: mod_base = OTHER; note = 2'-O-Methyl-cytidine
  modified_base 69: mod_base = OTHER; note = 2'-O-Methyl-adenosine
  modified_base 70: mod_base = OTHER; note = 2'-O-Methyl-cytidine
  modified_base 71: mod_base = OTHER; note = 2'-O-Methyl-uridine
  modified_base 72: mod_base = OTHER; note = 2'-O-Methyl-uridine
  modified_base 73: mod_base = OTHER; note = 2'-O-Methyl-guanosine
  modified_base 74: mod_base = OTHER; note = 2'-O-Methyl-adenosine
  modified_base 75: mod_base = OTHER; note = 2'-O-Methyl-adenosine
  modified_base 76: mod_base = OTHER; note = 2'-O-Methyl-adenosine
  modified_base 77: mod_base = OTHER; note = 2'-O-Methyl-adenosine
  modified_base 78: mod_base = OTHER; note = 2'-O-Methyl-adenosine
  modified_base 79: mod_base = OTHER; note = 2'-O-Methyl-guanosine
  modified_base 80: mod_base = OTHER; note = 2'-O-Methyl-uridine
  modified_base 81: mod_base = OTHER; note = 2'-O-Methyl-guanosine
  modified_base 82: mod_base = OTHER; note = 2'-O-Methyl-guanosine
  modified_base 83: mod_base = OTHER; note = 2'-O-Methyl-cytidine
  modified_base 84: mod_base = OTHER; note = 2'-O-Methyl-adenosine
  modified_base 85: mod_base = OTHER; note = 2'-O-Methyl-cytidine
  modified_base 86: mod_base = OTHER; note = 2'-O-Methyl-cytidine
  modified_base 87: mod_base = OTHER; note = 2'-O-Methyl-guanosine
  modified_base 88: mod_base = OTHER; note = 2'-O-Methyl-adenosine
  modified_base 89: mod_base = OTHER; note = 2'-O-Methyl-guanosine
  modified_base 90: mod_base = OTHER; note = 2'-O-Methyl-uridine
  modified_base 91: mod_base = OTHER; note = 2'-O-Methyl-cytidine
  modified_base 92: mod_base = OTHER; note = 2'-O-Methyl-guanosine
  modified_base 93: mod_base = OTHER; note = 2'-O-Methyl-guanosine
  modified_base 94: mod_base = OTHER; note = 2'-O-Methyl-uridine
  modified_base 95: mod_base = OTHER; note = 2'-O-Methyl-guanosine
  modified_base 96: mod_base = OTHER; note = 2'-O-Methyl-cytidine
  modified_base 97: mod_base = OTHER; note = 2'-O-Methyl-uridine phosphorothioate
  modified_base 98: mod_base = OTHER; note = 2'-O-Methyl-uridine phosphorothioate
  modified_base 99: mod_base = OTHER; note = 2'-O-Methyl-uridine phosphorothioate
  modified_base 100: mod_base = OTHER; note = 2'-O-Methyl-uridine

SEQ ID NO: 2248 - RNA, 100 nt, synthetic construct; identical to SEQ ID NO: 253
  source 1..100: mol_type = other RNA
  modified_base 1: mod_base = OTHER; note = 2'-O-Methyl-guanosine phosphorothioate
  modified_base 2: mod_base = OTHER; note = 2'-O-Methyl-guanosine phosphorothioate
  modified_base 3: mod_base = OTHER; note = 2'-O-Methyl-uridine phosphorothioate
  modified_base 5: mod_base = OTHER; note = cytidine phosphonoacetate
  modified_base 21: mod_base = OTHER; note = 2'-O-Methyl-guanosine
  modified_base 28: mod_base = OTHER; note = 2'-O-Methyl-adenosine
  modified_base 29: mod_base = OTHER; note = 2'-O-Methyl-guanosine
  modified_base 30: mod_base = OTHER; note = 2'-O-Methyl-cytidine
  modified_base 31: mod_base = OTHER; note = 2'-O-Methyl-uridine
  modified_base 32: mod_base = OTHER; note = 2'-O-Methyl-adenosine
  modified_base 33: mod_base = OTHER; note = 2'-O-Methyl-guanosine
  modified_base 34: mod_base = OTHER; note = 2'-O-Methyl-adenosine
  modified_base 35: mod_base = OTHER; note = 2'-O-Methyl-adenosine
  modified_base 36: mod_base = OTHER; note = 2'-O-Methyl-adenosine
  modified_base 37: mod_base = OTHER; note = 2'-O-Methyl-uridine
  modified_base 38: mod_base = OTHER; note = 2'-O-Methyl-adenosine
  modified_base 39: mod_base = OTHER; note = 2'-O-Methyl-guanosine
  modified_base 40: mod_base = OTHER; note = 2'-O-Methyl-cytidine
  modified_base 41: mod_base = OTHER; note = 2'-O-Methyl-adenosine
  modified_base 42: mod_base = OTHER; note = 2'-O-Methyl-adenosine
  modified_base 46: mod_base = OTHER; note = 2'-O-Methyl-adenosine
  modified_base 48: mod_base = OTHER; note = 2'-O-Methyl-adenosine
  modified_base 50: mod_base = OTHER; note = 2'-O-Methyl-uridine
  modified_base 52: mod_base = OTHER; note = 2'-O-Methyl-adenosine
  modified_base 53: mod_base = OTHER; note = 2'-O-Methyl-guanosine
  modified_base 54: mod_base = OTHER; note = 2'-O-Methyl-guanosine
  modified_base 55: mod_base = OTHER; note = 2'-O-Methyl-cytidine
  modified_base 56: mod_base = OTHER; note = 2'-O-Methyl-uridine
  modified_base 57: mod_base = OTHER; note = 2'-O-Methyl-adenosine
  modified_base 60: mod_base = OTHER; note = 2'-O-Methyl-cytidine
  modified_base 61: mod_base = OTHER; note = 2'-O-Methyl-cytidine
  modified_base 66: mod_base = OTHER; note = 2'-O-Methyl-uridine
  modified_base 67: mod_base = OTHER; note = 2'-O-Methyl-cytidine
  modified_base 70: mod_base = OTHER; note = 2'-O-Methyl-cytidine
  modified_base 71: mod_base = OTHER; note = 2'-O-Methyl-uridine
  modified_base 72: mod_base = OTHER; note = 2'-O-Methyl-uridine
  modified_base 73: mod_base = OTHER; note = 2'-O-Methyl-guanosine
  modified_base 74: mod_base = OTHER; note = 2'-O-Methyl-adenosine
  modified_base 75: mod_base = OTHER; note = 2'-O-Methyl-adenosine
  modified_base 76: mod_base = OTHER; note = 2'-O-Methyl-adenosine
  modified_base 77: mod_base = OTHER; note = 2'-O-Methyl-adenosine
  modified_base 78: mod_base = OTHER; note = 2'-O-Methyl-adenosine
  modified_base 79: mod_base = OTHER; note = 2'-O-Methyl-guanosine
  modified_base 80: mod_base = OTHER; note = 2'-O-Methyl-uridine
  modified_base 81: mod_base = OTHER; note = 2'-O-Methyl-guanosine
  modified_base 83: mod_base = OTHER; note = 2'-O-Methyl-cytidine
  modified_base 84: mod_base = OTHER; note = 2'-O-Methyl-adenosine
  modified_base 85: mod_base = OTHER; note = 2'-O-Methyl-cytidine
  modified_base 86: mod_base = OTHER; note = 2'-O-Methyl-cytidine
  modified_base 87: mod_base = OTHER; note = 2'-O-Methyl-guanosine
  modified_base 88: mod_base = OTHER; note = 2'-O-Methyl-adenosine
  modified_base 89: mod_base = OTHER; note = 2'-O-Methyl-guanosine
  modified_base 90: mod_base = OTHER; note = 2'-O-Methyl-uridine
  modified_base 91: mod_base = OTHER; note = 2'-O-Methyl-cytidine
  modified_base 92: mod_base = OTHER; note = 2'-O-Methyl-guanosine
  modified_base 93: mod_base = OTHER; note = 2'-O-Methyl-guanosine
  modified_base 94: mod_base = OTHER; note = 2'-O-Methyl-uridine
  modified_base 95: mod_base = OTHER; note = 2'-O-Methyl-guanosine
  modified_base 96: mod_base = OTHER; note = 2'-O-Methyl-cytidine
  modified_base 97: mod_base = OTHER; note = 2'-O-Methyl-uridine phosphorothioate
  modified_base 98: mod_base = OTHER; note = 2'-O-Methyl-uridine phosphorothioate
  modified_base 99: mod_base = OTHER; note = 2'-O-Methyl-uridine phosphorothioate
  modified_base 100: mod_base = OTHER; note = 2'-O-Methyl-uridine

SEQ ID NO: 2249 - RNA, 100 nt, synthetic construct; identical to SEQ ID NO: 253
  source 1..100: mol_type = other RNA
  modified_base 1: mod_base = OTHER; note = 2'-O-Methyl-guanosine phosphorothioate
  modified_base 2: mod_base = OTHER; note = 2'-O-Methyl-guanosine phosphorothioate
  modified_base 3: mod_base = OTHER; note = 2'-O-Methyl-uridine phosphorothioate
  modified_base 11: mod_base = OTHER; note = uridine phosphonoacetate
  modified_base 21: mod_base = OTHER; note = 2'-O-Methyl-guanosine
  modified_base 28: mod_base = OTHER; note = 2'-O-Methyl-adenosine
  modified_base 29: mod_base = OTHER; note = 2'-O-Methyl-guanosine
  modified_base 30: mod_base = OTHER; note = 2'-O-Methyl-cytidine
  modified_base 31: mod_base = OTHER; note = 2'-O-Methyl-uridine
  modified_base 32: mod_base = OTHER; note = 2'-O-Methyl-adenosine
  modified_base 33: mod_base = OTHER; note = 2'-O-Methyl-guanosine
  modified_base 34: mod_base = OTHER; note = 2'-O-Methyl-adenosine
  modified_base 35: mod_base = OTHER; note = 2'-O-Methyl-adenosine
  modified_base 36: mod_base = OTHER; note = 2'-O-Methyl-adenosine
  modified_base 37: mod_base = OTHER; note = 2'-O-Methyl-uridine
  modified_base 38: mod_base = OTHER; note = 2'-O-Methyl-adenosine
  modified_base 39: mod_base = OTHER; note = 2'-O-Methyl-guanosine
  modified_base 40: mod_base = OTHER; note = 2'-O-Methyl-cytidine
  modified_base 41: mod_base = OTHER; note = 2'-O-Methyl-adenosine
  modified_base 42: mod_base = OTHER; note = 2'-O-Methyl-adenosine
  modified_base 46: mod_base = OTHER; note = 2'-O-Methyl-adenosine
  modified_base 48: mod_base = OTHER; note = 2'-O-Methyl-adenosine
  modified_base 50: mod_base = OTHER; note = 2'-O-Methyl-uridine
  modified_base 52: mod_base = OTHER; note = 2'-O-Methyl-adenosine
  modified_base 53: mod_base = OTHER; note = 2'-O-Methyl-guanosine
  modified_base 54: mod_base = OTHER; note = 2'-O-Methyl-guanosine
  modified_base 55: mod_base = OTHER; note = 2'-O-Methyl-cytidine
  modified_base 56: mod_base = OTHER; note = 2'-O-Methyl-uridine
  modified_base 57: mod_base = OTHER; note = 2'-O-Methyl-adenosine
  modified_base 60: mod_base = OTHER; note = 2'-O-Methyl-cytidine
  modified_base 61: mod_base = OTHER; note = 2'-O-Methyl-cytidine
  modified_base 66: mod_base = OTHER; note = 2'-O-Methyl-uridine
  modified_base 67: mod_base = OTHER; note = 2'-O-Methyl-cytidine
  modified_base 70: mod_base = OTHER; note = 2'-O-Methyl-cytidine
  modified_base 71: mod_base = OTHER; note = 2'-O-Methyl-uridine
  modified_base 72: mod_base = OTHER; note = 2'-O-Methyl-uridine
  modified_base 73: mod_base = OTHER; note = 2'-O-Methyl-guanosine
  modified_base 74: mod_base = OTHER; note = 2'-O-Methyl-adenosine
  modified_base 75: mod_base = OTHER; note = 2'-O-Methyl-adenosine
  modified_base 76: mod_base = OTHER; note = 2'-O-Methyl-adenosine
  modified_base 77: mod_base = OTHER; note = 2'-O-Methyl-adenosine
  modified_base 78: mod_base = OTHER; note = 2'-O-Methyl-adenosine
  modified_base 79: mod_base = OTHER; note = 2'-O-Methyl-guanosine
  modified_base 80: mod_base = OTHER; note = 2'-O-Methyl-uridine
  modified_base 81: mod_base = OTHER; note = 2'-O-Methyl-guanosine
  modified_base 83: mod_base = OTHER; note = 2'-O-Methyl-cytidine
  modified_base 84: mod_base = OTHER; note = 2'-O-Methyl-adenosine
  modified_base 85: mod_base = OTHER; note = 2'-O-Methyl-cytidine
  modified_base 86: mod_base = OTHER; note = 2'-O-Methyl-cytidine
  modified_base 87: mod_base = OTHER; note = 2'-O-Methyl-guanosine
  modified_base 88: mod_base = OTHER; note = 2'-O-Methyl-adenosine
  modified_base 89: mod_base = OTHER; note = 2'-O-Methyl-guanosine
  modified_base 90: mod_base = OTHER; note = 2'-O-Methyl-uridine
  modified_base 91: mod_base = OTHER; note = 2'-O-Methyl-cytidine
  modified_base 92: mod_base = OTHER; note = 2'-O-Methyl-guanosine
  modified_base 93: mod_base = OTHER; note = 2'-O-Methyl-guanosine
  modified_base 94: mod_base = OTHER; note = 2'-O-Methyl-uridine
  modified_base 95: mod_base = OTHER; note = 2'-O-Methyl-guanosine
  modified_base 96: mod_base = OTHER; note = 2'-O-Methyl-cytidine
  modified_base 97: mod_base = OTHER; note = 2'-O-Methyl-uridine phosphorothioate
  modified_base 98: mod_base = OTHER; note = 2'-O-Methyl-uridine phosphorothioate
  modified_base 99: mod_base = OTHER; note = 2'-O-Methyl-uridine phosphorothioate
  modified_base 100: mod_base = OTHER; note = 2'-O-Methyl-uridine

SEQ ID NO: 2250 - RNA, 100 nt, synthetic construct; identical to SEQ ID NO: 421
  source 1..100: mol_type = other RNA
  modified_base 1: mod_base = OTHER; note = 2'-O-Methyl-cytidine phosphorothioate
  modified_base 2: mod_base = OTHER; note = 2'-O-Methyl-cytidine phosphorothioate
  modified_base 3: mod_base = OTHER; note = 2'-O-Methyl-cytidine phosphorothioate
  modified_base 21: mod_base = OTHER; note = 2'-O-Methyl-guanosine
  modified_base 28: mod_base = OTHER; note = 2'-O-Methyl-adenosine
  modified_base 29: mod_base = OTHER; note = 2'-O-Methyl-guanosine
  modified_base 30: mod_base = OTHER; note = 2'-O-Methyl-cytidine
  modified_base 31: mod_base = OTHER; note = 2'-O-Methyl-uridine
  modified_base 32: mod_base = OTHER; note = 2'-O-Methyl-adenosine
  modified_base 33: mod_base = OTHER; note = 2'-O-Methyl-guanosine
  modified_base 34: mod_base = OTHER; note = 2'-O-Methyl-adenosine
  modified_base 35: mod_base = OTHER; note = 2'-O-Methyl-adenosine
  modified_base 36: mod_base = OTHER; note = 2'-O-Methyl-adenosine
  modified_base 37: mod_base = OTHER; note = 2'-O-Methyl-uridine
  modified_base 38: mod_base = OTHER; note = 2'-O-Methyl-adenosine
  modified_base 39: mod_base = OTHER; note = 2'-O-Methyl-guanosine
  modified_base 40: mod_base = OTHER; note = 2'-O-Methyl-cytidine
  modified_base 41: mod_base = OTHER; note = 2'-O-Methyl-adenosine
  modified_base 42: mod_base = OTHER; note = 2'-O-Methyl-adenosine
  modified_base 46: mod_base = OTHER; note = 2'-O-Methyl-adenosine
  modified_base 48: mod_base = OTHER; note = 2'-O-Methyl-adenosine
  modified_base 50: mod_base = OTHER; note = 2'-O-Methyl-uridine
  modified_base 52: mod_base = OTHER; note = 2'-O-Methyl-adenosine
  modified_base 53: mod_base = OTHER; note = 2'-O-Methyl-guanosine
  modified_base 54: mod_base = OTHER; note = 2'-O-Methyl-guanosine
  modified_base 55: mod_base = OTHER; note = 2'-O-Methyl-cytidine
  modified_base 56: mod_base = OTHER; note = 2'-O-Methyl-uridine
  modified_base 57: mod_base = OTHER; note = 2'-O-Methyl-adenosine
  modified_base 60: mod_base = OTHER; note = 2'-O-Methyl-cytidine
  modified_base 61: mod_base = OTHER; note = 2'-O-Methyl-cytidine
  modified_base 66: mod_base = OTHER; note = 2'-O-Methyl-uridine
  modified_base 67: mod_base = OTHER; note = 2'-O-Methyl-cytidine
  modified_base 70: mod_base = OTHER; note = 2'-O-Methyl-cytidine
  modified_base 71: mod_base = OTHER; note = 2'-O-Methyl-uridine
  modified_base 72: mod_base = OTHER; note = 2'-O-Methyl-uridine
  modified_base 73: mod_base = OTHER; note = 2'-O-Methyl-guanosine
  modified_base 74: mod_base = OTHER; note = 2'-O-Methyl-adenosine
  modified_base 75: mod_base = OTHER; note = 2'-O-Methyl-adenosine
  modified_base 76: mod_base = OTHER; note = 2'-O-Methyl-adenosine
  modified_base 77: mod_base = OTHER; note = 2'-O-Methyl-adenosine
  modified_base 78: mod_base = OTHER; note = 2'-O-Methyl-adenosine
  modified_base 79: mod_base = OTHER; note = 2'-O-Methyl-guanosine
  modified_base 80: mod_base = OTHER; note = 2'-O-Methyl-uridine
  modified_base 81: mod_base = OTHER; note = 2'-O-Methyl-guanosine
  modified_base 83: mod_base = OTHER; note = 2'-O-Methyl-cytidine
  modified_base 84: mod_base = OTHER; note = 2'-O-Methyl-adenosine
  modified_base 85: mod_base = OTHER; note = 2'-O-Methyl-cytidine
  modified_base 86: mod_base = OTHER; note = 2'-O-Methyl-cytidine
  modified_base 87: mod_base = OTHER; note = 2'-O-Methyl-guanosine
  modified_base 88: mod_base = OTHER; note = 2'-O-Methyl-adenosine
  modified_base 89: mod_base = OTHER; note = 2'-O-Methyl-guanosine
  modified_base 90: mod_base = OTHER; note = 2'-O-Methyl-uridine
  modified_base 91: mod_base = OTHER; note = 2'-O-Methyl-cytidine
  modified_base 92: mod_base = OTHER; note = 2'-O-Methyl-guanosine
  modified_base 93: mod_base = OTHER; note = 2'-O-Methyl-guanosine
  modified_base 94: mod_base = OTHER; note = 2'-O-Methyl-uridine
  modified_base 95: mod_base = OTHER; note = 2'-O-Methyl-guanosine
  modified_base 96: mod_base = OTHER; note = 2'-O-Methyl-cytidine
  modified_base 97: mod_base = OTHER; note = 2'-O-Methyl-uridine phosphorothioate
  modified_base 98: mod_base = OTHER; note = 2'-O-Methyl-uridine phosphorothioate
  modified_base 99: mod_base = OTHER; note = 2'-O-Methyl-uridine phosphorothioate
  modified_base 100: mod_base = OTHER; note = 2'-O-Methyl-uridine

SEQ ID NO: 2251 - RNA, 100 nt, synthetic construct; identical to SEQ ID NO: 421
  source 1..100: mol_type = other RNA
  modified_base 1: mod_base = OTHER; note = 2'-O-Methyl-cytidine phosphorothioate
  modified_base 2: mod_base = OTHER; note = 2'-O-Methyl-cytidine phosphorothioate
  modified_base 3: mod_base = OTHER; note = 2'-O-Methyl-cytidine phosphorothioate
  modified_base 21: mod_base = OTHER; note = 2'-O-Methyl-guanosine
  modified_base 28: mod_base = OTHER; note = 2'-O-Methyl-adenosine
  modified_base 29: mod_base = OTHER; note = 2'-O-Methyl-guanosine
  modified_base 30: mod_base = OTHER; note = 2'-O-Methyl-cytidine
  modified_base 31: mod_base = OTHER; note = 2'-O-Methyl-uridine
  modified_base 32: mod_base = OTHER; note = 2'-O-Methyl-adenosine
  modified_base 34: mod_base = OTHER; note = 2'-O-Methyl-adenosine
  modified_base 35: mod_base = OTHER; note = 2'-O-Methyl-adenosine
  modified_base 36: mod_base = OTHER; note = 2'-O-Methyl-adenosine
  modified_base 37: mod_base = OTHER; note = 2'-O-Methyl-uridine
  modified_base 38: mod_base = OTHER; note = 2'-O-Methyl-adenosine
  modified_base 39: mod_base = OTHER; note = 2'-O-Methyl-guanosine
  modified_base 40: mod_base = OTHER; note = 2'-O-Methyl-cytidine
  modified_base 41: mod_base = OTHER; note = 2'-O-Methyl-adenosine
  modified_base 42: mod_base = OTHER; note = 2'-O-Methyl-adenosine
  modified_base 46: mod_base = OTHER; note = 2'-O-Methyl-adenosine
  modified_base 48: mod_base = OTHER; note = 2'-O-Methyl-adenosine
  modified_base 50: mod_base = OTHER; note = 2'-O-Methyl-uridine
  modified_base 52: mod_base = OTHER; note = 2'-O-Methyl-adenosine
  modified_base 53: mod_base = OTHER; note = 2'-O-Methyl-guanosine
  modified_base 54: mod_base = OTHER; note = 2'-O-Methyl-guanosine
  modified_base 55: mod_base = OTHER; note = 2'-O-Methyl-cytidine
  modified_base 56: mod_base = OTHER; note = 2'-O-Methyl-uridine
  modified_base 57: mod_base = OTHER; note = 2'-O-Methyl-adenosine
  modified_base 60: mod_base = OTHER; note = 2'-O-Methyl-cytidine
  modified_base 61: mod_base = OTHER; note = 2'-O-Methyl-cytidine
  modified_base 66: mod_base = OTHER; note = 2'-O-Methyl-uridine
  modified_base 67: mod_base = OTHER; note = 2'-O-Methyl-cytidine
  modified_base 70: mod_base = OTHER; note = 2'-O-Methyl-cytidine
  modified_base 71: mod_base = OTHER; note = 2'-O-Methyl-uridine
  modified_base 72: mod_base = OTHER; note = 2'-O-Methyl-uridine
  modified_base 74: mod_base = OTHER; note = 2'-O-Methyl-adenosine
  modified_base 75: mod_base = OTHER; note = 2'-O-Methyl-adenosine
  modified_base 76: mod_base = OTHER; note = 2'-O-Methyl-adenosine
  modified_base 77: mod_base = OTHER; note = 2'-O-Methyl-adenosine
  modified_base 78: mod_base = OTHER; note = 2'-O-Methyl-adenosine
  modified_base 79: mod_base = OTHER; note = 2'-O-Methyl-guanosine
  modified_base 80: mod_base = OTHER; note = 2'-O-Methyl-uridine
  modified_base 81: mod_base = OTHER; note = 2'-O-Methyl-guanosine
  modified_base 83: mod_base = OTHER; note = 2'-O-Methyl-cytidine
  modified_base 84: mod_base = OTHER; note = 2'-O-Methyl-adenosine
  modified_base 85: mod_base = OTHER; note = 2'-O-Methyl-cytidine
  modified_base 86: mod_base = OTHER; note = 2'-O-Methyl-cytidine
  modified_base 87: mod_base = OTHER; note = 2'-O-Methyl-guanosine
  modified_base 88: mod_base = OTHER; note = 2'-O-Methyl-adenosine
  modified_base 89: mod_base = OTHER; note = 2'-O-Methyl-guanosine
  modified_base 90: mod_base = OTHER; note = 2'-O-Methyl-uridine
  modified_base 91: mod_base = OTHER; note = 2'-O-Methyl-cytidine
  modified_base 92: mod_base = OTHER; note = 2'-O-Methyl-guanosine
  modified_base 93: mod_base = OTHER; note = 2'-O-Methyl-guanosine
  modified_base 94: mod_base = OTHER; note = 2'-O-Methyl-uridine
  modified_base 95: mod_base = OTHER; note = 2'-O-Methyl-guanosine
  modified_base 96: mod_base = OTHER; note = 2'-O-Methyl-cytidine
  modified_base 97: mod_base = OTHER; note = 2'-O-Methyl-uridine phosphorothioate
  modified_base 98: mod_base = OTHER; note = 2'-O-Methyl-uridine phosphorothioate
  modified_base 99: mod_base = OTHER; note = 2'-O-Methyl-uridine phosphorothioate
  modified_base 100: mod_base = OTHER; note = 2'-O-Methyl-uridine

SEQ ID NO: 2252 - RNA, 100 nt, synthetic construct; identical to SEQ ID NO: 422
  source 1..100: mol_type = other RNA
  modified_base 1: mod_base = OTHER; note = 2'-O-Methyl-guanosine phosphorothioate
  modified_base 2: mod_base = OTHER; note = 2'-O-Methyl-adenosine phosphorothioate
  modified_base 3: mod_base = OTHER; note = 2'-O-Methyl-guanosine phosphorothioate
  modified_base 21: mod_base = OTHER; note = 2'-O-Methyl-guanosine
  modified_base 28: mod_base = OTHER; note = 2'-O-Methyl-adenosine
  modified_base 29: mod_base = OTHER; note = 2'-O-Methyl-guanosine
  modified_base 30: mod_base = OTHER; note = 2'-O-Methyl-cytidine
  modified_base 31: mod_base = OTHER; note = 2'-O-Methyl-uridine
  modified_base 32: mod_base = OTHER; note = 2'-O-Methyl-adenosine
  modified_base 33: mod_base = OTHER; note = 2'-O-Methyl-guanosine
  modified_base 34: mod_base = OTHER; note = 2'-O-Methyl-adenosine
  modified_base 35: mod_base = OTHER; note = 2'-O-Methyl-adenosine
  modified_base 36: mod_base = OTHER; note = 2'-O-Methyl-adenosine
  modified_base 37: mod_base = OTHER; note = 2'-O-Methyl-uridine
  modified_base 38: mod_base = OTHER; note = 2'-O-Methyl-adenosine
  modified_base 39: mod_base = OTHER; note = 2'-O-Methyl-guanosine
  modified_base 40: mod_base = OTHER; note = 2'-O-Methyl-cytidine
  modified_base 41: mod_base = OTHER; note = 2'-O-Methyl-adenosine
  modified_base 42: mod_base = OTHER; note = 2'-O-Methyl-adenosine
  modified_base 46: mod_base = OTHER; note = 2'-O-Methyl-adenosine
  modified_base 48: mod_base = OTHER; note = 2'-O-Methyl-adenosine
  modified_base 50: mod_base = OTHER; note = 2'-O-Methyl-uridine
  modified_base 52: mod_base = OTHER; note = 2'-O-Methyl-adenosine
  modified_base 53: mod_base = OTHER; note = 2'-O-Methyl-guanosine
  modified_base 54: mod_base = OTHER; note = 2'-O-Methyl-guanosine
  modified_base 55: mod_base = OTHER; note = 2'-O-Methyl-cytidine
  modified_base 56: mod_base = OTHER; note = 2'-O-Methyl-uridine
  modified_base 57: mod_base = OTHER; note = 2'-O-Methyl-adenosine
  modified_base 60: mod_base = OTHER; note = 2'-O-Methyl-cytidine
  modified_base 61: mod_base = OTHER; note = 2'-O-Methyl-cytidine
  modified_base 66: mod_base = OTHER; note = 2'-O-Methyl-uridine
  modified_base 67: mod_base = OTHER; note = 2'-O-Methyl-cytidine
  modified_base 70: mod_base = OTHER; note = 2'-O-Methyl-cytidine
  modified_base 71: mod_base = OTHER; note = 2'-O-Methyl-uridine
  modified_base 72: mod_base = OTHER; note = 2'-O-Methyl-uridine
  modified_base 73: mod_base = OTHER; note = 2'-O-Methyl-guanosine
  modified_base 74: mod_base = OTHER; note = 2'-O-Methyl-adenosine
  modified_base 75: mod_base = OTHER; note = 2'-O-Methyl-adenosine
  modified_base 76: mod_base = OTHER; note = 2'-O-Methyl-adenosine
  modified_base 77: mod_base = OTHER; note = 2'-O-Methyl-adenosine
  modified_base 78: mod_base = OTHER; note = 2'-O-Methyl-adenosine
  modified_base 79: mod_base = OTHER; note = 2'-O-Methyl-guanosine
  modified_base 80: mod_base = OTHER; note = 2'-O-Methyl-uridine
  modified_base 81: mod_base = OTHER; note = 2'-O-Methyl-guanosine
  modified_base 83: mod_base = OTHER; note = 2'-O-Methyl-cytidine
  modified_base 84: mod_base = OTHER; note = 2'-O-Methyl-adenosine
  modified_base 85: mod_base = OTHER; note = 2'-O-Methyl-cytidine
  modified_base 86: mod_base = OTHER; note = 2'-O-Methyl-cytidine
  modified_base 87: mod_base = OTHER; note = 2'-O-Methyl-guanosine
  modified_base 88: mod_base = OTHER; note = 2'-O-Methyl-adenosine
  modified_base 89: mod_base = OTHER; note = 2'-O-Methyl-guanosine
  modified_base 90: mod_base = OTHER; note = 2'-O-Methyl-uridine
  modified_base 91: mod_base = OTHER; note = 2'-O-Methyl-cytidine
  modified_base 92: mod_base = OTHER; note = 2'-O-Methyl-guanosine
  modified_base 93: mod_base = OTHER; note = 2'-O-Methyl-guanosine
  modified_base 94: mod_base = OTHER; note = 2'-O-Methyl-uridine
  modified_base 95: mod_base = OTHER; note = 2'-O-Methyl-guanosine
  modified_base 96: mod_base = OTHER; note = 2'-O-Methyl-cytidine
  modified_base 97: mod_base = OTHER; note = 2'-O-Methyl-uridine phosphorothioate
  modified_base 98: mod_base = OTHER; note = 2'-O-Methyl-uridine phosphorothioate
  modified_base 99: mod_base = OTHER; note = 2'-O-Methyl-uridine phosphorothioate
  modified_base 100: mod_base = OTHER; note = 2'-O-Methyl-uridine

SEQ ID NO: 2253 - RNA, 100 nt, synthetic construct; identical to SEQ ID NO: 422
  source 1..100: mol_type = other RNA
  modified_base 1: mod_base = OTHER; note = 2'-O-Methyl-guanosine phosphorothioate
  modified_base 2: mod_base = OTHER; note = 2'-O-Methyl-adenosine phosphorothioate
  modified_base 3: mod_base = OTHER; note = 2'-O-Methyl-guanosine phosphorothioate
  modified_base 21: mod_base = OTHER; note = 2'-O-Methyl-guanosine
  modified_base 28: mod_base = OTHER; note = 2'-O-Methyl-adenosine
  modified_base 29: mod_base = OTHER; note = 2'-O-Methyl-guanosine
  modified_base 30: mod_base = OTHER; note = 2'-O-Methyl-cytidine
  modified_base 31: mod_base = OTHER; note = 2'-O-Methyl-uridine
  modified_base 32: mod_base = OTHER; note = 2'-O-Methyl-adenosine
  modified_base 34: mod_base = OTHER; note = 2'-O-Methyl-adenosine
  modified_base 35: mod_base = OTHER; note = 2'-O-Methyl-adenosine
  modified_base 36: mod_base = OTHER; note = 2'-O-Methyl-adenosine
  modified_base 37: mod_base = OTHER; note = 2'-O-Methyl-uridine
  modified_base 38: mod_base = OTHER; note = 2'-O-Methyl-adenosine
  modified_base 39: mod_base = OTHER; note = 2'-O-Methyl-guanosine
  modified_base 40: mod_base = OTHER; note = 2'-O-Methyl-cytidine
  modified_base 41: mod_base = OTHER; note = 2'-O-Methyl-adenosine
  modified_base 42: mod_base = OTHER; note = 2'-O-Methyl-adenosine
  modified_base 46: mod_base = OTHER; note = 2'-O-Methyl-adenosine
  modified_base 48: mod_base = OTHER; note = 2'-O-Methyl-adenosine
  modified_base 50: mod_base = OTHER; note = 2'-O-Methyl-uridine
  modified_base 52: mod_base = OTHER; note = 2'-O-Methyl-adenosine
  modified_base 53: mod_base = OTHER; note = 2'-O-Methyl-guanosine
  modified_base 54: mod_base = OTHER; note = 2'-O-Methyl-guanosine
  modified_base 55: mod_base = OTHER; note = 2'-O-Methyl-cytidine
  modified_base 56: mod_base = OTHER; note = 2'-O-Methyl-uridine
  modified_base 57: mod_base = OTHER; note = 2'-O-Methyl-adenosine
  modified_base 60: mod_base = OTHER; note = 2'-O-Methyl-cytidine
  modified_base 61: mod_base = OTHER; note = 2'-O-Methyl-cytidine
  modified_base 66: mod_base = OTHER; note = 2'-O-Methyl-uridine
  modified_base 67: mod_base = OTHER; note = 2'-O-Methyl-cytidine
  modified_base 70: mod_base = OTHER; note = 2'-O-Methyl-cytidine
  modified_base 71: mod_base = OTHER; note = 2'-O-Methyl-uridine
  modified_base 72: mod_base = OTHER; note = 2'-O-Methyl-uridine
  modified_base 74: mod_base = OTHER; note = 2'-O-Methyl-adenosine
  modified_base 75: mod_base = OTHER; note = 2'-O-Methyl-adenosine
  modified_base 76: mod_base = OTHER; note = 2'-O-Methyl-adenosine
  modified_base 77: mod_base = OTHER; note = 2'-O-Methyl-adenosine
  modified_base 78: mod_base = OTHER; note = 2'-O-Methyl-adenosine
  modified_base 79: mod_base = OTHER; note = 2'-O-Methyl-guanosine
  modified_base 80: mod_base = OTHER; note = 2'-O-Methyl-uridine
  modified_base 81: mod_base = OTHER; note = 2'-O-Methyl-guanosine
  modified_base 83: mod_base = OTHER; note = 2'-O-Methyl-cytidine
  modified_base 84: mod_base = OTHER; note = 2'-O-Methyl-adenosine
  modified_base 85: mod_base = OTHER; note = 2'-O-Methyl-cytidine
  modified_base 86: mod_base = OTHER; note = 2'-O-Methyl-cytidine
  modified_base 87: mod_base = OTHER; note = 2'-O-Methyl-guanosine
  modified_base 88: mod_base = OTHER; note = 2'-O-Methyl-adenosine
  modified_base 89: mod_base = OTHER; note = 2'-O-Methyl-guanosine
  modified_base 90: mod_base = OTHER; note = 2'-O-Methyl-uridine
  modified_base 91: mod_base = OTHER; note = 2'-O-Methyl-cytidine
  modified_base 92: mod_base = OTHER; note = 2'-O-Methyl-guanosine
  modified_base 93: mod_base = OTHER; note = 2'-O-Methyl-guanosine
  modified_base 94: mod_base = OTHER; note = 2'-O-Methyl-uridine
  modified_base 95: mod_base = OTHER; note = 2'-O-Methyl-guanosine
  modified_base 96: mod_base = OTHER; note = 2'-O-Methyl-cytidine
  modified_base 97: mod_base = OTHER; note = 2'-O-Methyl-uridine phosphorothioate
  modified_base 98: mod_base = OTHER; note = 2'-O-Methyl-uridine phosphorothioate
  modified_base 99: mod_base = OTHER; note = 2'-O-Methyl-uridine phosphorothioate
  modified_base 100: mod_base = OTHER; note = 2'-O-Methyl-uridine

SEQ ID NO: 2254 - RNA, 100 nt, synthetic construct; identical to SEQ ID NO: 9
  source 1..100: mol_type = other RNA
  modified_base 1: mod_base = OTHER; note = 2'-O-Methyl-cytidine phosphorothioate
  modified_base 2: mod_base = OTHER; note = 2'-O-Methyl-cytidine phosphorothioate
  modified_base 3: mod_base = OTHER; note = 2'-O-Methyl-cytidine phosphorothioate
  modified_base 97: mod_base = OTHER; note = uridine phosphorothioate
  modified_base 98: mod_base = OTHER; note = 2'-O-Methyl-uridine phosphorothioate
  modified_base 99: mod_base = OTHER; note = 2'-O-Methyl-uridine phosphorothioate
  modified_base 100: mod_base = OTHER; note = 2'-O-Methyl-uridine

SEQ ID NO: 2255 - RNA, 100 nt, synthetic construct; identical to SEQ ID NO: 257
  source 1..100: mol_type = other RNA
  modified_base 1: mod_base = OTHER; note = 2'-O-Methyl-adenosine phosphorothioate
  modified_base 2: mod_base = OTHER; note = 2'-O-Methyl-adenosine phosphorothioate
  modified_base 3: mod_base = OTHER; note = 2'-O-Methyl-guanosine phosphorothioate
  modified_base 97: mod_base = OTHER; note = uridine phosphorothioate
  modified_base 98: mod_base = OTHER; note = 2'-O-Methyl-uridine phosphorothioate
  modified_base 99: mod_base = OTHER; note = 2'-O-Methyl-uridine phosphorothioate
  modified_base 100: mod_base = OTHER; note = 2'-O-Methyl-uridine

SEQ ID NO: 2256 - RNA, 100 nt, synthetic construct; identical to SEQ ID NO: 9
  source 1..100: mol_type = other RNA
  modified_base 1: mod_base = OTHER; note = 2'-O-Methyl-cytidine phosphorothioate
  modified_base 2: mod_base = OTHER; note = 2'-O-Methyl-cytidine phosphorothioate
  modified_base 3: mod_base = OTHER; note = 2'-O-Methyl-cytidine phosphorothioate
  modified_base 21: mod_base = OTHER; note = 2'-O-Methyl-guanosine
  modified_base 28: mod_base = OTHER; note = 2'-O-Methyl-adenosine
  modified_base 29: mod_base = OTHER; note = 2'-O-Methyl-guanosine
  modified_base 30: mod_base = OTHER; note = 2'-O-Methyl-cytidine
  modified_base 31: mod_base = OTHER; note = 2'-O-Methyl-uridine
  modified_base 32: mod_base = OTHER; note = 2'-O-Methyl-adenosine
  modified_base 34: mod_base = OTHER; note = 2'-O-Methyl-adenosine
  modified_base 35: mod_base = OTHER; note = 2'-O-Methyl-adenosine
  modified_base 36: mod_base = OTHER; note = 2'-O-Methyl-adenosine
  modified_base 37: mod_base = OTHER; note = 2'-O-Methyl-uridine
  modified_base 38: mod_base = OTHER; note = 2'-O-Methyl-adenosine
  modified_base 39: mod_base = OTHER; note = 2'-O-Methyl-guanosine
  modified_base 40: mod_base = OTHER; note = 2'-O-Methyl-cytidine
  modified_base 41: mod_base = OTHER; note = 2'-O-Methyl-adenosine
  modified_base 42: mod_base = OTHER; note = 2'-O-Methyl-adenosine
  modified_base 46: mod_base = OTHER; note = 2'-O-Methyl-adenosine
  modified_base 48: mod_base = OTHER; note = 2'-O-Methyl-adenosine
  modified_base 50: mod_base = OTHER; note = 2'-O-Methyl-uridine
  modified_base 52: mod_base = OTHER; note = 2'-O-Methyl-adenosine
  modified_base 53: mod_base = OTHER; note = 2'-O-Methyl-guanosine
  modified_base 54: mod_base = OTHER; note = 2'-O-Methyl-guanosine
  modified_base 55: mod_base = OTHER; note = 2'-O-Methyl-cytidine
  modified_base 56: mod_base = OTHER; note = 2'-O-Methyl-uridine
  modified_base 57: mod_base = OTHER; note = 2'-O-Methyl-adenosine
  modified_base 60: mod_base = OTHER; note = 2'-O-Methyl-cytidine
  modified_base 61: mod_base = OTHER; note = 2'-O-Methyl-cytidine
  modified_base 66: mod_base = OTHER; note = 2'-O-Methyl-uridine
  modified_base 67: mod_base = OTHER; note = 2'-O-Methyl-cytidine
  modified_base 70: mod_base = OTHER; note = 2'-O-Methyl-cytidine
  modified_base 71: mod_base = OTHER; note = 2'-O-Methyl-uridine
  modified_base 72: mod_base = OTHER; note = 2'-O-Methyl-uridine
  modified_base 74: mod_base = OTHER; note = 2'-O-Methyl-adenosine
  modified_base 75: mod_base = OTHER; note = 2'-O-Methyl-adenosine
  modified_base 76: mod_base = OTHER; note = 2'-O-Methyl-adenosine
  modified_base 77: mod_base = OTHER; note = 2'-O-Methyl-adenosine
  modified_base 78: mod_base = OTHER; note = 2'-O-Methyl-adenosine
  modified_base 79: mod_base = OTHER; note = 2'-O-Methyl-guanosine
  modified_base 80: mod_base = OTHER; note = 2'-O-Methyl-uridine
  modified_base 81: mod_base = OTHER; note = 2'-O-Methyl-guanosine
  modified_base 83: mod_base = OTHER; note = 2'-O-Methyl-cytidine
  modified_base 84: mod_base = OTHER; note = 2'-O-Methyl-adenosine
  modified_base 85: mod_base = OTHER; note = 2'-O-Methyl-cytidine
  modified_base 86: mod_base = OTHER; note = 2'-O-Methyl-cytidine
  modified_base 87: mod_base = OTHER; note = 2'-O-Methyl-guanosine
  modified_base 88: mod_base = OTHER; note = 2'-O-Methyl-adenosine
  modified_base 89: mod_base = OTHER; note = 2'-O-Methyl-guanosine
  modified_base 90: mod_base = OTHER; note = 2'-O-Methyl-uridine
  modified_base 91: mod_base = OTHER; note = 2'-O-Methyl-cytidine
  modified_base 92: mod_base = OTHER; note = 2'-O-Methyl-guanosine
  modified_base 93: mod_base = OTHER; note = 2'-O-Methyl-guanosine
  modified_base 94: mod_base = OTHER; note = 2'-O-Methyl-uridine
  modified_base 95: mod_base = OTHER; note = 2'-O-Methyl-guanosine
  modified_base 96: mod_base = OTHER; note = 2'-O-Methyl-cytidine
  modified_base 97: mod_base = OTHER; note = 2'-O-Methyl-uridine phosphorothioate
  modified_base 98: mod_base = OTHER; note = 2'-O-Methyl-uridine phosphorothioate
  modified_base 99: mod_base = OTHER; note = 2'-O-Methyl-uridine phosphorothioate
  modified_base 100: mod_base = OTHER; note = 2'-O-Methyl-uridine

SEQ ID NO: 2257 - RNA, 100 nt, synthetic construct; identical to SEQ ID NO: 257
  source 1..100: mol_type = other RNA
  modified_base 1: mod_base = OTHER; note = 2'-O-Methyl-adenosine phosphorothioate
  modified_base 2: mod_base = OTHER; note = 2'-O-Methyl-adenosine phosphorothioate
  modified_base 3: mod_base = OTHER; note = 2'-O-Methyl-guanosine phosphorothioate
  modified_base 21: mod_base = OTHER; note = 2'-O-Methyl-guanosine
  modified_base 28: mod_base = OTHER; note = 2'-O-Methyl-adenosine
  modified_base 29: mod_base = OTHER; note = 2'-O-Methyl-guanosine
  modified_base 30: mod_base = OTHER; note = 2'-O-Methyl-cytidine
  modified_base 31: mod_base = OTHER; note = 2'-O-Methyl-uridine
  modified_base 32: mod_base = OTHER; note = 2'-O-Methyl-adenosine
  modified_base 34: mod_base = OTHER; note = 2'-O-Methyl-adenosine
  modified_base 35: mod_base = OTHER; note = 2'-O-Methyl-adenosine
  modified_base 36: mod_base = OTHER; note = 2'-O-Methyl-adenosine
  modified_base 37: mod_base = OTHER; note = 2'-O-Methyl-uridine
  modified_base 38: mod_base = OTHER; note = 2'-O-Methyl-adenosine
  modified_base 39: mod_base = OTHER; note = 2'-O-Methyl-guanosine
  modified_base 40: mod_base = OTHER; note = 2'-O-Methyl-cytidine
  modified_base 41: mod_base = OTHER; note = 2'-O-Methyl-adenosine
  modified_base 42: mod_base = OTHER; note = 2'-O-Methyl-adenosine
  modified_base 46: mod_base = OTHER; note = 2'-O-Methyl-adenosine
  modified_base 48: mod_base = OTHER; note = 2'-O-Methyl-adenosine
  modified_base 50: mod_base = OTHER; note = 2'-O-Methyl-uridine
  modified_base 52: mod_base = OTHER; note = 2'-O-Methyl-adenosine
  modified_base 53: mod_base = OTHER; note = 2'-O-Methyl-guanosine
  modified_base 54: mod_base = OTHER; note = 2'-O-Methyl-guanosine
  modified_base 55: mod_base = OTHER; note = 2'-O-Methyl-cytidine
  modified_base 56: mod_base = OTHER; note = 2'-O-Methyl-uridine
  modified_base 57: mod_base = OTHER; note = 2'-O-Methyl-adenosine
  modified_base 60: mod_base = OTHER; note = 2'-O-Methyl-cytidine
  modified_base 61: mod_base = OTHER; note = 2'-O-Methyl-cytidine
  modified_base 66: mod_base = OTHER; note = 2'-O-Methyl-uridine
  modified_base 67: mod_base = OTHER; note = 2'-O-Methyl-cytidine
  modified_base 70: mod_base = OTHER; note = 2'-O-Methyl-cytidine
  modified_base 71: mod_base = OTHER; note = 2'-O-Methyl-uridine
  modified_base 72: mod_base = OTHER; note = 2'-O-Methyl-uridine
  modified_base 74: mod_base = OTHER; note = 2'-O-Methyl-adenosine
  modified_base 75: mod_base = OTHER; note = 2'-O-Methyl-adenosine
  modified_base 76: mod_base = OTHER; note = 2'-O-Methyl-adenosine
  modified_base 77: mod_base = OTHER; note = 2'-O-Methyl-adenosine
  modified_base 78: mod_base = OTHER; note = 2'-O-Methyl-adenosine
  modified_base 79: mod_base = OTHER; note = 2'-O-Methyl-guanosine
  modified_base 80: mod_base = OTHER; note = 2'-O-Methyl-uridine
  modified_base 81: mod_base = OTHER; note = 2'-O-Methyl-guanosine
  modified_base 83: mod_base = OTHER; note = 2'-O-Methyl-cytidine
  modified_base 84: mod_base = OTHER; note = 2'-O-Methyl-adenosine
  modified_base 85: mod_base = OTHER; note = 2'-O-Methyl-cytidine
  modified_base 86: mod_base = OTHER; note = 2'-O-Methyl-cytidine
  modified_base 87: mod_base = OTHER; note = 2'-O-Methyl-guanosine
  modified_base 88: mod_base = OTHER; note = 2'-O-Methyl-adenosine
  modified_base 89: mod_base = OTHER; note = 2'-O-Methyl-guanosine
  modified_base 90: mod_base = OTHER; note = 2'-O-Methyl-uridine
  modified_base 91: mod_base = OTHER; note = 2'-O-Methyl-cytidine
  modified_base 92: mod_base = OTHER; note = 2'-O-Methyl-guanosine
  modified_base 93: mod_base = OTHER; note = 2'-O-Methyl-guanosine
  modified_base 94: mod_base = OTHER; note = 2'-O-Methyl-uridine
  modified_base 95: mod_base = OTHER; note = 2'-O-Methyl-guanosine
  modified_base 96: mod_base = OTHER; note = 2'-O-Methyl-cytidine
  modified_base 97: mod_base = OTHER; note = 2'-O-Methyl-uridine phosphorothioate
  modified_base 98: mod_base = OTHER; note = 2'-O-Methyl-uridine phosphorothioate
  modified_base 99: mod_base = OTHER; note = 2'-O-Methyl-uridine phosphorothioate
  modified_base 100: mod_base = OTHER; note = 2'-O-Methyl-uridine

SEQ ID NO: 2258 - RNA, 100 nt, synthetic construct; identical to SEQ ID NO: 422
  source 1..100: mol_type = other RNA
  modified_base 1: mod_base = OTHER; note = 2'-O-Methyl-guanosine phosphorothioate
  modified_base 2: mod_base = OTHER; note = 2'-O-Methyl-adenosine phosphorothioate
  modified_base 3: mod_base = OTHER; note = 2'-O-Methyl-guanosine phosphorothioate
  modified_base 29: mod_base = OTHER; note = 2'-O-Methyl-guanosine
  modified_base 30: mod_base = OTHER; note = 2'-O-Methyl-cytidine
  modified_base 31: mod_base = OTHER; note = 2'-O-Methyl-uridine
  modified_base 32: mod_base = OTHER; note = 2'-O-Methyl-adenosine
  modified_base 33: mod_base = OTHER; note = 2'-O-Methyl-guanosine
  modified_base 34: mod_base = OTHER; note = 2'-O-Methyl-adenosine
  modified_base 35: mod_base = OTHER; note = 2'-O-Methyl-adenosine
  modified_base 36: mod_base = OTHER; note = 2'-O-Methyl-adenosine
  modified_base 37: mod_base = OTHER; note = 2'-O-Methyl-uridine
  modified_base 38: mod_base = OTHER; note = 2'-O-Methyl-adenosine
  modified_base 39: mod_base = OTHER; note = 2'-O-Methyl-guanosine
  modified_base 40: mod_base = OTHER; note = 2'-O-Methyl-cytidine
  modified_base 69: mod_base = OTHER; note = 2'-O-Methyl-adenosine
  modified_base 70: mod_base = OTHER; note = 2'-O-Methyl-cytidine
  modified_base 71: mod_base = OTHER; note = 2'-O-Methyl-uridine
  modified_base 72: mod_base = OTHER; note = 2'-O-Methyl-uridine
  modified_base 73: mod_base = OTHER; note = 2'-O-Methyl-guanosine
  modified_base 74: mod_base = OTHER; note = 2'-O-Methyl-adenosine
  modified_base 75: mod_base = OTHER; note = 2'-O-Methyl-adenosine
  modified_base 76: mod_base = OTHER; note = 2'-O-Methyl-adenosine
  modified_base 77: mod_base = OTHER; note = 2'-O-Methyl-adenosine
  modified_base 78: mod_base = OTHER; note = 2'-O-Methyl-adenosine
  modified_base 79: mod_base = OTHER; note = 2'-O-Methyl-guanosine
  modified_base 80: mod_base = OTHER; note = 2'-O-Methyl-uridine
  modified_base 81: mod_base = OTHER; note = 2'-O-Methyl-guanosine
  modified_base 82: mod_base = OTHER; note = 2'-O-Methyl-guanosine
  modified_base 83: mod_base = OTHER; note = 2'-O-Methyl-cytidine
  modified_base 84: mod_base = OTHER; note = 2'-O-Methyl-adenosine
  modified_base 85: mod_base = OTHER; note = 2'-O-Methyl-cytidine
  modified_base 86: mod_base = OTHER; note = 2'-O-Methyl-cytidine
  modified_base 87: mod_base = OTHER; note = 2'-O-Methyl-guanosine
  modified_base 88: mod_base = OTHER; note = 2'-O-Methyl-adenosine
  modified_base 89: mod_base = OTHER; note = 2'-O-Methyl-guanosine
  modified_base 90: mod_base = OTHER; note = 2'-O-Methyl-uridine
  modified_base 91: mod_base = OTHER; note = 2'-O-Methyl-cytidine
  modified_base 92: mod_base = OTHER; note = 2'-O-Methyl-guanosine
  modified_base 93: mod_base = OTHER; note = 2'-O-Methyl-guanosine
  modified_base 94: mod_base = OTHER; note = 2'-O-Methyl-uridine
  modified_base 95: mod_base = OTHER; note = 2'-O-Methyl-guanosine
  modified_base 96: mod_base = OTHER; note = 2'-O-Methyl-cytidine
  modified_base 97: mod_base = OTHER; note = 2'-O-Methyl-uridine phosphorothioate
  modified_base 98: mod_base = OTHER; note = 2'-O-Methyl-uridine phosphorothioate
  modified_base 99: mod_base = OTHER; note = 2'-O-Methyl-uridine phosphorothioate
  modified_base 100: mod_base = OTHER; note = 2'-O-Methyl-uridine

SEQ ID NO: 2259 - RNA, 100 nt, synthetic construct; identical to SEQ ID NO: 422
  source 1..100: mol_type = other RNA
  modified_base 1: mod_base = OTHER; note = 2'-O-Methyl-guanosine phosphorothioate
  modified_base 2: mod_base = OTHER; note = 2'-O-Methyl-adenosine phosphorothioate
  modified_base 3: mod_base = OTHER; note = 2'-O-Methyl-guanosine phosphorothioate
  modified_base 97: mod_base = OTHER; note = uridine phosphorothioate
  modified_base 98: mod_base = OTHER; note = 2'-O-Methyl-uridine phosphorothioate
  modified_base 99: mod_base = OTHER; note = 2'-O-Methyl-uridine phosphorothioate
  modified_base 100: mod_base = OTHER; note = 2'-O-Methyl-uridine

SEQ ID NO: 2260 - RNA, 103 nt, synthetic construct; identical to SEQ ID NO: 11
  source 1..103: mol_type = other RNA
  modified_base 1: mod_base = OTHER; note = 2'-O-Methyl-cytidine phosphorothioate
  modified_base 2: mod_base = OTHER; note = 2'-O-Methyl-cytidine phosphorothioate
  modified_base 3: mod_base = OTHER; note = 2'-O-Methyl-cytidine phosphorothioate
  modified_base 21: mod_base = OTHER; note = 2'-O-Methyl-guanosine
  modified_base 28: mod_base = OTHER; note = 2'-O-Methyl-adenosine
  modified_base 29: mod_base = OTHER; note = 2'-O-Methyl-guanosine
  modified_base 30: mod_base = OTHER; note = 2'-O-Methyl-cytidine
  modified_base 31: mod_base = OTHER; note = 2'-O-Methyl-uridine
  modified_base 32: mod_base = OTHER; note = 2'-O-Methyl-adenosine
  modified_base 33: mod_base = OTHER; note = 2'-O-Methyl-guanosine
  modified_base 34: mod_base = OTHER; note = 2'-O-Methyl-adenosine
  modified_base 35: mod_base = OTHER; note = 2'-O-Methyl-adenosine
  modified_base 36: mod_base = OTHER; note = 2'-O-Methyl-adenosine
  modified_base 37: mod_base = OTHER; note = 2'-O-Methyl-uridine
  modified_base 38: mod_base = OTHER; note = 2'-O-Methyl-adenosine
  modified_base 39: mod_base = OTHER; note = 2'-O-Methyl-guanosine
  modified_base 40: mod_base = OTHER; note = 2'-O-Methyl-cytidine
  modified_base 41: mod_base = OTHER; note = 2'-O-Methyl-adenosine
  modified_base 42: mod_base = OTHER; note = 2'-O-Methyl-adenosine
  modified_base 46: mod_base = OTHER; note = 2'-O-Methyl-adenosine
  modified_base 48: mod_base = OTHER; note = 2'-O-Methyl-adenosine
  modified_base 50: mod_base = OTHER; note = 2'-O-Methyl-uridine
  modified_base 52: mod_base = OTHER; note = 2'-O-Methyl-adenosine
  modified_base 53: mod_base = OTHER; note = 2'-O-Methyl-guanosine
  modified_base 54: mod_base = OTHER; note = 2'-O-Methyl-guanosine
  modified_base 55: mod_base = OTHER; note = 2'-O-Methyl-cytidine
  modified_base 56: mod_base = OTHER; note = 2'-O-Methyl-uridine
  modified_base 57: mod_base = OTHER; note = 2'-O-Methyl-adenosine
  modified_base 60: mod_base = OTHER; note = 2'-O-Methyl-cytidine
  modified_base 61: mod_base = OTHER; note = 2'-O-Methyl-cytidine
  modified_base 66: mod_base = OTHER; note = 2'-O-Methyl-uridine
  modified_base 67: mod_base = OTHER; note = 2'-O-Methyl-cytidine
  modified_base 70: mod_base = OTHER; note = 2'-O-Methyl-cytidine
  modified_base 71: mod_base = OTHER; note = 2'-O-Methyl-uridine
  modified_base 72: mod_base = OTHER; note = 2'-O-Methyl-uridine
  modified_base 73: mod_base = OTHER; note = 2'-O-Methyl-guanosine
  modified_base 74: mod_base = OTHER; note = 2'-O-Methyl-adenosine
  modified_base 75: mod_base = OTHER; note = 2'-O-Methyl-adenosine
  modified_base 76: mod_base = OTHER; note = 2'-O-Methyl-adenosine
  modified_base 77: mod_base = OTHER; note = 2'-O-Methyl-adenosine
  modified_base 78: mod_base = OTHER; note = 2'-O-Methyl-adenosine
  modified_base 79: mod_base = OTHER; note = 2'-O-Methyl-guanosine
  modified_base 80: mod_base = OTHER; note = 2'-O-Methyl-uridine
  modified_base 81: mod_base = OTHER; note = 2'-O-Methyl-guanosine
  modified_base 83: mod_base = OTHER; note = 2'-O-Methyl-cytidine
  modified_base 84: mod_base = OTHER; note = 2'-O-Methyl-adenosine
  modified_base 85: mod_base = OTHER; note = 2'-O-Methyl-cytidine
  modified_base 86: mod_base = OTHER; note = 2'-O-Methyl-cytidine
  modified_base 87: mod_base = OTHER; note = 2'-O-Methyl-guanosine
  modified_base 88: mod_base = OTHER; note = 2'-O-Methyl-adenosine
  modified_base 89: mod_base = OTHER; note = 2'-O-Methyl-guanosine
  modified_base 90: mod_base = OTHER; note = 2'-O-Methyl-uridine
  modified_base 91: mod_base = OTHER; note = 2'-O-Methyl-cytidine
  modified_base 92: mod_base = OTHER; note = 2'-O-Methyl-guanosine
  modified_base 93: mod_base = OTHER; note = 2'-O-Methyl-guanosine
  modified_base 94: mod_base = OTHER; note = 2'-O-Methyl-uridine
  modified_base 95: mod_base = OTHER; note = 2'-O-Methyl-guanosine
  modified_base 96: mod_base = OTHER; note = 2'-O-Methyl-cytidine
  modified_base 97: mod_base = OTHER; note = 2'-O-Methyl-uridine phosphorothioate
  modified_base 98: mod_base = OTHER; note = 2'-O-Methyl-uridine phosphorothioate
  modified_base 99: mod_base = OTHER; note = 2'-O-Methyl-uridine phosphorothioate
  modified_base 100: mod_base = OTHER; note = 2'-O-Methyl-uridine
  modified_base 101: mod_base = OTHER; note = 2'-O-Methyl-uridine
  modified_base 103: mod_base = OTHER; note = 2'-O-Methyl-uridine

SEQ ID NO: 2261 - RNA, 100 nt, synthetic construct; identical to SEQ ID NO: 9
  source 1..100: mol_type = other RNA
  modified_base 1: mod_base = OTHER; note = 2'-O-Methyl-cytidine phosphorothioate
  modified_base 2: mod_base = OTHER; note = 2'-O-Methyl-cytidine phosphorothioate
  modified_base 3: mod_base = OTHER; note = 2'-O-Methyl-cytidine phosphorothioate
  modified_base 21: mod_base = OTHER; note = 2'-O-Methyl-guanosine
  modified_base 28: mod_base = OTHER; note = 2'-O-Methyl-adenosine
  modified_base 29: mod_base = OTHER; note = 2'-O-Methyl-guanosine
  modified_base 30: mod_base = OTHER; note = 2'-O-Methyl-cytidine
  modified_base 31: mod_base = OTHER; note = 2'-O-Methyl-uridine
  modified_base 32: mod_base = OTHER; note = 2'-O-Methyl-adenosine
  modified_base 33: mod_base = OTHER; note = 2'-O-Methyl-guanosine
  modified_base 34: mod_base = OTHER; note = 2'-O-Methyl-adenosine
  modified_base 35: mod_base = OTHER; note = 2'-O-Methyl-adenosine
  modified_base 36: mod_base = OTHER; note = 2'-O-Methyl-adenosine
  modified_base 37: mod_base = OTHER; note = 2'-O-Methyl-uridine
  modified_base 38: mod_base = OTHER; note = 2'-O-Methyl-adenosine
  modified_base 39: mod_base = OTHER; note = 2'-O-Methyl-guanosine
  modified_base 40: mod_base = OTHER; note = 2'-O-Methyl-cytidine
  modified_base 41: mod_base = OTHER; note = 2'-O-Methyl-adenosine
  modified_base 42: mod_base = OTHER; note = 2'-O-Methyl-adenosine
  modified_base 46: mod_base = OTHER; note = 2'-O-Methyl-adenosine
  modified_base 48: mod_base = OTHER; note = 2'-O-Methyl-adenosine
  modified_base 50: mod_base = OTHER; note = 2'-O-Methyl-uridine
  modified_base 52: mod_base = OTHER; note = 2'-O-Methyl-adenosine
  modified_base 53: mod_base = OTHER; note = 2'-O-Methyl-guanosine
  modified_base 54: mod_base = OTHER; note = 2'-O-Methyl-guanosine
  modified_base 55: mod_base = OTHER; note = 2'-O-Methyl-cytidine
  modified_base 56: mod_base = OTHER; note = 2'-O-Methyl-uridine
  modified_base 57: mod_base = OTHER; note = 2'-O-Methyl-adenosine
  modified_base 61: mod_base = OTHER; note = 2'-O-Methyl-cytidine
  modified_base 66: mod_base = OTHER; note = 2'-O-Methyl-uridine
  modified_base 67: mod_base = OTHER; note = 2'-O-Methyl-cytidine
  modified_base 70: mod_base = OTHER; note = 2'-O-Methyl-cytidine
  modified_base 71: mod_base = OTHER; note = 2'-O-Methyl-uridine
  modified_base 72: mod_base = OTHER; note = 2'-O-Methyl-uridine
  modified_base 73: mod_base = OTHER; note = 2'-O-Methyl-guanosine
  modified_base 74: mod_base = OTHER; note = 2'-O-Methyl-adenosine
  modified_base 75: mod_base = OTHER; note = 2'-O-Methyl-adenosine
  modified_base 76: mod_base = OTHER; note = 2'-O-Methyl-adenosine
  modified_base 77: mod_base = OTHER; note = 2'-O-Methyl-adenosine
  modified_base 78: mod_base = OTHER; note = 2'-O-Methyl-adenosine
  modified_base 79: mod_base = OTHER; note = 2'-O-Methyl-guanosine
  modified_base 80: mod_base = OTHER; note = 2'-O-Methyl-uridine
  modified_base 81: mod_base = OTHER; note = 2'-O-Methyl-guanosine
  modified_base 82: mod_base = OTHER; note = 2'-O-Methyl-guanosine
  modified_base 83: mod_base = OTHER; note = 2'-O-Methyl-cytidine
  modified_base 84: mod_base = OTHER; note = 2'-O-Methyl-adenosine
  modified_base 85: mod_base = OTHER; note = 2'-O-Methyl-cytidine
  modified_base 86: mod_base = OTHER; note = 2'-O-Methyl-cytidine
  modified_base 87: mod_base = OTHER; note = 2'-O-Methyl-guanosine
  modified_base 88: mod_base = OTHER; note = 2'-O-Methyl-adenosine
  modified_base 89: mod_base = OTHER; note = 2'-O-Methyl-guanosine
  modified_base 90: mod_base = OTHER; note = 2'-O-Methyl-uridine
  modified_base 91: mod_base = OTHER; note = 2'-O-Methyl-cytidine
  modified_base 92: mod_base = OTHER; note = 2'-O-Methyl-guanosine
  modified_base 93: mod_base = OTHER; note = 2'-O-Methyl-guanosine
  modified_base 94: mod_base = OTHER; note = 2'-O-Methyl-uridine
  modified_base 95: mod_base = OTHER; note = 2'-O-Methyl-guanosine
  modified_base 96: mod_base = OTHER; note = 2'-O-Methyl-cytidine
  modified_base 97: mod_base = OTHER; note = 2'-O-Methyl-uridine phosphorothioate
  modified_base 98: mod_base = OTHER; note = 2'-O-Methyl-uridine phosphorothioate
  modified_base 99: mod_base = OTHER; note = 2'-O-Methyl-uridine phosphorothioate
  modified_base 100: mod_base = OTHER; note = 2'-O-Methyl-uridine

SEQ ID NO: 2262 - RNA, 100 nt, synthetic construct; identical to SEQ ID NO: 9
  source 1..100: mol_type = other RNA
  modified_base 1: mod_base = OTHER; note = 2'-O-Methyl-cytidine phosphorothioate
  modified_base 2: mod_base = OTHER; note = 2'-O-Methyl-cytidine phosphorothioate
  modified_base 3: mod_base = OTHER; note = 2'-O-Methyl-cytidine phosphorothioate
  modified_base 21: mod_base = OTHER; note = 2'-O-Methyl-guanosine
  modified_base 28: mod_base = OTHER; note = 2'-O-Methyl-adenosine
  modified_base 29: mod_base = OTHER; note = 2'-O-Methyl-guanosine
  modified_base 30: mod_base = OTHER; note = 2'-O-Methyl-cytidine
  modified_base 31: mod_base = OTHER; note = 2'-O-Methyl-uridine
  modified_base 32: mod_base = OTHER; note = 2'-O-Methyl-adenosine
  modified_base 33: mod_base = OTHER; note = 2'-O-Methyl-guanosine
  modified_base 34: mod_base = OTHER; note = 2'-O-Methyl-adenosine
  modified_base 35: mod_base = OTHER; note = 2'-O-Methyl-adenosine
  modified_base 36: mod_base = OTHER; note = 2'-O-Methyl-adenosine
  modified_base 37: mod_base = OTHER; note = 2'-O-Methyl-uridine
  modified_base 38: mod_base = OTHER; note = 2'-O-Methyl-adenosine
  modified_base 39: mod_base = OTHER; note = 2'-O-Methyl-guanosine
  modified_base 40: mod_base = OTHER; note = 2'-O-Methyl-cytidine
  modified_base 41: mod_base = OTHER; note = 2'-O-Methyl-adenosine
  modified_base 42: mod_base = OTHER; note = 2'-O-Methyl-adenosine
  modified_base 46: mod_base = OTHER; note = 2'-O-Methyl-adenosine
  modified_base 48: mod_base = OTHER; note = 2'-O-Methyl-adenosine
  modified_base 50: mod_base = OTHER; note = 2'-O-Methyl-uridine
  modified_base 52: mod_base = OTHER; note = 2'-O-Methyl-adenosine
  modified_base 53: mod_base = OTHER; note = 2'-O-Methyl-guanosine
  modified_base 54: mod_base = OTHER; note = 2'-O-Methyl-guanosine
  modified_base 55: mod_base = OTHER; note = 2'-O-Methyl-cytidine
  modified_base 56: mod_base = OTHER; note = 2'-O-Methyl-uridine
  modified_base 57: mod_base = OTHER; note = 2'-O-Methyl-adenosine
  modified_base 59: mod_base = OTHER; note = 2'-O-Methyl-uridine
  modified_base 61: mod_base = OTHER; note = 2'-O-Methyl-cytidine
  modified_base 65: mod_base = OTHER; note = 2'-O-Methyl-adenosine
  modified_base 66: mod_base = OTHER; note = 2'-O-Methyl-uridine
  modified_base 67: mod_base = OTHER; note = 2'-O-Methyl-cytidine
  modified_base 70: mod_base = OTHER; note = 2'-O-Methyl-cytidine
  modified_base 71: mod_base = OTHER; note = 2'-O-Methyl-uridine
  modified_base 72: mod_base = OTHER; note = 2'-O-Methyl-uridine
  modified_base 73: mod_base = OTHER; note = 2'-O-Methyl-guanosine
  modified_base 74: mod_base = OTHER; note = 2'-O-Methyl-adenosine
  modified_base 75: mod_base = OTHER; note = 2'-O-Methyl-adenosine
  modified_base 76: mod_base = OTHER; note = 2'-O-Methyl-adenosine
  modified_base 77: mod_base = OTHER; note = 2'-O-Methyl-adenosine
  modified_base 78: mod_base = OTHER; note = 2'-O-Methyl-adenosine
  modified_base 79: mod_base = OTHER; note = 2'-O-Methyl-guanosine
  modified_base 80: mod_base = OTHER; note = 2'-O-Methyl-uridine
  modified_base 81: mod_base = OTHER; note = 2'-O-Methyl-guanosine
  modified_base 82: mod_base = OTHER; note = 2'-O-Methyl-guanosine
  modified_base 83: mod_base = OTHER; note = 2'-O-Methyl-cytidine
  modified_base 84: mod_base = OTHER; note = 2'-O-Methyl-adenosine
  modified_base 85: mod_base = OTHER; note = 2'-O-Methyl-cytidine
  modified_base 86: mod_base = OTHER; note = 2'-O-Methyl-cytidine
  modified_base 87: mod_base = OTHER; note = 2'-O-Methyl-guanosine
  modified_base 88: mod_base = OTHER; note = 2'-O-Methyl-adenosine
  modified_base 89: mod_base = OTHER; note = 2'-O-Methyl-guanosine
  modified_base 90: mod_base = OTHER; note = 2'-O-Methyl-uridine
  modified_base 91: mod_base = OTHER; note = 2'-O-Methyl-cytidine
  modified_base 92: mod_base = OTHER; note = 2'-O-Methyl-guanosine
  modified_base 93: mod_base = OTHER; note = 2'-O-Methyl-guanosine
  modified_base 94: mod_base = OTHER; note = 2'-O-Methyl-uridine
  modified_base 95: mod_base = OTHER; note = 2'-O-Methyl-guanosine
  modified_base 96: mod_base = OTHER; note = 2'-O-Methyl-cytidine
  modified_base 97: mod_base = OTHER; note = 2'-O-Methyl-uridine phosphorothioate
  modified_base 98: mod_base = OTHER; note = 2'-O-Methyl-uridine phosphorothioate
  modified_base 99: mod_base = OTHER; note = 2'-O-Methyl-uridine phosphorothioate
  modified_base 100: mod_base = OTHER; note = 2'-O-Methyl-uridine

SEQ ID NO: 2263 - RNA, 100 nt, synthetic construct; identical to SEQ ID NO: 59
  source 1..100: mol_type = other RNA
  modified_base 1: mod_base = OTHER; note = 2'-O-Methyl-adenosine phosphorothioate
  modified_base 2: mod_base = OTHER; note = 2'-O-Methyl-adenosine phosphorothioate
  modified_base 3: mod_base = OTHER; note = 2'-O-Methyl-guanosine phosphorothioate
  modified_base 21: mod_base = OTHER; note = 2'-O-Methyl-guanosine
  modified_base 28: mod_base = OTHER; note = 2'-O-Methyl-adenosine
  modified_base 29: mod_base = OTHER; note = 2'-O-Methyl-guanosine
  modified_base 30: mod_base = OTHER; note = 2'-O-Methyl-cytidine
  modified_base 31: mod_base = OTHER; note = 2'-O-Methyl-uridine
  modified_base 32: mod_base = OTHER; note = 2'-O-Methyl-adenosine
  modified_base 34: mod_base = OTHER; note = 2'-O-Methyl-adenosine
  modified_base 35: mod_base = OTHER; note = 2'-O-Methyl-adenosine
  modified_base 36: mod_base = OTHER; note = 2'-O-Methyl-adenosine
  modified_base 37: mod_base = OTHER; note = 2'-O-Methyl-uridine
  modified_base 38: mod_base = OTHER; note = 2'-O-Methyl-adenosine
  modified_base 39: mod_base = OTHER; note = 2'-O-Methyl-guanosine
  modified_base 40: mod_base = OTHER; note = 2'-O-Methyl-cytidine
  modified_base 41: mod_base = OTHER; note = 2'-O-Methyl-adenosine
  modified_base 42: mod_base = OTHER; note = 2'-O-Methyl-adenosine
  modified_base 46: mod_base = OTHER; note = 2'-O-Methyl-adenosine
  modified_base 48: mod_base = OTHER; note = 2'-O-Methyl-adenosine
  modified_base 50: mod_base = OTHER; note = 2'-O-Methyl-uridine
  modified_base 52: mod_base = OTHER; note = 2'-O-Methyl-adenosine
  modified_base 53: mod_base = OTHER; note = 2'-O-Methyl-guanosine
  modified_base 54: mod_base = OTHER; note = 2'-O-Methyl-guanosine
  modified_base 55: mod_base = OTHER; note = 2'-O-Methyl-cytidine
  modified_base 56: mod_base = OTHER; note = 2'-O-Methyl-uridine
  modified_base 57: mod_base = OTHER; note = 2'-O-Methyl-adenosine
  modified_base 60: mod_base = OTHER; note = 2'-O-Methyl-cytidine
  modified_base 61: mod_base = OTHER; note = 2'-O-Methyl-cytidine
  modified_base 66: mod_base = OTHER; note = 2'-O-Methyl-uridine
  modified_base 67: mod_base = OTHER; note = 2'-O-Methyl-cytidine
  modified_base 70: mod_base = OTHER; note = 2'-O-Methyl-cytidine
  modified_base 71: mod_base = OTHER; note = 2'-O-Methyl-uridine
  modified_base 72: mod_base = OTHER; note = 2'-O-Methyl-uridine
  modified_base 74: mod_base = OTHER; note = 2'-O-Methyl-adenosine
  modified_base 75: mod_base = OTHER; note = 2'-O-Methyl-adenosine
  modified_base 76: mod_base = OTHER; note = 2'-O-Methyl-adenosine
  modified_base 77: mod_base = OTHER; note = 2'-O-Methyl-adenosine
  modified_base 78: mod_base = OTHER; note = 2'-O-Methyl-adenosine
  modified_base 79: mod_base = OTHER; note = 2'-O-Methyl-guanosine
  modified_base 80: mod_base = OTHER; note = 2'-O-Methyl-uridine
  modified_base 81: mod_base = OTHER; note = 2'-O-Methyl-guanosine
  modified_base 83: mod_base = OTHER; note = 2'-O-Methyl-cytidine
  modified_base 84: mod_base = OTHER; note = 2'-O-Methyl-adenosine
  modified_base 85: mod_base = OTHER; note = 2'-O-Methyl-cytidine
  modified_base 86: mod_base = OTHER; note = 2'-O-Methyl-cytidine
  modified_base 87: mod_base = OTHER; note = 2'-O-Methyl-guanosine
  modified_base 88: mod_base = OTHER; note = 2'-O-Methyl-adenosine
  modified_base 89: mod_base = OTHER; note = 2'-O-Methyl-guanosine
  modified_base 90: mod_base = OTHER; note = 2'-O-Methyl-uridine
  modified_base 91: mod_base = OTHER; note = 2'-O-Methyl-cytidine
  modified_base 92: mod_base = OTHER; note = 2'-O-Methyl-guanosine
  modified_base 93: mod_base = OTHER; note = 2'-O-Methyl-guanosine
  modified_base 94: mod_base = OTHER; note = 2'-O-Methyl-uridine
  modified_base 95: mod_base = OTHER; note = 2'-O-Methyl-guanosine
  modified_base 96: mod_base = OTHER; note = 2'-O-Methyl-cytidine
  modified_base 97: mod_base = OTHER; note = 2'-O-Methyl-uridine phosphorothioate
  modified_base 98: mod_base = OTHER; note = 2'-O-Methyl-uridine phosphorothioate
  modified_base 99: mod_base = OTHER; note = 2'-O-Methyl-uridine phosphorothioate
  modified_base 100: mod_base = OTHER; note = 2'-O-Methyl-uridine

SEQ ID NO: 2264 - RNA, 100 nt, synthetic construct; identical to SEQ ID NO: 285
  source 1..100: mol_type = other RNA
  modified_base 1: mod_base = OTHER; note = 2'-O-Methyl-guanosine phosphorothioate
  modified_base 2: mod_base = OTHER; note = 2'-O-Methyl-guanosine phosphorothioate
  modified_base 3: mod_base = OTHER; note = 2'-O-Methyl-cytidine phosphorothioate
  modified_base 29: mod_base = OTHER; note = 2'-O-Methyl-guanosine
  modified_base 30: mod_base = OTHER; note = 2'-O-Methyl-cytidine
  modified_base 31: mod_base = OTHER; note = 2'-O-Methyl-uridine
  modified_base 32: mod_base = OTHER; note = 2'-O-Methyl-adenosine
  modified_base 33: mod_base = OTHER; note = 2'-O-Methyl-guanosine
  modified_base 34: mod_base = OTHER; note = 2'-O-Methyl-adenosine
  modified_base 35: mod_base = OTHER; note = 2'-O-Methyl-adenosine
  modified_base 36: mod_base = OTHER; note = 2'-O-Methyl-adenosine
  modified_base 37: mod_base = OTHER; note = 2'-O-Methyl-uridine
  modified_base 38: mod_base = OTHER; note = 2'-O-Methyl-adenosine
  modified_base 39: mod_base = OTHER; note = 2'-O-Methyl-guanosine
  modified_base 40: mod_base = OTHER; note = 2'-O-Methyl-cytidine
  modified_base 69: mod_base = OTHER; note = 2'-O-Methyl-adenosine
  modified_base 70: mod_base = OTHER; note = 2'-O-Methyl-cytidine
  modified_base 71: mod_base = OTHER; note = 2'-O-Methyl-uridine
  modified_base 72: mod_base = OTHER; note = 2'-O-Methyl-uridine
  modified_base 73: mod_base = OTHER; note = 2'-O-Methyl-guanosine
  modified_base 74: mod_base = OTHER; note = 2'-O-Methyl-adenosine
  modified_base 75: mod_base = OTHER; note = 2'-O-Methyl-adenosine
  modified_base 76: mod_base = OTHER; note = 2'-O-Methyl-adenosine
  modified_base 77: mod_base = OTHER; note = 2'-O-Methyl-adenosine
  modified_base 78: mod_base = OTHER; note = 2'-O-Methyl-adenosine
  modified_base 79: mod_base = OTHER; note = 2'-O-Methyl-guanosine
  modified_base 80: mod_base = OTHER; note = 2'-O-Methyl-uridine
  modified_base 81: mod_base = OTHER; note = 2'-O-Methyl-guanosine
  modified_base 82: mod_base = OTHER; note = 2'-O-Methyl-guanosine
  modified_base 83: mod_base = OTHER; note = 2'-O-Methyl-cytidine
  modified_base 84: mod_base = OTHER; note = 2'-O-Methyl-adenosine
  modified_base 85: mod_base = OTHER; note = 2'-O-Methyl-cytidine
  modified_base 86: mod_base = OTHER; note = 2'-O-Methyl-cytidine
  modified_base 87: mod_base = OTHER; note = 2'-O-Methyl-guanosine
  modified_base 88: mod_base = OTHER; note = 2'-O-Methyl-adenosine
  modified_base 89: mod_base = OTHER; note = 2'-O-Methyl-guanosine
  modified_base 90: mod_base = OTHER; note = 2'-O-Methyl-uridine
  modified_base 91: mod_base = OTHER; note = 2'-O-Methyl-cytidine
  modified_base 92: mod_base = OTHER; note = 2'-O-Methyl-guanosine
  modified_base 93: mod_base = OTHER; note = 2'-O-Methyl-guanosine
  modified_base 94: mod_base = OTHER; note = 2'-O-Methyl-uridine
  modified_base 95: mod_base = OTHER; note = 2'-O-Methyl-guanosine
  modified_base 96: mod_base = OTHER; note = 2'-O-Methyl-cytidine
  modified_base 97: mod_base = OTHER; note = 2'-O-Methyl-uridine phosphorothioate
  modified_base 98: mod_base = OTHER; note = 2'-O-Methyl-uridine phosphorothioate
  modified_base 99: mod_base = OTHER; note = 2'-O-Methyl-uridine phosphorothioate
  modified_base 100: mod_base = OTHER; note = 2'-O-Methyl-uridine

SEQ ID NO: 2265 - RNA, 100 nt, synthetic construct; identical to SEQ ID NO: 287
  source 1..100: mol_type = other RNA
  modified_base 1: mod_base = OTHER; note = 2'-O-Methyl-guanosine phosphorothioate
  modified_base 2: mod_base = OTHER; note = 2'-O-Methyl-cytidine phosphorothioate
  modified_base 3: mod_base = OTHER; note = 2'-O-Methyl-cytidine phosphorothioate
  modified_base 29: mod_base = OTHER; note = 2'-O-Methyl-guanosine
  modified_base 30: mod_base = OTHER; note = 2'-O-Methyl-cytidine
  modified_base 31: mod_base = OTHER; note = 2'-O-Methyl-uridine
  modified_base 32: mod_base = OTHER; note = 2'-O-Methyl-adenosine
  modified_base 33: mod_base = OTHER; note = 2'-O-Methyl-guanosine
  modified_base 34: mod_base = OTHER; note = 2'-O-Methyl-adenosine
  modified_base 35: mod_base = OTHER; note = 2'-O-Methyl-adenosine
  modified_base 36: mod_base = OTHER; note = 2'-O-Methyl-adenosine
  modified_base 37: mod_base = OTHER; note = 2'-O-Methyl-uridine
  modified_base 38: mod_base = OTHER; note = 2'-O-Methyl-adenosine
  modified_base 39: mod_base = OTHER; note = 2'-O-Methyl-guanosine
  modified_base 40: mod_base = OTHER; note = 2'-O-Methyl-cytidine
  modified_base 69: mod_base = OTHER; note = 2'-O-Methyl-adenosine
  modified_base 70: mod_base = OTHER; note = 2'-O-Methyl-cytidine
  modified_base 71: mod_base = OTHER; note = 2'-O-Methyl-uridine
  modified_base 72: mod_base = OTHER; note = 2'-O-Methyl-uridine
  modified_base 73: mod_base = OTHER; note = 2'-O-Methyl-guanosine
  modified_base 74: mod_base = OTHER; note = 2'-O-Methyl-adenosine
  modified_base 75: mod_base = OTHER; note = 2'-O-Methyl-adenosine
  modified_base 76: mod_base = OTHER; note = 2'-O-Methyl-adenosine
  modified_base 77: mod_base = OTHER; note = 2'-O-Methyl-adenosine
  modified_base 78: mod_base = OTHER; note = 2'-O-Methyl-adenosine
  modified_base 79: mod_base = OTHER; note = 2'-O-Methyl-guanosine
  modified_base 80: mod_base = OTHER; note = 2'-O-Methyl-uridine
  modified_base 81: mod_base = OTHER; note = 2'-O-Methyl-guanosine
  modified_base 82: mod_base = OTHER; note = 2'-O-Methyl-guanosine
  modified_base 83: mod_base = OTHER; note = 2'-O-Methyl-cytidine
  modified_base 84: mod_base = OTHER; note = 2'-O-Methyl-adenosine
  modified_base 85: mod_base = OTHER; note = 2'-O-Methyl-cytidine
  modified_base 86: mod_base = OTHER; note = 2'-O-Methyl-cytidine
  modified_base 87: mod_base = OTHER; note = 2'-O-Methyl-guanosine
  modified_base 88: mod_base = OTHER; note = 2'-O-Methyl-adenosine
  modified_base 89: mod_base = OTHER; note = 2'-O-Methyl-guanosine
  modified_base 90: mod_base = OTHER; note = 2'-O-Methyl-uridine
  modified_base 91: mod_base = OTHER; note = 2'-O-Methyl-cytidine
  modified_base 92: mod_base = OTHER; note = 2'-O-Methyl-guanosine
  modified_base 93: mod_base = OTHER; note = 2'-O-Methyl-guanosine
  modified_base 94: mod_base = OTHER; note = 2'-O-Methyl-uridine
  modified_base 95: mod_base = OTHER; note = 2'-O-Methyl-guanosine
  modified_base 96: mod_base = OTHER; note = 2'-O-Methyl-cytidine
  modified_base 97: mod_base = OTHER; note = 2'-O-Methyl-uridine phosphorothioate
  modified_base 98: mod_base = OTHER; note = 2'-O-Methyl-uridine phosphorothioate
  modified_base 99: mod_base = OTHER; note = 2'-O-Methyl-uridine phosphorothioate
  modified_base 100: mod_base = OTHER; note = 2'-O-Methyl-uridine

SEQ ID NO: 2266 - RNA, 103 nt, synthetic construct; identical to SEQ ID NO: 447
  source 1..103: mol_type = other RNA
  modified_base 1: mod_base = OTHER; note = 2'-O-Methyl-uridine phosphorothioate
  modified_base 2: mod_base = OTHER; note = 2'-O-Methyl-cytidine phosphorothioate
  modified_base 3: mod_base = OTHER; note = 2'-O-Methyl-adenosine phosphorothioate
  modified_base 21: mod_base = OTHER; note = 2'-O-Methyl-guanosine
  modified_base 28: mod_base = OTHER; note = 2'-O-Methyl-adenosine
  modified_base 29: mod_base = OTHER; note = 2'-O-Methyl-guanosine
  modified_base 30: mod_base = OTHER; note = 2'-O-Methyl-cytidine
  modified_base 31: mod_base = OTHER; note = 2'-O-Methyl-uridine
  modified_base 32: mod_base = OTHER; note = 2'-O-Methyl-adenosine
  modified_base 33: mod_base = OTHER; note = 2'-O-Methyl-guanosine
  modified_base 34: mod_base = OTHER; note = 2'-O-Methyl-adenosine
  modified_base 35: mod_base = OTHER; note = 2'-O-Methyl-adenosine
  modified_base 36: mod_base = OTHER; note = 2'-O-Methyl-adenosine
  modified_base 37: mod_base = OTHER; note = 2'-O-Methyl-uridine
  modified_base 38: mod_base = OTHER; note = 2'-O-Methyl-adenosine
  modified_base 39: mod_base = OTHER; note = 2'-O-Methyl-guanosine
  modified_base 40: mod_base = OTHER; note = 2'-O-Methyl-cytidine
  modified_base 41: mod_base = OTHER; note = 2'-O-Methyl-adenosine
  modified_base 42: mod_base = OTHER; note = 2'-O-Methyl-adenosine
  modified_base 46: mod_base = OTHER; note = 2'-O-Methyl-adenosine
  modified_base 48: mod_base = OTHER; note = 2'-O-Methyl-adenosine
  modified_base 50: mod_base = OTHER; note = 2'-O-Methyl-uridine
  modified_base 52: mod_base = OTHER; note = 2'-O-Methyl-adenosine
  modified_base 53: mod_base = OTHER; note = 2'-O-Methyl-guanosine
  modified_base 54: mod_base = OTHER; note = 2'-O-Methyl-guanosine
  modified_base 55: mod_base = OTHER; note = 2'-O-Methyl-cytidine
  modified_base 56: mod_base = OTHER; note = 2'-O-Methyl-uridine
  modified_base 57: mod_base = OTHER; note = 2'-O-Methyl-adenosine
  modified_base 61: mod_base = OTHER; note = 2'-O-Methyl-cytidine
  modified_base 66: mod_base = OTHER; note = 2'-O-Methyl-uridine
  modified_base 67: mod_base = OTHER; note = 2'-O-Methyl-cytidine
  modified_base 70: mod_base = OTHER; note = 2'-O-Methyl-cytidine
  modified_base 71: mod_base = OTHER; note = 2'-O-Methyl-uridine
  modified_base 72: mod_base = OTHER; note = 2'-O-Methyl-uridine
  modified_base 73: mod_base = OTHER; note = 2'-O-Methyl-guanosine
  modified_base 74: mod_base = OTHER; note = 2'-O-Methyl-adenosine
  modified_base 75: mod_base = OTHER; note = 2'-O-Methyl-adenosine
  modified_base 76: mod_base = OTHER; note = 2'-O-Methyl-adenosine
  modified_base 77: mod_base = OTHER; note = 2'-O-Methyl-adenosine
  modified_base 78: mod_base = OTHER; note = 2'-O-Methyl-adenosine
  modified_base 79: mod_base = OTHER; note = 2'-O-Methyl-guanosine
  modified_base 80: mod_base = OTHER; note = 2'-O-Methyl-uridine
  modified_base 81: mod_base = OTHER; note = 2'-O-Methyl-guanosine
  modified_base 82: mod_base = OTHER; note = 2'-O-Methyl-guanosine
  modified_base 83: mod_base = OTHER; note = 2'-O-Methyl-cytidine
  modified_base 84: mod_base = OTHER; note = 2'-O-Methyl-adenosine
  modified_base 85: mod_base = OTHER; note = 2'-O-Methyl-cytidine
  modified_base 86: mod_base = OTHER; note = 2'-O-Methyl-cytidine
  modified_base 87: mod_base = OTHER; note = 2'-O-Methyl-guanosine
  modified_base 88: mod_base = OTHER; note = 2'-O-Methyl-adenosine
  modified_base 89: mod_base = OTHER; note = 2'-O-Methyl-guanosine
  modified_base 90: mod_base = OTHER; note = 2'-O-Methyl-uridine
  modified_base 91: mod_base = OTHER; note = 2'-O-Methyl-cytidine
  modified_base 92: mod_base = OTHER; note = 2'-O-Methyl-guanosine
  modified_base 93: mod_base = OTHER; note = 2'-O-Methyl-guanosine
  modified_base 94: mod_base = OTHER; note = 2'-O-Methyl-uridine
  modified_base 95: mod_base = OTHER; note = 2'-O-Methyl-guanosine
  modified_base 96: mod_base = OTHER; note = 2'-O-Methyl-cytidine
  modified_base 97: mod_base = OTHER; note = 2'-O-Methyl-uridine phosphorothioate
  modified_base 98: mod_base = OTHER; note = 2'-O-Methyl-uridine phosphorothioate
  modified_base 99: mod_base = OTHER; note = 2'-O-Methyl-uridine phosphorothioate
  modified_base 100: mod_base = OTHER; note = 2'-O-Methyl-uridine
  modified_base 101: mod_base = OTHER; note = 2'-O-Methyl-uridine
  modified_base 102: mod_base = OTHER; note = 2'-O-Methyl-uridine
  modified_base 103: mod_base = OTHER; note = 2'-O-Methyl-uridine

SEQ ID NO: 2267 - RNA, 103 nt, synthetic construct; identical to SEQ ID NO: 447
  source 1..103: mol_type = other RNA
  modified_base 1: mod_base = OTHER; note = 2'-O-Methyl-uridine phosphorothioate
  modified_base 2: mod_base = OTHER; note = 2'-O-Methyl-cytidine phosphorothioate
  modified_base 3: mod_base = OTHER; note = 2'-O-Methyl-adenosine phosphorothioate
  modified_base 21: mod_base = OTHER; note = 2'-O-Methyl-guanosine
  modified_base 28: mod_base = OTHER; note = 2'-O-Methyl-adenosine
  modified_base 29: mod_base = OTHER; note = 2'-O-Methyl-guanosine
  modified_base 30: mod_base = OTHER; note = 2'-O-Methyl-cytidine
  modified_base 31: mod_base = OTHER; note = 2'-O-Methyl-uridine
  modified_base 32: mod_base = OTHER; note = 2'-O-Methyl-adenosine
  modified_base 33: mod_base = OTHER; note = 2'-O-Methyl-guanosine
  modified_base 34: mod_base = OTHER; note = 2'-O-Methyl-adenosine
  modified_base 35: mod_base = OTHER; note = 2'-O-Methyl-adenosine
  modified_base 36: mod_base = OTHER; note = 2'-O-Methyl-adenosine
  modified_base 37: mod_base = OTHER; note = 2'-O-Methyl-uridine
  modified_base 38: mod_base = OTHER; note = 2'-O-Methyl-adenosine
  modified_base 39: mod_base = OTHER; note = 2'-O-Methyl-guanosine
  modified_base 40: mod_base = OTHER; note = 2'-O-Methyl-cytidine
  modified_base 41: mod_base = OTHER; note = 2'-O-Methyl-adenosine
  modified_base 42: mod_base = OTHER; note = 2'-O-Methyl-adenosine
  modified_base 46: mod_base = OTHER; note = 2'-O-Methyl-adenosine
  modified_base 48: mod_base = OTHER; note = 2'-O-Methyl-adenosine
  modified_base 50: mod_base = OTHER; note = 2'-O-Methyl-uridine
  modified_base 52: mod_base = OTHER; note = 2'-O-Methyl-adenosine
  modified_base 53: mod_base = OTHER; note = 2'-O-Methyl-guanosine
  modified_base 54: mod_base = OTHER; note = 2'-O-Methyl-guanosine
  modified_base 55: mod_base = OTHER; note = 2'-O-Methyl-cytidine
  modified_base 56: mod_base = OTHER; note = 2'-O-Methyl-uridine
  modified_base 57: mod_base = OTHER; note = 2'-O-Methyl-adenosine
  modified_base 59: mod_base = OTHER; note = 2'-O-Methyl-uridine
  modified_base 61: mod_base = OTHER; note = 2'-O-Methyl-cytidine
  modified_base 65: mod_base = OTHER; note = 2'-O-Methyl-adenosine
  modified_base 66: mod_base = OTHER; note = 2'-O-Methyl-uridine
  modified_base 67: mod_base = OTHER; note = 2'-O-Methyl-cytidine
  modified_base 70: mod_base = OTHER; note = 2'-O-Methyl-cytidine
  modified_base 71: mod_base = OTHER; note = 2'-O-Methyl-uridine
  modified_base 72: mod_base = OTHER; note = 2'-O-Methyl-uridine
  modified_base 73: mod_base = OTHER; note = 2'-O-Methyl-guanosine
  modified_base 74: mod_base = OTHER; note = 2'-O-Methyl-adenosine
  modified_base 75: mod_base = OTHER; note = 2'-O-Methyl-adenosine
  modified_base 76: mod_base = OTHER; note = 2'-O-Methyl-adenosine
  modified_base 77: mod_base = OTHER; note = 2'-O-Methyl-adenosine
  modified_base 78: mod_base = OTHER; note = 2'-O-Methyl-adenosine
  modified_base 79: mod_base = OTHER; note = 2'-O-Methyl-guanosine
  modified_base 80: mod_base = OTHER; note = 2'-O-Methyl-uridine
  modified_base 81: mod_base = OTHER; note = 2'-O-Methyl-guanosine
  modified_base 82: mod_base = OTHER; note = 2'-O-Methyl-guanosine
  modified_base 83: mod_base = OTHER; note = 2'-O-Methyl-cytidine
  modified_base 84: mod_base = OTHER; note = 2'-O-Methyl-adenosine
  modified_base 85: mod_base = OTHER; note = 2'-O-Methyl-cytidine
  modified_base 86: mod_base = OTHER; note = 2'-O-Methyl-cytidine
  modified_base 87: mod_base = OTHER; note = 2'-O-Methyl-guanosine
  modified_base 88: mod_base = OTHER; note = 2'-O-Methyl-adenosine
  modified_base 89: mod_base = OTHER; note = 2'-O-Methyl-guanosine
  modified_base 90: mod_base = OTHER; note = 2'-O-Methyl-uridine
  modified_base 91: mod_base = OTHER; note = 2'-O-Methyl-cytidine
  modified_base 92: mod_base = OTHER; note = 2'-O-Methyl-guanosine
  modified_base 93: mod_base = OTHER; note = 2'-O-Methyl-guanosine
  modified_base 94: mod_base = OTHER; note = 2'-O-Methyl-uridine
  modified_base 95: mod_base = OTHER; note = 2'-O-Methyl-guanosine
  modified_base 96: mod_base = OTHER; note = 2'-O-Methyl-cytidine
  modified_base 97: mod_base = OTHER; note = 2'-O-Methyl-uridine phosphorothioate
  modified_base 98: mod_base = OTHER; note = 2'-O-Methyl-uridine phosphorothioate
  modified_base 99: mod_base = OTHER; note = 2'-O-Methyl-uridine phosphorothioate
  modified_base 100: mod_base = OTHER; note = 2'-O-Methyl-uridine
  modified_base 101: mod_base = OTHER; note = 2'-O-Methyl-uridine
  modified_base 102: mod_base = OTHER; note = 2'-O-Methyl-uridine
  modified_base 103: mod_base = OTHER; note = 2'-O-Methyl-uridine

SEQ ID NO: 2268 - RNA, 103 nt, synthetic construct; identical to SEQ ID NO: 447
  source 1..103: mol_type = other RNA
  modified_base 1: mod_base = OTHER; note = 2'-O-Methyl-uridine phosphorothioate
  modified_base 2: mod_base = OTHER; note = 2'-O-Methyl-cytidine phosphorothioate
  modified_base 3: mod_base = OTHER; note = 2'-O-Methyl-adenosine phosphorothioate
  modified_base 21: mod_base = OTHER; note = 2'-O-Methyl-guanosine
  modified_base 25: mod_base = OTHER; note = 2'-O-Methyl-uridine
  modified_base 26: mod_base = OTHER; note = 2'-O-Methyl-adenosine
  modified_base 27: mod_base = OTHER; note = 2'-O-Methyl-guanosine
  modified_base 28: mod_base = OTHER; note = 2'-O-Methyl-adenosine
  modified_base 29: mod_base = OTHER; note = 2'-O-Methyl-guanosine
  modified_base 30: mod_base = OTHER; note = 2'-O-Methyl-cytidine
  modified_base 31: mod_base = OTHER; note = 2'-O-Methyl-uridine
  modified_base 32: mod_base = OTHER; note = 2'-O-Methyl-adenosine
  modified_base 33: mod_base = OTHER; note = 2'-O-Methyl-guanosine
  modified_base 34: mod_base = OTHER; note = 2'-O-Methyl-adenosine
  modified_base 35: mod_base = OTHER; note = 2'-O-Methyl-adenosine
  modified_base 36: mod_base = OTHER; note = 2'-O-Methyl-adenosine
  modified_base 37: mod_base = OTHER; note = 2'-O-Methyl-uridine
  modified_base 38: mod_base = OTHER; note = 2'-O-Methyl-adenosine
  modified_base 39: mod_base = OTHER; note = 2'-O-Methyl-guanosine
  modified_base 40: mod_base = OTHER; note = 2'-O-Methyl-cytidine
  modified_base 41: mod_base = OTHER; note = 2'-O-Methyl-adenosine
  modified_base 42: mod_base = OTHER; note = 2'-O-Methyl-adenosine
  modified_base 46: mod_base = OTHER; note = 2'-O-Methyl-adenosine
  modified_base 48: mod_base = OTHER; note = 2'-O-Methyl-adenosine
  modified_base 50: mod_base = OTHER; note = 2'-O-Methyl-uridine
  modified_base 51: mod_base = OTHER; note = 2'-O-Methyl-adenosine
  modified_base 52: mod_base = OTHER; note = 2'-O-Methyl-adenosine
  modified_base 53: mod_base = OTHER; note = 2'-O-Methyl-guanosine
  modified_base 54: mod_base = OTHER; note = 2'-O-Methyl-guanosine
  modified_base 55: mod_base = OTHER; note = 2'-O-Methyl-cytidine
  modified_base 56: mod_base = OTHER; note = 2'-O-Methyl-uridine
  modified_base 57: mod_base = OTHER; note = 2'-O-Methyl-adenosine
  modified_base 59: mod_base = OTHER; note = 2'-O-Methyl-uridine
  modified_base 60: mod_base = OTHER; note = 2'-O-Methyl-cytidine
  modified_base 61: mod_base = OTHER; note = 2'-O-Methyl-cytidine
  modified_base 62: mod_base = OTHER; note = 2'-O-Methyl-guanosine
  modified_base 65: mod_base = OTHER; note = 2'-O-Methyl-adenosine
  modified_base 66: mod_base = OTHER; note = 2'-O-Methyl-uridine
  modified_base 67: mod_base = OTHER; note = 2'-O-Methyl-cytidine
  modified_base 68: mod_base = OTHER; note = 2'-O-Methyl-adenosine
  modified_base 69: mod_base = OTHER; note = 2'-O-Methyl-adenosine
  modified_base 70: mod_base = OTHER; note = 2'-O-Methyl-cytidine
  modified_base 71: mod_base = OTHER; note = 2'-O-Methyl-uridine
  modified_base 72: mod_base = OTHER; note = 2'-O-Methyl-uridine
  modified_base 73: mod_base = OTHER; note = 2'-O-Methyl-guanosine
  modified_base 74: mod_base = OTHER; note = 2'-O-Methyl-adenosine
  modified_base 75: mod_base = OTHER; note = 2'-O-Methyl-adenosine
  modified_base 76: mod_base = OTHER; note = 2'-O-Methyl-adenosine
  modified_base 77: mod_base = OTHER; note = 2'-O-Methyl-adenosine
  modified_base 78: mod_base = OTHER; note = 2'-O-Methyl-adenosine
  modified_base 79: mod_base = OTHER; note = 2'-O-Methyl-guanosine
  modified_base 80: mod_base = OTHER; note = 2'-O-Methyl-uridine
  modified_base 81: mod_base = OTHER; note = 2'-O-Methyl-guanosine
  modified_base 82: mod_base = OTHER; note = 2'-O-Methyl-guanosine
  modified_base 83: mod_base = OTHER; note = 2'-O-Methyl-cytidine
  modified_base 84: mod_base = OTHER; note = 2'-O-Methyl-adenosine
  modified_base 85: mod_base = OTHER; note = 2'-O-Methyl-cytidine
  modified_base 86: mod_base = OTHER; note = 2'-O-Methyl-cytidine
  modified_base 87: mod_base = OTHER; note = 2'-O-Methyl-guanosine
  modified_base 88: mod_base = OTHER; note = 2'-O-Methyl-adenosine
  modified_base 89: mod_base = OTHER; note = 2'-O-Methyl-guanosine
  modified_base 90: mod_base = OTHER; note = 2'-O-Methyl-uridine
  modified_base 91: mod_base = OTHER; note = 2'-O-Methyl-cytidine
  modified_base 92: mod_base = OTHER; note = 2'-O-Methyl-guanosine
  modified_base 93: mod_base = OTHER; note = 2'-O-Methyl-guanosine
  modified_base 94: mod_base = OTHER; note = 2'-O-Methyl-uridine
  modified_base 95: mod_base = OTHER; note = 2'-O-Methyl-guanosine
  modified_base 96: mod_base = OTHER; note = 2'-O-Methyl-cytidine
  modified_base 97: mod_base = OTHER; note = 2'-O-Methyl-uridine phosphorothioate
  modified_base 98: mod_base = OTHER; note = 2'-O-Methyl-uridine phosphorothioate
  modified_base 99: mod_base = OTHER; note = 2'-O-Methyl-uridine phosphorothioate
  modified_base 100: mod_base = OTHER; note = 2'-O-Methyl-uridine
  modified_base 101: mod_base = OTHER; note = 2'-O-Methyl-uridine
  modified_base 102: mod_base = OTHER; note = 2'-O-Methyl-uridine
  modified_base 103: mod_base = OTHER; note = 2'-O-Methyl-uridine

SEQ ID NO: 2269 - RNA, 103 nt, synthetic construct; identical to SEQ ID NO: 447
  source 1..103: mol_type = other RNA
  modified_base 1: mod_base = OTHER; note = 2'-O-Methyl-uridine phosphorothioate
  modified_base 2: mod_base = OTHER; note = 2'-O-Methyl-cytidine phosphorothioate
  modified_base 3: mod_base = OTHER; note = 2'-O-Methyl-adenosine phosphorothioate
  modified_base 21: mod_base = OTHER; note = 2'-O-Methyl-guanosine
  modified_base 28: mod_base = OTHER; note = 2'-O-Methyl-adenosine
  modified_base 29: mod_base = OTHER; note = 2'-O-Methyl-guanosine
  modified_base 30: mod_base = OTHER; note = 2'-O-Methyl-cytidine
  modified_base 31: mod_base = OTHER; note = 2'-O-Methyl-uridine
  modified_base 32: mod_base = OTHER; note = 2'-O-Methyl-adenosine
  modified_base 33: mod_base = OTHER; note = 2'-O-Methyl-guanosine
  modified_base 34: mod_base = OTHER; note = 2'-O-Methyl-adenosine
  modified_base 35: mod_base = OTHER; note = 2'-O-Methyl-adenosine
  modified_base 36: mod_base = OTHER; note = 2'-O-Methyl-adenosine
  modified_base 37: mod_base = OTHER; note = 2'-O-Methyl-uridine
  modified_base 38: mod_base = OTHER; note = 2'-O-Methyl-adenosine
  modified_base 39: mod_base = OTHER; note = 2'-O-Methyl-guanosine
  modified_base 40: mod_base = OTHER; note = 2'-O-Methyl-cytidine
  modified_base 41: mod_base = OTHER; note = 2'-O-Methyl-adenosine
  modified_base 42: mod_base = OTHER; note = 2'-O-Methyl-adenosine
  modified_base 46: mod_base = OTHER; note = 2'-O-Methyl-adenosine
  modified_base 48: mod_base = OTHER; note = 2'-O-Methyl-adenosine
  modified_base 50: mod_base = OTHER; note = 2'-O-Methyl-uridine
  modified_base 52: mod_base = OTHER; note = 2'-O-Methyl-adenosine
  modified_base 53: mod_base = OTHER; note = 2'-O-Methyl-guanosine
  modified_base 54: mod_base = OTHER; note = 2'-O-Methyl-guanosine
  modified_base 55: mod_base = OTHER; note = 2'-O-Methyl-cytidine
  modified_base 56: mod_base = OTHER; note = 2'-O-Methyl-uridine
  modified_base 57: mod_base = OTHER; note = 2'-O-Methyl-adenosine
  modified_base 60: mod_base = OTHER; note = 2'-O-Methyl-cytidine
  modified_base 61: mod_base = OTHER; note = 2'-O-Methyl-cytidine
  modified_base 66: mod_base = OTHER; note = 2'-O-Methyl-uridine
  modified_base 67: mod_base = OTHER; note = 2'-O-Methyl-cytidine
  modified_base 70: mod_base = OTHER; note = 2'-O-Methyl-cytidine
  modified_base 71: mod_base = OTHER; note = 2'-O-Methyl-uridine
  modified_base 72: mod_base = OTHER; note = 2'-O-Methyl-uridine
  modified_base 73: mod_base = OTHER; note = 2'-O-Methyl-guanosine
  modified_base 74: mod_base = OTHER; note = 2'-O-Methyl-adenosine
  modified_base 75: mod_base = OTHER; note = 2'-O-Methyl-adenosine
  modified_base 76: mod_base = OTHER; note = 2'-O-Methyl-adenosine
  modified_base 77: mod_base = OTHER; note = 2'-O-Methyl-adenosine
  modified_base 78: mod_base = OTHER; note = 2'-O-Methyl-adenosine
  modified_base 79: mod_base = OTHER; note = 2'-O-Methyl-guanosine
  modified_base 80: mod_base = OTHER; note = 2'-O-Methyl-uridine
  modified_base 81: mod_base = OTHER; note = 2'-O-Methyl-guanosine
  modified_base 83: mod_base = OTHER; note = 2'-O-Methyl-cytidine
  modified_base 84: mod_base = OTHER; note = 2'-O-Methyl-adenosine
  modified_base 85: mod_base = OTHER; note = 2'-O-Methyl-cytidine
  modified_base 86: mod_base = OTHER; note = 2'-O-Methyl-cytidine
  modified_base 87: mod_base = OTHER; note = 2'-O-Methyl-guanosine
  modified_base 88: mod_base = OTHER; note = 2'-O-Methyl-adenosine
  modified_base 89: mod_base = OTHER; note = 2'-O-Methyl-guanosine
  modified_base 90: mod_base = OTHER; note = 2'-O-Methyl-uridine
  modified_base 91: mod_base = OTHER; note = 2'-O-Methyl-cytidine
  modified_base 92: mod_base = OTHER; note = 2'-O-Methyl-guanosine
  modified_base 93: mod_base = OTHER; note = 2'-O-Methyl-guanosine
  modified_base 94: mod_base = OTHER; note = 2'-O-Methyl-uridine
  modified_base 95: mod_base = OTHER; note = 2'-O-Methyl-guanosine
  modified_base 96: mod_base = OTHER; note = 2'-O-Methyl-cytidine
  modified_base 97: mod_base = OTHER; note = 2'-O-Methyl-uridine phosphorothioate
  modified_base 98: mod_base = OTHER; note = 2'-O-Methyl-uridine phosphorothioate
  modified_base 99: mod_base = OTHER; note = 2'-O-Methyl-uridine phosphorothioate
  modified_base 100: mod_base = OTHER; note = 2'-O-Methyl-uridine
  modified_base 101: mod_base = OTHER; note = 2'-O-Methyl-uridine
  modified_base 102: mod_base = OTHER; note = 2'-O-Methyl-uridine
  modified_base 103: mod_base = OTHER; note = 2'-O-Methyl-uridine

SEQ ID NO: 2270 - RNA, 103 nt, synthetic construct; identical to SEQ ID NO: 447
  source 1..103: mol_type = other RNA
  modified_base 1: mod_base = OTHER; note = 2'-O-Methyl-uridine phosphorothioate
  modified_base 2: mod_base = OTHER; note = 2'-O-Methyl-cytidine phosphorothioate
  modified_base 3: mod_base = OTHER; note = 2'-O-Methyl-adenosine phosphorothioate
  modified_base 21: mod_base = OTHER; note = 2'-O-Methyl-guanosine
  modified_base 28: mod_base = OTHER; note = 2'-O-Methyl-adenosine
  modified_base 29: mod_base = OTHER; note = 2'-O-Methyl-guanosine
  modified_base 30: mod_base = OTHER; note = 2'-O-Methyl-cytidine
  modified_base 31: mod_base = OTHER; note = 2'-O-Methyl-uridine
  modified_base 32: mod_base = OTHER; note = 2'-O-Methyl-adenosine
  modified_base 34: mod_base = OTHER; note = 2'-O-Methyl-adenosine
  modified_base 35: mod_base = OTHER; note = 2'-O-Methyl-adenosine
  modified_base 36: mod_base = OTHER; note = 2'-O-Methyl-adenosine
  modified_base 37: mod_base = OTHER; note = 2'-O-Methyl-uridine
  modified_base 38: mod_base = OTHER; note = 2'-O-Methyl-adenosine
  modified_base 39: mod_base = OTHER; note = 2'-O-Methyl-guanosine
  modified_base 40: mod_base = OTHER; note = 2'-O-Methyl-cytidine
  modified_base 41: mod_base = OTHER; note = 2'-O-Methyl-adenosine
  modified_base 42: mod_base = OTHER; note = 2'-O-Methyl-adenosine
  modified_base 46: mod_base = OTHER; note = 2'-O-Methyl-adenosine
  modified_base 48: mod_base = OTHER; note = 2'-O-Methyl-adenosine
  modified_base 50: mod_base = OTHER; note = 2'-O-Methyl-uridine
  modified_base 52: mod_base = OTHER; note = 2'-O-Methyl-adenosine
  modified_base 53: mod_base = OTHER; note = 2'-O-Methyl-guanosine
  modified_base 54: mod_base = OTHER; note = 2'-O-Methyl-guanosine
  modified_base 55: mod_base = OTHER; note = 2'-O-Methyl-cytidine
  modified_base 56: mod_base = OTHER; note = 2'-O-Methyl-uridine
  modified_base 57: mod_base = OTHER; note = 2'-O-Methyl-adenosine
  modified_base 60: mod_base = OTHER; note = 2'-O-Methyl-cytidine
  modified_base 61: mod_base = OTHER; note = 2'-O-Methyl-cytidine
  modified_base 66: mod_base = OTHER; note = 2'-O-Methyl-uridine
  modified_base 67: mod_base = OTHER; note = 2'-O-Methyl-cytidine
  modified_base 70: mod_base = OTHER; note = 2'-O-Methyl-cytidine
  modified_base 71: mod_base = OTHER; note = 2'-O-Methyl-uridine
  modified_base 72: mod_base = OTHER; note = 2'-O-Methyl-uridine
  modified_base 74: mod_base = OTHER; note = 2'-O-Methyl-adenosine
  modified_base 75: mod_base = OTHER; note = 2'-O-Methyl-adenosine
  modified_base 76: mod_base = OTHER; note = 2'-O-Methyl-adenosine
  modified_base 77: mod_base = OTHER; note = 2'-O-Methyl-adenosine
  modified_base 78: mod_base = OTHER; note = 2'-O-Methyl-adenosine
  modified_base 79: mod_base = OTHER; note = 2'-O-Methyl-guanosine
  modified_base 80: mod_base = OTHER; note = 2'-O-Methyl-uridine
  modified_base 81: mod_base = OTHER; note = 2'-O-Methyl-guanosine
  modified_base 83: mod_base = OTHER; note = 2'-O-Methyl-cytidine
  modified_base 84: mod_base = OTHER; note = 2'-O-Methyl-adenosine
  modified_base 85: mod_base = OTHER; note = 2'-O-Methyl-cytidine
  modified_base 86: mod_base = OTHER; note = 2'-O-Methyl-cytidine
  modified_base 87: mod_base = OTHER; note = 2'-O-Methyl-guanosine
  modified_base 88: mod_base = OTHER; note = 2'-O-Methyl-adenosine
  modified_base 89: mod_base = OTHER; note = 2'-O-Methyl-guanosine
  modified_base 90: mod_base = OTHER; note = 2'-O-Methyl-uridine
  modified_base 91: mod_base = OTHER; note = 2'-O-Methyl-cytidine
  modified_base 92: mod_base = OTHER; note = 2'-O-Methyl-guanosine
  modified_base 93: mod_base = OTHER; note = 2'-O-Methyl-guanosine
  modified_base 94: mod_base = OTHER; note = 2'-O-Methyl-uridine
  modified_base 95: mod_base = OTHER; note = 2'-O-Methyl-guanosine
  modified_base 96: mod_base = OTHER; note = 2'-O-Methyl-cytidine
  modified_base 97: mod_base = OTHER; note = 2'-O-Methyl-uridine phosphorothioate
  modified_base 98: mod_base = OTHER; note = 2'-O-Methyl-uridine phosphorothioate
  modified_base 99: mod_base = OTHER; note = 2'-O-Methyl-uridine phosphorothioate
  modified_base 100: mod_base = OTHER; note = 2'-O-Methyl-uridine
  modified_base 101: mod_base = OTHER; note = 2'-O-Methyl-uridine
  modified_base 103: mod_base = OTHER; note = 2'-O-Methyl-uridine

SEQ ID NO: 2271 - RNA, 103 nt, synthetic construct; identical to SEQ ID NO: 447
  source 1..103: mol_type = other RNA
  modified_base 1: mod_base = OTHER; note = 2'-O-Methyl-uridine phosphorothioate
  modified_base 2: mod_base = OTHER; note = 2'-O-Methyl-cytidine phosphorothioate
  modified_base 3: mod_base = OTHER; note = 2'-O-Methyl-adenosine phosphorothioate
  modified_base 21: mod_base = OTHER; note = 2'-O-Methyl-guanosine
  modified_base 28: mod_base = OTHER; note = 2'-O-Methyl-adenosine
  modified_base 29: mod_base = OTHER; note = 2'-O-Methyl-guanosine
  modified_base 30: mod_base = OTHER; note = 2'-O-Methyl-cytidine
  modified_base 31: mod_base = OTHER; note = 2'-O-Methyl-uridine
  modified_base 32: mod_base = OTHER; note = 2'-O-Methyl-adenosine
  modified_base 34: mod_base = OTHER; note = 2'-O-Methyl-adenosine
  modified_base 35: mod_base = OTHER; note = 2'-O-Methyl-adenosine
  modified_base 36: mod_base = OTHER; note = 2'-O-Methyl-adenosine
  modified_base 37: mod_base = OTHER; note = 2'-O-Methyl-uridine
  modified_base 38: mod_base = OTHER; note = 2'-O-Methyl-adenosine
  modified_base 39: mod_base = OTHER; note = 2'-O-Methyl-guanosine
  modified_base 40: mod_base = OTHER; note = 2'-O-Methyl-cytidine
  modified_base 41: mod_base = OTHER; note = 2'-O-Methyl-adenosine
  modified_base 42: mod_base = OTHER; note = 2'-O-Methyl-adenosine
  modified_base 45: mod_base = OTHER; note = uridine phosphorothioate
  modified_base 46: mod_base = OTHER; note = 2'-O-Methyl-adenosine
  modified_base 48: mod_base = OTHER; note = 2'-O-Methyl-adenosine
  modified_base 50: mod_base = OTHER; note = 2'-O-Methyl-uridine
  modified_base 52: mod_base = OTHER; note = 2'-O-Methyl-adenosine
  modified_base 53: mod_base = OTHER; note = 2'-O-Methyl-guanosine
  modified_base 54: mod_base = OTHER; note = 2'-O-Methyl-guanosine
  modified_base 55: mod_base = OTHER; note = 2'-O-Methyl-cytidine
  modified_base 56: mod_base = OTHER; note = 2'-O-Methyl-uridine
  modified_base 57: mod_base = OTHER; note = 2'-O-Methyl-adenosine
  modified_base 60: mod_base = OTHER; note = 2'-O-Methyl-cytidine
  modified_base 61: mod_base = OTHER; note = 2'-O-Methyl-cytidine
  modified_base 66: mod_base = OTHER; note = 2'-O-Methyl-uridine
  modified_base 67: mod_base = OTHER; note = 2'-O-Methyl-cytidine
  modified_base 70: mod_base = OTHER; note = 2'-O-Methyl-cytidine
  modified_base 71: mod_base = OTHER; note = 2'-O-Methyl-uridine
  modified_base 72: mod_base = OTHER; note = 2'-O-Methyl-uridine
  modified_base 74: mod_base = OTHER; note = 2'-O-Methyl-adenosine
  modified_base 75: mod_base = OTHER; note = 2'-O-Methyl-adenosine
  modified_base 76: mod_base = OTHER; note = 2'-O-Methyl-adenosine
  modified_base 77: mod_base = OTHER; note = 2'-O-Methyl-adenosine
  modified_base 78: mod_base = OTHER; note = 2'-O-Methyl-adenosine
  modified_base 79: mod_base = OTHER; note = 2'-O-Methyl-guanosine
  modified_base 80: mod_base = OTHER; note = 2'-O-Methyl-uridine
  modified_base 81: mod_base = OTHER; note = 2'-O-Methyl-guanosine
  modified_base 83: mod_base = OTHER; note = 2'-O-Methyl-cytidine
  modified_base 84: mod_base = OTHER; note = 2'-O-Methyl-adenosine
  modified_base 85: mod_base = OTHER; note = 2'-O-Methyl-cytidine
  modified_base 86: mod_base = OTHER; note = 2'-O-Methyl-cytidine
  modified_base 87: mod_base = OTHER; note = 2'-O-Methyl-guanosine
  modified_base 88: mod_base = OTHER; note = 2'-O-Methyl-adenosine
  modified_base 89: mod_base = OTHER; note = 2'-O-Methyl-guanosine
  modified_base 90: mod_base = OTHER; note = 2'-O-Methyl-uridine
  modified_base 91: mod_base = OTHER; note = 2'-O-Methyl-cytidine
  modified_base 92: mod_base = OTHER; note = 2'-O-Methyl-guanosine
  modified_base 93: mod_base = OTHER; note = 2'-O-Methyl-guanosine
  modified_base 94: mod_base = OTHER; note = 2'-O-Methyl-uridine
  modified_base 95: mod_base = OTHER; note = 2'-O-Methyl-guanosine
  modified_base 96: mod_base = OTHER; note = 2'-O-Methyl-cytidine
  modified_base 97: mod_base = OTHER; note = 2'-O-Methyl-uridine phosphorothioate
  modified_base 98: mod_base = OTHER; note = 2'-O-Methyl-uridine phosphorothioate
  modified_base 99: mod_base = OTHER; note = 2'-O-Methyl-uridine phosphorothioate
  modified_base 100: mod_base = OTHER; note = 2'-O-Methyl-uridine
  modified_base 101: mod_base = OTHER; note = 2'-O-Methyl-uridine
  modified_base 103: mod_base = OTHER; note = 2'-O-Methyl-uridine

SEQ ID NO: 2272 - RNA, 103 nt, synthetic construct; identical to SEQ ID NO: 447
  source 1..103: mol_type = other RNA
  modified_base 1: mod_base = OTHER; note = 2'-O-Methyl-uridine phosphorothioate
  modified_base 2: mod_base = OTHER; note = 2'-O-Methyl-cytidine phosphorothioate
  modified_base 3: mod_base = OTHER; note = 2'-O-Methyl-adenosine phosphorothioate
  modified_base 21: mod_base = OTHER; note = 2'-O-Methyl-guanosine
  modified_base 28: mod_base = OTHER; note = 2'-O-Methyl-adenosine
  modified_base 29: mod_base = OTHER; note = 2'-O-Methyl-guanosine
  modified_base 30: mod_base = OTHER; note = 2'-O-Methyl-cytidine
  modified_base 31: mod_base = OTHER; note = 2'-O-Methyl-uridine
  modified_base 32: mod_base = OTHER; note = 2'-O-Methyl-adenosine
  modified_base 34: mod_base = OTHER; note = 2'-O-Methyl-adenosine
  modified_base 35: mod_base = OTHER; note = 2'-O-Methyl-adenosine
  modified_base 36: mod_base = OTHER; note = 2'-O-Methyl-adenosine
  modified_base 37: mod_base = OTHER; note = 2'-O-Methyl-uridine
  modified_base 38: mod_base = OTHER; note = 2'-O-Methyl-adenosine
  modified_base 39: mod_base = OTHER; note = 2'-O-Methyl-guanosine
  modified_base 40: mod_base = OTHER; note = 2'-O-Methyl-cytidine
  modified_base 41: mod_base = OTHER; note = 2'-O-Methyl-adenosine
  modified_base 42: mod_base = OTHER; note = 2'-O-Methyl-adenosine
  modified_base 46: mod_base = OTHER; note = 2'-O-Methyl-adenosine
  modified_base 48: mod_base = OTHER; note = 2'-O-Methyl-adenosine
  modified_base 50: mod_base = OTHER; note = 2'-O-Methyl-uridine
  modified_base 52: mod_base = OTHER; note = 2'-O-Methyl-adenosine
  modified_base 53: mod_base = OTHER; note = 2'-O-Methyl-guanosine
  modified_base 54: mod_base = OTHER; note = 2'-O-Methyl-guanosine
  modified_base 55: mod_base = OTHER; note = 2'-O-Methyl-cytidine
  modified_base 56: mod_base = OTHER; note = 2'-O-Methyl-uridine
  modified_base 57: mod_base = OTHER; note = 2'-O-Methyl-adenosine
  modified_base 60: mod_base = OTHER; note = 2'-O-Methyl-cytidine
  modified_base 61: mod_base = OTHER; note = 2'-O-Methyl-cytidine
  modified_base 64: mod_base = OTHER; note = uridine phosphorothioate
  modified_base 66: mod_base = OTHER; note = 2'-O-Methyl-uridine
  modified_base 67: mod_base = OTHER; note = 2'-O-Methyl-cytidine
  modified_base 70: mod_base = OTHER; note = 2'-O-Methyl-cytidine
  modified_base 71: mod_base = OTHER; note = 2'-O-Methyl-uridine
  modified_base 72: mod_base = OTHER; note = 2'-O-Methyl-uridine
  modified_base 74: mod_base = OTHER; note = 2'-O-Methyl-adenosine
  modified_base 75: mod_base = OTHER; note = 2'-O-Methyl-adenosine
  modified_base 76: mod_base = OTHER; note = 2'-O-Methyl-adenosine
  modified_base 77: mod_base = OTHER; note = 2'-O-Methyl-adenosine
  modified_base 78: mod_base = OTHER; note = 2'-O-Methyl-adenosine
  modified_base 79: mod_base = OTHER; note = 2'-O-Methyl-guanosine
  modified_base 80: mod_base = OTHER; note = 2'-O-Methyl-uridine
  modified_base 81: mod_base = OTHER; note = 2'-O-Methyl-guanosine
  modified_base 83: mod_base = OTHER; note = 2'-O-Methyl-cytidine
  modified_base 84: mod_base = OTHER; note = 2'-O-Methyl-adenosine
  modified_base 85: mod_base = OTHER; note = 2'-O-Methyl-cytidine
  modified_base 86: mod_base = OTHER; note = 2'-O-Methyl-cytidine
  modified_base 87: mod_base = OTHER; note = 2'-O-Methyl-guanosine
  modified_base 88: mod_base = OTHER; note = 2'-O-Methyl-adenosine
  modified_base 89: mod_base = OTHER; note = 2'-O-Methyl-guanosine
  modified_base 90: mod_base = OTHER; note = 2'-O-Methyl-uridine
  modified_base 91: mod_base = OTHER; note = 2'-O-Methyl-cytidine
  modified_base 92: mod_base = OTHER; note = 2'-O-Methyl-guanosine
  modified_base 93: mod_base = OTHER; note = 2'-O-Methyl-guanosine
  modified_base 94: mod_base = OTHER; note = 2'-O-Methyl-uridine
  modified_base 95: mod_base = OTHER; note = 2'-O-Methyl-guanosine
  modified_base 96: mod_base = OTHER; note = 2'-O-Methyl-cytidine
  modified_base 97: mod_base = OTHER; note = 2'-O-Methyl-uridine phosphorothioate
  modified_base 98: mod_base = OTHER; note = 2'-O-Methyl-uridine phosphorothioate
  modified_base 99: mod_base = OTHER; note = 2'-O-Methyl-uridine phosphorothioate
  modified_base 100: mod_base = OTHER; note = 2'-O-Methyl-uridine
  modified_base 101: mod_base = OTHER; note = 2'-O-Methyl-uridine
  modified_base 103: mod_base = OTHER; note = 2'-O-Methyl-uridine

SEQ ID NO: 2273 - RNA, 103 nt, synthetic construct; identical to SEQ ID NO: 447
  source 1..103: mol_type = other RNA
  modified_base 1: mod_base = OTHER; note = 2'-O-Methyl-uridine phosphorothioate
  modified_base 2: mod_base = OTHER; note = 2'-O-Methyl-cytidine phosphorothioate
  modified_base 3: mod_base = OTHER; note = 2'-O-Methyl-adenosine phosphorothioate
  modified_base 21: mod_base = OTHER; note = 2'-O-Methyl-guanosine
  modified_base 28: mod_base = OTHER; note = 2'-O-Methyl-adenosine
  modified_base 29: mod_base = OTHER; note = 2'-O-Methyl-guanosine
  modified_base 30: mod_base = OTHER; note = 2'-O-Methyl-cytidine
  modified_base 31: mod_base = OTHER; note = 2'-O-Methyl-uridine
  modified_base 32: mod_base = OTHER; note = 2'-O-Methyl-adenosine
  modified_base 33: mod_base = OTHER; note = 2'-O-Methyl-guanosine
  modified_base 34: mod_base = OTHER; note = 2'-O-Methyl-adenosine
  modified_base 35: mod_base = OTHER; note = 2'-O-Methyl-adenosine
  modified_base 36: mod_base = OTHER; note = 2'-O-Methyl-adenosine
  modified_base 37: mod_base = OTHER; note = 2'-O-Methyl-uridine
  modified_base 38: mod_base = OTHER; note = 2'-O-Methyl-adenosine
  modified_base 39: mod_base = OTHER; note = 2'-O-Methyl-guanosine
  modified_base 40: mod_base = OTHER; note = 2'-O-Methyl-cytidine
  modified_base 41: mod_base = OTHER; note = 2'-O-Methyl-adenosine
  modified_base 42: mod_base = OTHER; note = 2'-O-Methyl-adenosine
  modified_base 46: mod_base = OTHER; note = 2'-O-Methyl-adenosine
  modified_base 48: mod_base = OTHER; note = 2'-O-Methyl-adenosine
  modified_base 50: mod_base = OTHER; note = 2'-O-Methyl-uridine
  modified_base 52: mod_base = OTHER; note = 2'-O-Methyl-adenosine
  modified_base 53: mod_base = OTHER; note = 2'-O-Methyl-guanosine
  modified_base 54: mod_base = OTHER; note = 2'-O-Methyl-guanosine
  modified_base 55: mod_base = OTHER; note = 2'-O-Methyl-cytidine
  modified_base 56: mod_base = OTHER; note = 2'-O-Methyl-uridine
  modified_base 57: mod_base = OTHER; note = 2'-O-Methyl-adenosine
  modified_base 61: mod_base = OTHER; note = 2'-O-Methyl-cytidine
  modified_base 66: mod_base = OTHER; note = 2'-O-Methyl-uridine
  modified_base 67: mod_base = OTHER; note = 2'-O-Methyl-cytidine
  modified_base 70: mod_base = OTHER; note = 2'-O-Methyl-cytidine
  modified_base 71: mod_base = OTHER; note = 2'-O-Methyl-uridine
  modified_base 72: mod_base = OTHER; note = 2'-O-Methyl-uridine
  modified_base 73: mod_base = OTHER; note = 2'-O-Methyl-guanosine
  modified_base 74: mod_base = OTHER; note = 2'-O-Methyl-adenosine
  modified_base 75: mod_base = OTHER; note = 2'-O-Methyl-adenosine
  modified_base 76: mod_base = OTHER; note = 2'-O-Methyl-adenosine
  modified_base 77: mod_base = OTHER; note = 2'-O-Methyl-adenosine
  modified_base 78: mod_base = OTHER; note = 2'-O-Methyl-adenosine
  modified_base 79: mod_base = OTHER; note = 2'-O-Methyl-guanosine
  modified_base 80: mod_base = OTHER; note = 2'-O-Methyl-uridine
  modified_base 81: mod_base = OTHER; note = 2'-O-Methyl-guanosine
  modified_base 82: mod_base = OTHER; note = 2'-O-Methyl-guanosine
  modified_base 83: mod_base = OTHER; note = 2'-O-Methyl-cytidine
  modified_base 84: mod_base = OTHER; note = 2'-O-Methyl-adenosine
  modified_base 85: mod_base = OTHER; note = 2'-O-Methyl-cytidine
  modified_base 86: mod_base = OTHER; note = 2'-O-Methyl-cytidine
  modified_base 87: mod_base = OTHER; note = 2'-O-Methyl-guanosine
  modified_base 88: mod_base = OTHER; note = 2'-O-Methyl-adenosine
  modified_base 89: mod_base = OTHER; note = 2'-O-Methyl-guanosine
  modified_base 90: mod_base = OTHER; note = 2'-O-Methyl-uridine
  modified_base 91: mod_base = OTHER; note = 2'-O-Methyl-cytidine
  modified_base 92: mod_base = OTHER; note = 2'-O-Methyl-guanosine
  modified_base 93: mod_base = OTHER; note = 2'-O-Methyl-guanosine
  modified_base 94: mod_base = OTHER; note = 2'-O-Methyl-uridine
  modified_base 95: mod_base = OTHER; note = 2'-O-Methyl-guanosine
  modified_base 96: mod_base = OTHER; note = 2'-O-Methyl-cytidine
  modified_base 97: mod_base = OTHER; note = 2'-O-Methyl-uridine phosphorothioate
  modified_base 98: mod_base = OTHER; note = 2'-O-Methyl-uridine phosphorothioate
  modified_base 99: mod_base = OTHER; note = 2'-O-Methyl-uridine phosphorothioate
  modified_base 100: mod_base = OTHER; note = 2'-O-Methyl-uridine
  modified_base 101: mod_base = OTHER; note = 2'-O-Methyl-uridine
  modified_base 103: mod_base = OTHER; note = 2'-O-Methyl-uridine

SEQ ID NO: 2274 - RNA, 103 nt, synthetic construct; identical to SEQ ID NO: 447
  source 1..103: mol_type = other RNA
  modified_base 1: mod_base = OTHER; note = 2'-O-Methyl-uridine phosphorothioate
  modified_base 2: mod_base = OTHER; note = 2'-O-Methyl-cytidine phosphorothioate
  modified_base 3: mod_base = OTHER; note = 2'-O-Methyl-adenosine phosphorothioate
  modified_base 21: mod_base = OTHER; note = 2'-O-Methyl-guanosine
  modified_base 28: mod_base = OTHER; note = 2'-O-Methyl-adenosine
  modified_base 29: mod_base = OTHER; note = 2'-O-Methyl-guanosine
  modified_base 30: mod_base = OTHER; note = 2'-O-Methyl-cytidine
  modified_base 31: mod_base = OTHER; note = 2'-O-Methyl-uridine
  modified_base 32: mod_base = OTHER; note = 2'-O-Methyl-adenosine
  modified_base 33: mod_base = OTHER; note = 2'-O-Methyl-guanosine
  modified_base 34: mod_base = OTHER; note = 2'-O-Methyl-adenosine
  modified_base 35: mod_base = OTHER; note = 2'-O-Methyl-adenosine
  modified_base 36: mod_base = OTHER; note = 2'-O-Methyl-adenosine
  modified_base 37: mod_base = OTHER; note = 2'-O-Methyl-uridine
  modified_base 38: mod_base = OTHER; note = 2'-O-Methyl-adenosine
  modified_base 39: mod_base = OTHER; note = 2'-O-Methyl-guanosine
  modified_base 40: mod_base = OTHER; note = 2'-O-Methyl-cytidine
  modified_base 41: mod_base = OTHER; note = 2'-O-Methyl-adenosine
  modified_base 42: mod_base = OTHER; note = 2'-O-Methyl-adenosine
  modified_base 46: mod_base = OTHER; note = 2'-O-Methyl-adenosine
  modified_base 48: mod_base = OTHER; note = 2'-O-Methyl-adenosine
  modified_base 50: mod_base = OTHER; note = 2'-O-Methyl-uridine
  modified_base 52: mod_base = OTHER; note = 2'-O-Methyl-adenosine
  modified_base 53: mod_base = OTHER; note = 2'-O-Methyl-guanosine
  modified_base 54: mod_base = OTHER; note = 2'-O-Methyl-guanosine
  modified_base 55: mod_base = OTHER; note = 2'-O-Methyl-cytidine
  modified_base 56: mod_base = OTHER; note = 2'-O-Methyl-uridine
  modified_base 57: mod_base = OTHER; note = 2'-O-Methyl-adenosine
  modified_base 59: mod_base = OTHER; note = 2'-O-Methyl-uridine
  modified_base 61: mod_base = OTHER; note = 2'-O-Methyl-cytidine
  modified_base 65: mod_base = OTHER; note = 2'-O-Methyl-adenosine
  modified_base 66: mod_base = OTHER; note = 2'-O-Methyl-uridine
  modified_base 67: mod_base = OTHER; note = 2'-O-Methyl-cytidine
  modified_base 70: mod_base = OTHER; note = 2'-O-Methyl-cytidine
  modified_base 71: mod_base = OTHER; note = 2'-O-Methyl-uridine
  modified_base 72: mod_base = OTHER; note = 2'-O-Methyl-uridine
  modified_base 73: mod_base = OTHER; note = 2'-O-Methyl-guanosine
  modified_base 74: mod_base = OTHER; note = 2'-O-Methyl-adenosine
  modified_base 75: mod_base = OTHER; note = 2'-O-Methyl-adenosine
  modified_base 76: mod_base = OTHER; note = 2'-O-Methyl-adenosine
  modified_base 77: mod_base = OTHER; note = 2'-O-Methyl-adenosine
  modified_base 78: mod_base = OTHER; note = 2'-O-Methyl-adenosine
  modified_base 79: mod_base = OTHER; note = 2'-O-Methyl-guanosine
  modified_base 80: mod_base = OTHER; note = 2'-O-Methyl-uridine
  modified_base 81: mod_base = OTHER; note = 2'-O-Methyl-guanosine
  modified_base 82: mod_base = OTHER; note = 2'-O-Methyl-guanosine
  modified_base 83: mod_base = OTHER; note = 2'-O-Methyl-cytidine
  modified_base 84: mod_base = OTHER; note = 2'-O-Methyl-adenosine
  modified_base 85: mod_base = OTHER; note = 2'-O-Methyl-cytidine
  modified_base 86: mod_base = OTHER; note = 2'-O-Methyl-cytidine
  modified_base 87: mod_base = OTHER; note = 2'-O-Methyl-guanosine
  modified_base 88: mod_base = OTHER; note = 2'-O-Methyl-adenosine
  modified_base 89: mod_base = OTHER; note = 2'-O-Methyl-guanosine
  modified_base 90: mod_base = OTHER; note = 2'-O-Methyl-uridine
  modified_base 91: mod_base = OTHER; note = 2'-O-Methyl-cytidine
  modified_base 92: mod_base = OTHER; note = 2'-O-Methyl-guanosine
  modified_base 93: mod_base = OTHER; note = 2'-O-Methyl-guanosine
  modified_base 94: mod_base = OTHER; note = 2'-O-Methyl-uridine
  modified_base 95: mod_base = OTHER; note = 2'-O-Methyl-guanosine
  modified_base 96: mod_base = OTHER; note = 2'-O-Methyl-cytidine
  modified_base 97: mod_base = OTHER; note = 2'-O-Methyl-uridine phosphorothioate
  modified_base 98: mod_base = OTHER; note = 2'-O-Methyl-uridine phosphorothioate
  modified_base 99: mod_base = OTHER; note = 2'-O-Methyl-uridine phosphorothioate
  modified_base 100: mod_base = OTHER; note = 2'-O-Methyl-uridine
  modified_base 101: mod_base = OTHER; note = 2'-O-Methyl-uridine
  modified_base 103: mod_base = OTHER; note = 2'-O-Methyl-uridine

SEQ ID NO: 2275 - RNA, 103 nt, synthetic construct; identical to SEQ ID NO: 447
  source 1..103: mol_type = other RNA
  modified_base 1: mod_base = OTHER; note = 2'-O-Methyl-uridine phosphorothioate
  modified_base 2: mod_base = OTHER; note = 2'-O-Methyl-cytidine phosphorothioate
  modified_base 3: mod_base = OTHER; note = 2'-O-Methyl-adenosine phosphorothioate
  modified_base 21: mod_base = OTHER; note = 2'-O-Methyl-guanosine
  modified_base 25: mod_base = OTHER; note = 2'-O-Methyl-uridine
  modified_base 26: mod_base = OTHER; note = 2'-O-Methyl-adenosine
  modified_base 27: mod_base = OTHER; note = 2'-O-Methyl-guanosine
  modified_base 28: mod_base = OTHER; note = 2'-O-Methyl-adenosine
  modified_base 29: mod_base = OTHER; note = 2'-O-Methyl-guanosine
  modified_base 30: mod_base = OTHER; note = 2'-O-Methyl-cytidine
  modified_base 31: mod_base = OTHER; note = 2'-O-Methyl-uridine
  modified_base 32: mod_base = OTHER; note = 2'-O-Methyl-adenosine
  modified_base 33: mod_base = OTHER; note = 2'-O-Methyl-guanosine
  modified_base 34: mod_base = OTHER; note = 2'-O-Methyl-adenosine
  modified_base 35: mod_base = OTHER; note = 2'-O-Methyl-adenosine
  modified_base 36: mod_base = OTHER; note = 2'-O-Methyl-adenosine
  modified_base 37: mod_base = OTHER; note = 2'-O-Methyl-uridine
  modified_base 38: mod_base = OTHER; note = 2'-O-Methyl-adenosine
  modified_base 39: mod_base = OTHER; note = 2'-O-Methyl-guanosine
  modified_base 40: mod_base = OTHER; note = 2'-O-Methyl-cytidine
  modified_base 41: mod_base = OTHER; note = 2'-O-Methyl-adenosine
  modified_base 42: mod_base = OTHER; note = 2'-O-Methyl-adenosine
  modified_base 46: mod_base = OTHER; note = 2'-O-Methyl-adenosine
  modified_base 48: mod_base = OTHER; note = 2'-O-Methyl-adenosine
  modified_base 50: mod_base = OTHER; note = 2'-O-Methyl-uridine
  modified_base 51: mod_base = OTHER; note = 2'-O-Methyl-adenosine
  modified_base 52: mod_base = OTHER; note = 2'-O-Methyl-adenosine
  modified_base 53: mod_base = OTHER; note = 2'-O-Methyl-guanosine
  modified_base 54: mod_base = OTHER; note = 2'-O-Methyl-guanosine
  modified_base 55: mod_base = OTHER; note = 2'-O-Methyl-cytidine
  modified_base 56: mod_base = OTHER; note = 2'-O-Methyl-uridine
  modified_base 57: mod_base = OTHER; note = 2'-O-Methyl-adenosine
  modified_base 59: mod_base = OTHER; note = 2'-O-Methyl-uridine
  modified_base 60: mod_base = OTHER; note = 2'-O-Methyl-cytidine
  modified_base 61: mod_base = OTHER; note = 2'-O-Methyl-cytidine
  modified_base 62: mod_base = OTHER; note = 2'-O-Methyl-guanosine
  modified_base 65: mod_base = OTHER; note = 2'-O-Methyl-adenosine
  modified_base 66: mod_base = OTHER; note = 2'-O-Methyl-uridine
  modified_base 67: mod_base = OTHER; note = 2'-O-Methyl-cytidine
  modified_base 68: mod_base = OTHER; note = 2'-O-Methyl-adenosine
  modified_base 69: mod_base = OTHER; note = 2'-O-Methyl-adenosine
  modified_base 70: mod_base = OTHER; note = 2'-O-Methyl-cytidine
  modified_base 71: mod_base = OTHER; note = 2'-O-Methyl-uridine
  modified_base 72: mod_base = OTHER; note = 2'-O-Methyl-uridine
  modified_base 73: mod_base = OTHER; note = 2'-O-Methyl-guanosine
  modified_base 74: mod_base = OTHER; note = 2'-O-Methyl-adenosine
  modified_base 75: mod_base = OTHER; note = 2'-O-Methyl-adenosine
  modified_base 76: mod_base = OTHER; note = 2'-O-Methyl-adenosine
  modified_base 77: mod_base = OTHER; note = 2'-O-Methyl-adenosine
  modified_base 78: mod_base = OTHER; note = 2'-O-Methyl-adenosine
  modified_base 79: mod_base = OTHER; note = 2'-O-Methyl-guanosine
  modified_base 80: mod_base = OTHER; note = 2'-O-Methyl-uridine
  modified_base 81: mod_base = OTHER; note = 2'-O-Methyl-guanosine
  modified_base 82: mod_base = OTHER; note = 2'-O-Methyl-guanosine
  modified_base 83: mod_base = OTHER; note = 2'-O-Methyl-cytidine
  modified_base 84: mod_base = OTHER; note = 2'-O-Methyl-adenosine
  modified_base 85: mod_base = OTHER; note = 2'-O-Methyl-cytidine
  modified_base 86: mod_base = OTHER; note = 2'-O-Methyl-cytidine
  modified_base 87: mod_base = OTHER; note = 2'-O-Methyl-guanosine
  modified_base 88: mod_base = OTHER; note = 2'-O-Methyl-adenosine
  modified_base 89: mod_base = OTHER; note = 2'-O-Methyl-guanosine
  modified_base 90: mod_base = OTHER; note = 2'-O-Methyl-uridine
  modified_base 91: mod_base = OTHER; note = 2'-O-Methyl-cytidine
  modified_base 92: mod_base = OTHER; note = 2'-O-Methyl-guanosine
  modified_base 93: mod_base = OTHER; note = 2'-O-Methyl-guanosine
  modified_base 94: mod_base = OTHER; note = 2'-O-Methyl-uridine
  modified_base 95: mod_base = OTHER; note = 2'-O-Methyl-guanosine
  modified_base 96: mod_base = OTHER; note = 2'-O-Methyl-cytidine
  modified_base 97: mod_base = OTHER; note = 2'-O-Methyl-uridine phosphorothioate
  modified_base 98: mod_base = OTHER; note = 2'-O-Methyl-uridine phosphorothioate
  modified_base 99: mod_base = OTHER; note = 2'-O-Methyl-uridine phosphorothioate
  modified_base 100: mod_base = OTHER; note = 2'-O-Methyl-uridine
  modified_base 101: mod_base = OTHER; note = 2'-O-Methyl-uridine
  modified_base 103: mod_base = OTHER; note = 2'-O-Methyl-uridine

SEQ ID NO: 2276 - RNA, 103 nt, synthetic construct; identical to SEQ ID NO: 447
  source 1..103: mol_type = other RNA
  modified_base 1: mod_base = OTHER; note = 2'-O-Methyl-uridine phosphorothioate
  modified_base 2: mod_base = OTHER; note = 2'-O-Methyl-cytidine phosphorothioate
  modified_base 3: mod_base = OTHER; note = 2'-O-Methyl-adenosine phosphorothioate
  modified_base 21: mod_base = OTHER; note = 2'-O-Methyl-guanosine
  modified_base 28: mod_base = OTHER; note = 2'-O-Methyl-adenosine
  modified_base 29: mod_base = OTHER; note = 2'-O-Methyl-guanosine
  modified_base 30: mod_base = OTHER; note = 2'-O-Methyl-cytidine
  modified_base 31: mod_base = OTHER; note = 2'-O-Methyl-uridine
  modified_base 32: mod_base = OTHER; note = 2'-O-Methyl-adenosine
  modified_base 33: mod_base = OTHER; note = 2'-O-Methyl-guanosine
  modified_base 34: mod_base = OTHER; note = 2'-O-Methyl-adenosine
  modified_base 35: mod_base = OTHER; note = 2'-O-Methyl-adenosine
  modified_base 36: mod_base = OTHER; note = 2'-O-Methyl-adenosine
  modified_base 37: mod_base = OTHER; note = 2'-O-Methyl-uridine
  modified_base 38: mod_base = OTHER; note = 2'-O-Methyl-adenosine
  modified_base 39: mod_base = OTHER; note = 2'-O-Methyl-guanosine
  modified_base 40: mod_base = OTHER; note = 2'-O-Methyl-cytidine
  modified_base 41: mod_base = OTHER; note = 2'-O-Methyl-adenosine
  modified_base 42: mod_base = OTHER; note = 2'-O-Methyl-adenosine
  modified_base 46: mod_base = OTHER; note = 2'-O-Methyl-adenosine
  modified_base 48: mod_base = OTHER; note = 2'-O-Methyl-adenosine
  modified_base 50: mod_base = OTHER; note = 2'-O-Methyl-uridine
  modified_base 52: mod_base = OTHER; note = 2'-O-Methyl-adenosine
  modified_base 53: mod_base = OTHER; note = 2'-O-Methyl-guanosine
  modified_base 54: mod_base = OTHER; note = 2'-O-Methyl-guanosine
  modified_base 55: mod_base = OTHER; note = 2'-O-Methyl-cytidine
  modified_base 56: mod_base = OTHER; note = 2'-O-Methyl-uridine
  modified_base 57: mod_base = OTHER; note = 2'-O-Methyl-adenosine
  modified_base 60: mod_base = OTHER; note = 2'-O-Methyl-cytidine
  modified_base 61: mod_base = OTHER; note = 2'-O-Methyl-cytidine
  modified_base 66: mod_base = OTHER; note = 2'-O-Methyl-uridine
  modified_base 67: mod_base = OTHER; note = 2'-O-Methyl-cytidine
  modified_base 70: mod_base = OTHER; note = 2'-O-Methyl-cytidine
  modified_base 71: mod_base = OTHER; note = 2'-O-Methyl-uridine
  modified_base 72: mod_base = OTHER; note = 2'-O-Methyl-uridine
  modified_base 73: mod_base = OTHER; note = 2'-O-Methyl-guanosine
  modified_base 74: mod_base = OTHER; note = 2'-O-Methyl-adenosine
  modified_base 75: mod_base = OTHER; note = 2'-O-Methyl-adenosine
  modified_base 76: mod_base = OTHER; note = 2'-O-Methyl-adenosine
  modified_base 77: mod_base = OTHER; note = 2'-O-Methyl-adenosine
  modified_base 78: mod_base = OTHER; note = 2'-O-Methyl-adenosine
  modified_base 79: mod_base = OTHER; note = 2'-O-Methyl-guanosine
  modified_base 80: mod_base = OTHER; note = 2'-O-Methyl-uridine
  modified_base 81: mod_base = OTHER; note = 2'-O-Methyl-guanosine
  modified_base 83: mod_base = OTHER; note = 2'-O-Methyl-cytidine
  modified_base 84: mod_base = OTHER; note = 2'-O-Methyl-adenosine
  modified_base 85: mod_base = OTHER; note = 2'-O-Methyl-cytidine
  modified_base 86: mod_base = OTHER; note = 2'-O-Methyl-cytidine
  modified_base 87: mod_base = OTHER; note = 2'-O-Methyl-guanosine
  modified_base 88: mod_base = OTHER; note = 2'-O-Methyl-adenosine
  modified_base 89: mod_base = OTHER; note = 2'-O-Methyl-guanosine
  modified_base 90: mod_base = OTHER; note = 2'-O-Methyl-uridine
  modified_base 91: mod_base = OTHER; note = 2'-O-Methyl-cytidine
  modified_base 92: mod_base = OTHER; note = 2'-O-Methyl-guanosine
  modified_base 93: mod_base = OTHER; note = 2'-O-Methyl-guanosine
  modified_base 94: mod_base = OTHER; note = 2'-O-Methyl-uridine
  modified_base 95: mod_base = OTHER; note = 2'-O-Methyl-guanosine
  modified_base 96: mod_base = OTHER; note = 2'-O-Methyl-cytidine
  modified_base 97: mod_base = OTHER; note = 2'-O-Methyl-uridine phosphorothioate
  modified_base 98: mod_base = OTHER; note = 2'-O-Methyl-uridine phosphorothioate
  modified_base 99: mod_base = OTHER; note = 2'-O-Methyl-uridine phosphorothioate
  modified_base 100: mod_base = OTHER; note = 2'-O-Methyl-uridine
  modified_base 101: mod_base = OTHER; note = 2'-O-Methyl-uridine
  modified_base 103: mod_base = OTHER; note = 2'-O-Methyl-uridine

SEQ ID NO: 2277 - RNA, 103 nt, synthetic construct; identical to SEQ ID NO: 11
  source 1..103: mol_type = other RNA
  modified_base 1: mod_base = OTHER; note = 2'-O-Methyl-cytidine phosphorothioate
  modified_base 2: mod_base = OTHER; note = 2'-O-Methyl-cytidine phosphorothioate
  modified_base 3: mod_base = OTHER; note = 2'-O-Methyl-cytidine phosphorothioate
  modified_base 21: mod_base = OTHER; note = 2'-O-Methyl-guanosine
  modified_base 28: mod_base = OTHER; note = 2'-O-Methyl-adenosine
  modified_base 29: mod_base = OTHER; note = 2'-O-Methyl-guanosine
  modified_base 30: mod_base = OTHER; note = 2'-O-Methyl-cytidine
  modified_base 31: mod_base = OTHER; note = 2'-O-Methyl-uridine
  modified_base 32: mod_base = OTHER; note = 2'-O-Methyl-adenosine
  modified_base 34: mod_base = OTHER; note = 2'-O-Methyl-adenosine
  modified_base 35: mod_base = OTHER; note = 2'-O-Methyl-adenosine
  modified_base 36: mod_base = OTHER; note = 2'-O-Methyl-adenosine
  modified_base 37: mod_base = OTHER; note = 2'-O-Methyl-uridine
  modified_base 38: mod_base = OTHER; note = 2'-O-Methyl-adenosine
  modified_base 39: mod_base = OTHER; note = 2'-O-Methyl-guanosine
  modified_base 40: mod_base = OTHER; note = 2'-O-Methyl-cytidine
  modified_base 41: mod_base = OTHER; note = 2'-O-Methyl-adenosine
  modified_base 42: mod_base = OTHER; note = 2'-O-Methyl-adenosine
  modified_base 46: mod_base = OTHER; note = 2'-O-Methyl-adenosine
  modified_base 48: mod_base = OTHER; note = 2'-O-Methyl-adenosine
  modified_base 50: mod_base = OTHER; note = 2'-O-Methyl-uridine
  modified_base 52: mod_base = OTHER; note = 2'-O-Methyl-adenosine
  modified_base 53: mod_base = OTHER; note = 2'-O-Methyl-guanosine
  modified_base 54: mod_base = OTHER; note = 2'-O-Methyl-guanosine
  modified_base 55: mod_base = OTHER; note = 2'-O-Methyl-cytidine
  modified_base 56: mod_base = OTHER; note = 2'-O-Methyl-uridine
  modified_base 57: mod_base = OTHER; note = 2'-O-Methyl-adenosine
  modified_base 60: mod_base = OTHER; note = 2'-O-Methyl-cytidine
  modified_base 61: mod_base = OTHER; note = 2'-O-Methyl-cytidine
  modified_base 66: mod_base = OTHER; note = 2'-O-Methyl-uridine
  modified_base 67: mod_base = OTHER; note = 2'-O-Methyl-cytidine
  modified_base 70: mod_base = OTHER; note = 2'-O-Methyl-cytidine
  modified_base 71: mod_base = OTHER; note = 2'-O-Methyl-uridine
  modified_base 72: mod_base = OTHER; note = 2'-O-Methyl-uridine
  modified_base 74: mod_base = OTHER; note = 2'-O-Methyl-adenosine
  modified_base 75: mod_base = OTHER; note = 2'-O-Methyl-adenosine
  modified_base 76: mod_base = OTHER; note = 2'-O-Methyl-adenosine
  modified_base 77: mod_base = OTHER; note = 2'-O-Methyl-adenosine
  modified_base 78: mod_base = OTHER; note = 2'-O-Methyl-adenosine
  modified_base 79: mod_base = OTHER; note = 2'-O-Methyl-guanosine
  modified_base 80: mod_base = OTHER; note = 2'-O-Methyl-uridine
  modified_base 81: mod_base = OTHER; note = 2'-O-Methyl-guanosine
  modified_base 83: mod_base = OTHER; note = 2'-O-Methyl-cytidine
  modified_base 84: mod_base = OTHER; note = 2'-O-Methyl-adenosine
  modified_base 85: mod_base = OTHER; note = 2'-O-Methyl-cytidine
  modified_base 86: mod_base = OTHER; note = 2'-O-Methyl-cytidine
  modified_base 87: mod_base = OTHER; note = 2'-O-Methyl-guanosine
  modified_base 88: mod_base = OTHER; note = 2'-O-Methyl-adenosine
  modified_base 89: mod_base = OTHER; note = 2'-O-Methyl-guanosine
  modified_base 90: mod_base = OTHER; note = 2'-O-Methyl-uridine
  modified_base 91: mod_base = OTHER; note = 2'-O-Methyl-cytidine
  modified_base 92: mod_base = OTHER; note = 2'-O-Methyl-guanosine
  modified_base 93: mod_base = OTHER; note = 2'-O-Methyl-guanosine
  modified_base 94: mod_base = OTHER; note = 2'-O-Methyl-uridine
  modified_base 95: mod_base = OTHER; note = 2'-O-Methyl-guanosine
  modified_base 96: mod_base = OTHER; note = 2'-O-Methyl-cytidine
  modified_base 97: mod_base = OTHER; note = 2'-O-Methyl-uridine phosphorothioate
  modified_base 98: mod_base = OTHER; note = 2'-O-Methyl-uridine phosphorothioate
  modified_base 99: mod_base = OTHER; note = 2'-O-Methyl-uridine phosphorothioate
  modified_base 100: mod_base = OTHER; note = 2'-O-Methyl-uridine
  modified_base 103: mod_base = OTHER; note = 2'-O-Methyl-uridine

SEQ ID NO: 2278 - RNA, 103 nt, synthetic construct; identical to SEQ ID NO: 11
  source 1..103: mol_type = other RNA
  modified_base 1: mod_base = OTHER; note = 2'-O-Methyl-cytidine phosphorothioate
  modified_base 2: mod_base = OTHER; note = 2'-O-Methyl-cytidine phosphorothioate
  modified_base 3: mod_base = OTHER; note = 2'-O-Methyl-cytidine phosphorothioate
  modified_base 21: mod_base = OTHER; note = 2'-O-Methyl-guanosine
  modified_base 28: mod_base = OTHER; note = 2'-O-Methyl-adenosine
  modified_base 29: mod_base = OTHER; note = 2'-O-Methyl-guanosine
  modified_base 30: mod_base = OTHER; note = 2'-O-Methyl-cytidine
  modified_base 31: mod_base = OTHER; note = 2'-O-Methyl-uridine
  modified_base 32: mod_base = OTHER; note = 2'-O-Methyl-adenosine
  modified_base 33: mod_base = OTHER; note = 2'-O-Methyl-guanosine
  modified_base 34: mod_base = OTHER; note = 2'-O-Methyl-adenosine
  modified_base 35: mod_base = OTHER; note = 2'-O-Methyl-adenosine
  modified_base 36: mod_base = OTHER; note = 2'-O-Methyl-adenosine
  modified_base 37: mod_base = OTHER; note = 2'-O-Methyl-uridine
  modified_base 38: mod_base = OTHER; note = 2'-O-Methyl-adenosine
  modified_base 39: mod_base = OTHER; note = 2'-O-Methyl-guanosine
  modified_base 40: mod_base = OTHER; note = 2'-O-Methyl-cytidine
  modified_base 41: mod_base = OTHER; note = 2'-O-Methyl-adenosine
  modified_base 42: mod_base = OTHER; note = 2'-O-Methyl-adenosine
  modified_base 46: mod_base = OTHER; note = 2'-O-Methyl-adenosine
  modified_base 48: mod_base = OTHER; note = 2'-O-Methyl-adenosine
  modified_base 50: mod_base = OTHER; note = 2'-O-Methyl-uridine
  modified_base 52: mod_base = OTHER; note = 2'-O-Methyl-adenosine
  modified_base 53: mod_base = OTHER; note = 2'-O-Methyl-guanosine
  modified_base 54: mod_base = OTHER; note = 2'-O-Methyl-guanosine
  modified_base 55: mod_base = OTHER; note = 2'-O-Methyl-cytidine
  modified_base 56: mod_base = OTHER; note = 2'-O-Methyl-uridine
  modified_base 57: mod_base = OTHER; note = 2'-O-Methyl-adenosine
  modified_base 60: mod_base = OTHER; note = 2'-O-Methyl-cytidine
  modified_base 61: mod_base = OTHER; note = 2'-O-Methyl-cytidine
  modified_base 66: mod_base = OTHER; note = 2'-O-Methyl-uridine
  modified_base 67: mod_base = OTHER; note = 2'-O-Methyl-cytidine
  modified_base 70: mod_base = OTHER; note = 2'-O-Methyl-cytidine
  modified_base 71: mod_base = OTHER; note = 2'-O-Methyl-uridine
  modified_base 72: mod_base = OTHER; note = 2'-O-Methyl-uridine
  modified_base 73: mod_base = OTHER; note = 2'-O-Methyl-guanosine
  modified_base 74: mod_base = OTHER; note = 2'-O-Methyl-adenosine
  modified_base 75: mod_base = OTHER; note = 2'-O-Methyl-adenosine
  modified_base 76: mod_base = OTHER; note = 2'-O-Methyl-adenosine
  modified_base 77: mod_base = OTHER; note = 2'-O-Methyl-adenosine
  modified_base 78: mod_base = OTHER; note = 2'-O-Methyl-adenosine
  modified_base 79: mod_base = OTHER; note = 2'-O-Methyl-guanosine
  modified_base 80: mod_base = OTHER; note = 2'-O-Methyl-uridine
  modified_base 81: mod_base = OTHER; note = 2'-O-Methyl-guanosine
  modified_base 83: mod_base = OTHER; note = 2'-O-Methyl-cytidine
  modified_base 84: mod_base = OTHER; note = 2'-O-Methyl-adenosine
  modified_base 85: mod_base = OTHER; note = 2'-O-Methyl-cytidine
  modified_base 86: mod_base = OTHER; note = 2'-O-Methyl-cytidine
  modified_base 87: mod_base = OTHER; note = 2'-O-Methyl-guanosine
  modified_base 88: mod_base = OTHER; note = 2'-O-Methyl-adenosine
  modified_base 89: mod_base = OTHER; note = 2'-O-Methyl-guanosine
  modified_base 90: mod_base = OTHER; note = 2'-O-Methyl-uridine
  modified_base 91: mod_base = OTHER; note = 2'-O-Methyl-cytidine
  modified_base 92: mod_base = OTHER; note = 2'-O-Methyl-guanosine
  modified_base 93: mod_base = OTHER; note = 2'-O-Methyl-guanosine
  modified_base 94: mod_base = OTHER; note = 2'-O-Methyl-uridine
  modified_base 95: mod_base = OTHER; note = 2'-O-Methyl-guanosine
  modified_base 96: mod_base = OTHER; note = 2'-O-Methyl-cytidine
  modified_base 97: mod_base = OTHER; note = 2'-O-Methyl-uridine phosphorothioate
  modified_base 98: mod_base = OTHER; note = 2'-O-Methyl-uridine phosphorothioate
  modified_base 99: mod_base = OTHER; note = 2'-O-Methyl-uridine phosphorothioate
  modified_base 100: mod_base = OTHER; note = 2'-O-Methyl-uridine
  modified_base 103: mod_base = OTHER; note = 2'-O-Methyl-uridine

SEQ ID NO: 2279 - RNA, 100 nt, synthetic construct; identical to SEQ ID NO: 304
  source 1..100: mol_type = other RNA
  modified_base 1: mod_base = OTHER; note = 2'-O-Methyl-uridine phosphorothioate
  modified_base 2: mod_base = OTHER; note = 2'-O-Methyl-guanosine phosphorothioate
  modified_base 3: mod_base = OTHER; note = 2'-O-Methyl-adenosine phosphorothioate
  modified_base 21: mod_base = OTHER; note = 2'-O-Methyl-guanosine
  modified_base 28: mod_base = OTHER; note = 2'-O-Methyl-adenosine
  modified_base 29: mod_base = OTHER; note = 2'-O-Methyl-guanosine
  modified_base 30: mod_base = OTHER; note = 2'-O-Methyl-cytidine
  modified_base 31: mod_base = OTHER; note = 2'-O-Methyl-uridine
  modified_base 32: mod_base = OTHER; note = 2'-O-Methyl-adenosine
  modified_base 33: mod_base = OTHER; note = 2'-O-Methyl-guanosine
  modified_base 34: mod_base = OTHER; note = 2'-O-Methyl-adenosine
  modified_base 35: mod_base = OTHER; note = 2'-O-Methyl-adenosine
  modified_base 36: mod_base = OTHER; note = 2'-O-Methyl-adenosine
  modified_base 37: mod_base = OTHER; note = 2'-O-Methyl-uridine
  modified_base 38: mod_base = OTHER; note = 2'-O-Methyl-adenosine
  modified_base 39: mod_base = OTHER; note = 2'-O-Methyl-guanosine
  modified_base 40: mod_base = OTHER; note = 2'-O-Methyl-cytidine
  modified_base 41: mod_base = OTHER; note = 2'-O-Methyl-adenosine
  modified_base 42: mod_base = OTHER; note = 2'-O-Methyl-adenosine
  modified_base 46: mod_base = OTHER; note = 2'-O-Methyl-adenosine
  modified_base 48: mod_base = OTHER; note = 2'-O-Methyl-adenosine
  modified_base 50: mod_base = OTHER; note = 2'-O-Methyl-uridine
  modified_base 52: mod_base = OTHER; note = 2'-O-Methyl-adenosine
  modified_base 53: mod_base = OTHER; note = 2'-O-Methyl-guanosine
  modified_base 54: mod_base = OTHER; note = 2'-O-Methyl-guanosine
  modified_base 55: mod_base = OTHER; note = 2'-O-Methyl-cytidine
  modified_base 56: mod_base = OTHER; note = 2'-O-Methyl-uridine
  modified_base 57: mod_base = OTHER; note = 2'-O-Methyl-adenosine
  modified_base 60: mod_base = OTHER; note = 2'-O-Methyl-cytidine
  modified_base 61: mod_base = OTHER; note = 2'-O-Methyl-cytidine
  modified_base 66: mod_base = OTHER; note = 2'-O-Methyl-uridine
  modified_base 67: mod_base = OTHER; note = 2'-O-Methyl-cytidine
  modified_base 70: mod_base = OTHER; note = 2'-O-Methyl-cytidine
  modified_base 71: mod_base = OTHER; note = 2'-O-Methyl-uridine
  modified_base 72: mod_base = OTHER; note = 2'-O-Methyl-uridine
  modified_base 73: mod_base = OTHER; note = 2'-O-Methyl-guanosine
  modified_base 74: mod_base = OTHER; note = 2'-O-Methyl-adenosine
  modified_base 75: mod_base = OTHER; note = 2'-O-Methyl-adenosine
  modified_base 76: mod_base = OTHER; note = 2'-O-Methyl-adenosine
  modified_base 77: mod_base = OTHER; note = 2'-O-Methyl-adenosine
  modified_base 78: mod_base = OTHER; note = 2'-O-Methyl-adenosine
  modified_base 79: mod_base = OTHER; note = 2'-O-Methyl-guanosine
  modified_base 80: mod_base = OTHER; note = 2'-O-Methyl-uridine
  modified_base 81: mod_base = OTHER; note = 2'-O-Methyl-guanosine
  modified_base 83: mod_base = OTHER; note = 2'-O-Methyl-cytidine
  modified_base 84: mod_base = OTHER; note = 2'-O-Methyl-adenosine
  modified_base 85: mod_base = OTHER; note = 2'-O-Methyl-cytidine
  modified_base 86: mod_base = OTHER; note = 2'-O-Methyl-cytidine
  modified_base 87: mod_base = OTHER; note = 2'-O-Methyl-guanosine
  modified_base 88: mod_base = OTHER; note = 2'-O-Methyl-adenosine
  modified_base 89: mod_base = OTHER; note = 2'-O-Methyl-guanosine
  modified_base 90: mod_base = OTHER; note = 2'-O-Methyl-uridine
  modified_base 91: mod_base = OTHER; note = 2'-O-Methyl-cytidine
  modified_base 92: mod_base = OTHER; note = 2'-O-Methyl-guanosine
  modified_base 93: mod_base = OTHER; note = 2'-O-Methyl-guanosine
  modified_base 94: mod_base = OTHER; note = 2'-O-Methyl-uridine
  modified_base 95: mod_base = OTHER; note = 2'-O-Methyl-guanosine
  modified_base 96: mod_base = OTHER; note = 2'-O-Methyl-cytidine
  modified_base 97: mod_base = OTHER; note = 2'-O-Methyl-uridine phosphorothioate
  modified_base 98: mod_base = OTHER; note = 2'-O-Methyl-uridine phosphorothioate
  modified_base 99: mod_base = OTHER; note = 2'-O-Methyl-uridine phosphorothioate
  modified_base 100: mod_base = OTHER; note = 2'-O-Methyl-uridine

SEQ ID NO: 2280 - RNA, 100 nt, synthetic construct; identical to SEQ ID NO: 321
  source 1..100: mol_type = other RNA
  modified_base 1: mod_base = OTHER; note = 2'-O-Methyl-cytidine phosphorothioate
  modified_base 2: mod_base = OTHER; note = 2'-O-Methyl-adenosine phosphorothioate
  modified_base 3: mod_base = OTHER; note = 2'-O-Methyl-uridine phosphorothioate
  modified_base 21: mod_base = OTHER; note = 2'-O-Methyl-guanosine
  modified_base 28: mod_base = OTHER; note = 2'-O-Methyl-adenosine
  modified_base 29: mod_base = OTHER; note = 2'-O-Methyl-guanosine
  modified_base 30: mod_base = OTHER; note = 2'-O-Methyl-cytidine
  modified_base 31: mod_base = OTHER; note = 2'-O-Methyl-uridine
  modified_base 32: mod_base = OTHER; note = 2'-O-Methyl-adenosine
  modified_base 33: mod_base = OTHER; note = 2'-O-Methyl-guanosine
  modified_base 34: mod_base = OTHER; note = 2'-O-Methyl-adenosine
  modified_base 35: mod_base = OTHER; note = 2'-O-Methyl-adenosine
  modified_base 36: mod_base = OTHER; note = 2'-O-Methyl-adenosine
  modified_base 37: mod_base = OTHER; note = 2'-O-Methyl-uridine
  modified_base 38: mod_base = OTHER; note = 2'-O-Methyl-adenosine
  modified_base 39: mod_base = OTHER; note = 2'-O-Methyl-guanosine
  modified_base 40: mod_base = OTHER; note = 2'-O-Methyl-cytidine
  modified_base 41: mod_base = OTHER; note = 2'-O-Methyl-adenosine
  modified_base 42: mod_base = OTHER; note = 2'-O-Methyl-adenosine
  modified_base 46: mod_base = OTHER; note = 2'-O-Methyl-adenosine
  modified_base 48: mod_base = OTHER; note = 2'-O-Methyl-adenosine
  modified_base 50: mod_base = OTHER; note = 2'-O-Methyl-uridine
  modified_base 52: mod_base = OTHER; note = 2'-O-Methyl-adenosine
  modified_base 53: mod_base = OTHER; note = 2'-O-Methyl-guanosine
  modified_base 54: mod_base = OTHER; note = 2'-O-Methyl-guanosine
  modified_base 55: mod_base = OTHER; note = 2'-O-Methyl-cytidine
  modified_base 56: mod_base = OTHER; note = 2'-O-Methyl-uridine
  modified_base 57: mod_base = OTHER; note = 2'-O-Methyl-adenosine
  modified_base 60: mod_base = OTHER; note = 2'-O-Methyl-cytidine
  modified_base 61: mod_base = OTHER; note = 2'-O-Methyl-cytidine
  modified_base 66: mod_base = OTHER; note = 2'-O-Methyl-uridine
  modified_base 67: mod_base = OTHER; note = 2'-O-Methyl-cytidine
  modified_base 70: mod_base = OTHER; note = 2'-O-Methyl-cytidine
  modified_base 71: mod_base = OTHER; note = 2'-O-Methyl-uridine
  modified_base 72: mod_base = OTHER; note = 2'-O-Methyl-uridine
  modified_base 73: mod_base = OTHER; note = 2'-O-Methyl-guanosine
  modified_base 74: mod_base = OTHER; note = 2'-O-Methyl-adenosine
  modified_base 75: mod_base = OTHER; note = 2'-O-Methyl-adenosine
  modified_base 76: mod_base = OTHER; note = 2'-O-Methyl-adenosine
  modified_base 77: mod_base = OTHER; note = 2'-O-Methyl-adenosine
  modified_base 78: mod_base = OTHER; note = 2'-O-Methyl-adenosine
  modified_base 79: mod_base = OTHER; note = 2'-O-Methyl-guanosine
  modified_base 80: mod_base = OTHER; note = 2'-O-Methyl-uridine
  modified_base 81: mod_base = OTHER; note = 2'-O-Methyl-guanosine
  modified_base 83: mod_base = OTHER; note = 2'-O-Methyl-cytidine
  modified_base 84: mod_base = OTHER; note = 2'-O-Methyl-adenosine
  modified_base 85: mod_base = OTHER; note = 2'-O-Methyl-cytidine
  modified_base 86: mod_base = OTHER; note = 2'-O-Methyl-cytidine
  modified_base 87: mod_base = OTHER; note = 2'-O-Methyl-guanosine
  modified_base 88: mod_base = OTHER; note = 2'-O-Methyl-adenosine
  modified_base 89: mod_base = OTHER; note = 2'-O-Methyl-guanosine
  modified_base 90: mod_base = OTHER; note = 2'-O-Methyl-uridine
  modified_base 91: mod_base = OTHER; note = 2'-O-Methyl-cytidine
  modified_base 92: mod_base = OTHER; note = 2'-O-Methyl-guanosine
  modified_base 93: mod_base = OTHER; note = 2'-O-Methyl-guanosine
  modified_base 94: mod_base = OTHER; note = 2'-O-Methyl-uridine
  modified_base 95: mod_base = OTHER; note = 2'-O-Methyl-guanosine
  modified_base 96: mod_base = OTHER; note = 2'-O-Methyl-cytidine
  modified_base 97: mod_base = OTHER; note = 2'-O-Methyl-uridine phosphorothioate
  modified_base 98: mod_base = OTHER; note = 2'-O-Methyl-uridine phosphorothioate
  modified_base 99: mod_base = OTHER; note = 2'-O-Methyl-uridine phosphorothioate
  modified_base 100: mod_base = OTHER; note = 2'-O-Methyl-uridine

SEQ ID NO: 2281 - RNA, 100 nt, synthetic construct; identical to SEQ ID NO: 324
  source 1..100: mol_type = other RNA
  modified_base 1: mod_base = OTHER; note = 2'-O-Methyl-adenosine phosphorothioate
  modified_base 2: mod_base = OTHER; note = 2'-O-Methyl-cytidine phosphorothioate
  modified_base 3: mod_base = OTHER; note = 2'-O-Methyl-adenosine phosphorothioate
  modified_base 21: mod_base = OTHER; note = 2'-O-Methyl-guanosine
  modified_base 28: mod_base = OTHER; note = 2'-O-Methyl-adenosine
  modified_base 29: mod_base = OTHER; note = 2'-O-Methyl-guanosine
  modified_base 30: mod_base = OTHER; note = 2'-O-Methyl-cytidine
  modified_base 31: mod_base = OTHER; note = 2'-O-Methyl-uridine
  modified_base 32: mod_base = OTHER; note = 2'-O-Methyl-adenosine
  modified_base 33: mod_base = OTHER; note = 2'-O-Methyl-guanosine
  modified_base 34: mod_base = OTHER; note = 2'-O-Methyl-adenosine
  modified_base 35: mod_base = OTHER; note = 2'-O-Methyl-adenosine
  modified_base 36: mod_base = OTHER; note = 2'-O-Methyl-adenosine
  modified_base 37: mod_base = OTHER; note = 2'-O-Methyl-uridine
  modified_base 38: mod_base = OTHER; note = 2'-O-Methyl-adenosine
  modified_base 39: mod_base = OTHER; note = 2'-O-Methyl-guanosine
  modified_base 40: mod_base = OTHER; note = 2'-O-Methyl-cytidine
  modified_base 41: mod_base = OTHER; note = 2'-O-Methyl-adenosine
  modified_base 42: mod_base = OTHER; note = 2'-O-Methyl-adenosine
  modified_base 46: mod_base = OTHER; note = 2'-O-Methyl-adenosine
  modified_base 48: mod_base = OTHER; note = 2'-O-Methyl-adenosine
  modified_base 50: mod_base = OTHER; note = 2'-O-Methyl-uridine
  modified_base 52: mod_base = OTHER; note = 2'-O-Methyl-adenosine
  modified_base 53: mod_base = OTHER; note = 2'-O-Methyl-guanosine
  modified_base 54: mod_base = OTHER; note = 2'-O-Methyl-guanosine
  modified_base 55: mod_base = OTHER; note = 2'-O-Methyl-cytidine
  modified_base 56: mod_base = OTHER; note = 2'-O-Methyl-uridine
  modified_base 57: mod_base = OTHER; note = 2'-O-Methyl-adenosine
  modified_base 60: mod_base = OTHER; note = 2'-O-Methyl-cytidine
  modified_base 61: mod_base = OTHER; note = 2'-O-Methyl-cytidine
  modified_base 66: mod_base = OTHER; note = 2'-O-Methyl-uridine
  modified_base 67: mod_base = OTHER; note = 2'-O-Methyl-cytidine
  modified_base 70: mod_base = OTHER; note = 2'-O-Methyl-cytidine
  modified_base 71: mod_base = OTHER; note = 2'-O-Methyl-uridine
  modified_base 72: mod_base = OTHER; note = 2'-O-Methyl-uridine
  modified_base 73: mod_base = OTHER; note = 2'-O-Methyl-guanosine
  modified_base 74: mod_base = OTHER; note = 2'-O-Methyl-adenosine
  modified_base 75: mod_base = OTHER; note = 2'-O-Methyl-adenosine
  modified_base 76: mod_base = OTHER; note = 2'-O-Methyl-adenosine
  modified_base 77: mod_base = OTHER; note = 2'-O-Methyl-adenosine
  modified_base 78: mod_base = OTHER; note = 2'-O-Methyl-adenosine
  modified_base 79: mod_base = OTHER; note = 2'-O-Methyl-guanosine
  modified_base 80: mod_base = OTHER; note = 2'-O-Methyl-uridine
  modified_base 81: mod_base = OTHER; note = 2'-O-Methyl-guanosine
  modified_base 83: mod_base = OTHER; note = 2'-O-Methyl-cytidine
  modified_base 84: mod_base = OTHER; note = 2'-O-Methyl-adenosine
  modified_base 85: mod_base = OTHER; note = 2'-O-Methyl-cytidine
  modified_base 86: mod_base = OTHER; note = 2'-O-Methyl-cytidine
  modified_base 87: mod_base = OTHER; note = 2'-O-Methyl-guanosine
  modified_base 88: mod_base = OTHER; note = 2'-O-Methyl-adenosine
  modified_base 89: mod_base = OTHER; note = 2'-O-Methyl-guanosine
  modified_base 90: mod_base = OTHER; note = 2'-O-Methyl-uridine
  modified_base 91: mod_base = OTHER; note = 2'-O-Methyl-cytidine
  modified_base 92: mod_base = OTHER; note = 2'-O-Methyl-guanosine
  modified_base 93: mod_base = OTHER; note = 2'-O-Methyl-guanosine
  modified_base 94: mod_base = OTHER; note = 2'-O-Methyl-uridine
  modified_base 95: mod_base = OTHER; note = 2'-O-Methyl-guanosine
  modified_base 96: mod_base = OTHER; note = 2'-O-Methyl-cytidine
  modified_base 97: mod_base = OTHER; note = 2'-O-Methyl-uridine phosphorothioate
  modified_base 98: mod_base = OTHER; note = 2'-O-Methyl-uridine phosphorothioate
  modified_base 99: mod_base = OTHER; note = 2'-O-Methyl-uridine phosphorothioate
  modified_base 100: mod_base = OTHER; note = 2'-O-Methyl-uridine

SEQ ID NO: 2282 - RNA, 100 nt, synthetic construct; identical to SEQ ID NO: 287
  source 1..100: mol_type = other RNA
  modified_base 1: mod_base = OTHER; note = 2'-O-Methyl-guanosine phosphorothioate
  modified_base 2: mod_base = OTHER; note = 2'-O-Methyl-cytidine phosphorothioate
  modified_base 3: mod_base = OTHER; note = 2'-O-Methyl-cytidine phosphorothioate
  modified_base 21: mod_base = OTHER; note = 2'-O-Methyl-guanosine
  modified_base 28: mod_base = OTHER; note = 2'-O-Methyl-adenosine
  modified_base 29: mod_base = OTHER; note = 2'-O-Methyl-guanosine
  modified_base 30: mod_base = OTHER; note = 2'-O-Methyl-cytidine
  modified_base 31: mod_base = OTHER; note = 2'-O-Methyl-uridine
  modified_base 32: mod_base = OTHER; note = 2'-O-Methyl-adenosine
  modified_base 33: mod_base = OTHER; note = 2'-O-Methyl-guanosine
  modified_base 34: mod_base = OTHER; note = 2'-O-Methyl-adenosine
  modified_base 35: mod_base = OTHER; note = 2'-O-Methyl-adenosine
  modified_base 36: mod_base = OTHER; note = 2'-O-Methyl-adenosine
  modified_base 37: mod_base = OTHER; note = 2'-O-Methyl-uridine
  modified_base 38: mod_base = OTHER; note = 2'-O-Methyl-adenosine
  modified_base 39: mod_base = OTHER; note = 2'-O-Methyl-guanosine
  modified_base 40: mod_base = OTHER; note = 2'-O-Methyl-cytidine
  modified_base 41: mod_base = OTHER; note = 2'-O-Methyl-adenosine
  modified_base 42: mod_base = OTHER; note = 2'-O-Methyl-adenosine
  modified_base 46: mod_base = OTHER; note = 2'-O-Methyl-adenosine
  modified_base 48: mod_base = OTHER; note = 2'-O-Methyl-adenosine
  modified_base 50: mod_base = OTHER; note = 2'-O-Methyl-uridine
  modified_base 52: mod_base = OTHER; note = 2'-O-Methyl-adenosine
  modified_base 53: mod_base = OTHER; note = 2'-O-Methyl-guanosine
  modified_base 54: mod_base = OTHER; note = 2'-O-Methyl-guanosine
  modified_base 55: mod_base = OTHER; note = 2'-O-Methyl-cytidine
  modified_base 56: mod_base = OTHER; note = 2'-O-Methyl-uridine
  modified_base 57: mod_base = OTHER; note = 2'-O-Methyl-adenosine
  modified_base 60: mod_base = OTHER; note = 2'-O-Methyl-cytidine
  modified_base 61: mod_base = OTHER; note = 2'-O-Methyl-cytidine
  modified_base 66: mod_base = OTHER; note = 2'-O-Methyl-uridine
  modified_base 67: mod_base = OTHER; note = 2'-O-Methyl-cytidine
  modified_base 70: mod_base = OTHER; note = 2'-O-Methyl-cytidine
  modified_base 71: mod_base = OTHER; note = 2'-O-Methyl-uridine
  modified_base 72: mod_base = OTHER; note = 2'-O-Methyl-uridine
  modified_base 73: mod_base = OTHER; note = 2'-O-Methyl-guanosine
  modified_base 74: mod_base = OTHER; note = 2'-O-Methyl-adenosine
  modified_base 75: mod_base = OTHER; note = 2'-O-Methyl-adenosine
  modified_base 76: mod_base = OTHER; note = 2'-O-Methyl-adenosine
  modified_base 77: mod_base = OTHER; note = 2'-O-Methyl-adenosine
  modified_base 78: mod_base = OTHER; note = 2'-O-Methyl-adenosine
  modified_base 79: mod_base = OTHER; note = 2'-O-Methyl-guanosine
  modified_base 80: mod_base = OTHER; note = 2'-O-Methyl-uridine
  modified_base 81: mod_base = OTHER; note = 2'-O-Methyl-guanosine
  modified_base 83: mod_base = OTHER; note = 2'-O-Methyl-cytidine
  modified_base 84: mod_base = OTHER; note = 2'-O-Methyl-adenosine
  modified_base 85: mod_base = OTHER; note = 2'-O-Methyl-cytidine
  modified_base 86: mod_base = OTHER; note = 2'-O-Methyl-cytidine
  modified_base 87: mod_base = OTHER; note = 2'-O-Methyl-guanosine
  modified_base 88: mod_base = OTHER; note = 2'-O-Methyl-adenosine
  modified_base 89: mod_base = OTHER; note = 2'-O-Methyl-guanosine
  modified_base 90: mod_base = OTHER; note = 2'-O-Methyl-uridine
  modified_base 91: mod_base = OTHER; note = 2'-O-Methyl-cytidine
  modified_base 92: mod_base = OTHER; note = 2'-O-Methyl-guanosine
  modified_base 93: mod_base = OTHER; note = 2'-O-Methyl-guanosine
  modified_base 94: mod_base = OTHER; note = 2'-O-Methyl-uridine
  modified_base 95: mod_base = OTHER; note = 2'-O-Methyl-guanosine
  modified_base 96: mod_base = OTHER; note = 2'-O-Methyl-cytidine
  modified_base 97: mod_base = OTHER; note = 2'-O-Methyl-uridine phosphorothioate
  modified_base 98: mod_base = OTHER; note = 2'-O-Methyl-uridine phosphorothioate
  modified_base 99: mod_base = OTHER; note = 2'-O-Methyl-uridine phosphorothioate
  modified_base 100: mod_base = OTHER; note = 2'-O-Methyl-uridine

SEQ ID NO: 2283 - RNA, 100 nt, synthetic construct; identical to SEQ ID NO: 287
  source 1..100: mol_type = other RNA
  modified_base 1: mod_base = OTHER; note = 2'-O-Methyl-guanosine phosphorothioate
  modified_base 2: mod_base = OTHER; note = 2'-O-Methyl-cytidine phosphorothioate
  modified_base 3: mod_base = OTHER; note = 2'-O-Methyl-cytidine phosphorothioate
  modified_base 21: mod_base = OTHER; note = 2'-O-Methyl-guanosine
  modified_base 28: mod_base = OTHER; note = 2'-O-Methyl-adenosine
  modified_base 29: mod_base = OTHER; note = 2'-O-Methyl-guanosine
  modified_base 30: mod_base = OTHER; note = 2'-O-Methyl-cytidine
  modified_base 31: mod_base = OTHER; note = 2'-O-Methyl-uridine
  modified_base 32: mod_base = OTHER; note = 2'-O-Methyl-adenosine
  modified_base 34: mod_base = OTHER; note = 2'-O-Methyl-adenosine
  modified_base 35: mod_base = OTHER; note = 2'-O-Methyl-adenosine
  modified_base 36: mod_base = OTHER; note = 2'-O-Methyl-adenosine
  modified_base 37: mod_base = OTHER; note = 2'-O-Methyl-uridine
  modified_base 38: mod_base = OTHER; note = 2'-O-Methyl-adenosine
  modified_base 39: mod_base = OTHER; note = 2'-O-Methyl-guanosine
  modified_base 40: mod_base = OTHER; note = 2'-O-Methyl-cytidine
  modified_base 41: mod_base = OTHER; note = 2'-O-Methyl-adenosine
  modified_base 42: mod_base = OTHER; note = 2'-O-Methyl-adenosine
  modified_base 46: mod_base = OTHER; note = 2'-O-Methyl-adenosine
  modified_base 48: mod_base = OTHER; note = 2'-O-Methyl-adenosine
  modified_base 50: mod_base = OTHER; note = 2'-O-Methyl-uridine
  modified_base 52: mod_base = OTHER; note = 2'-O-Methyl-adenosine
  modified_base 53: mod_base = OTHER; note = 2'-O-Methyl-guanosine
  modified_base 54: mod_base = OTHER; note = 2'-O-Methyl-guanosine
  modified_base 57: mod_base = OTHER; note = 2'-O-Methyl-adenosine
  modified_base 61: mod_base = OTHER; note = 2'-O-Methyl-cytidine
  modified_base 66: mod_base = OTHER; note = 2'-O-Methyl-uridine
  modified_base 67: mod_base = OTHER; note = 2'-O-Methyl-cytidine
  modified_base 70: mod_base = OTHER; note = 2'-O-Methyl-cytidine
  modified_base 71: mod_base = OTHER; note = 2'-O-Methyl-uridine
  modified_base 72: mod_base = OTHER; note = 2'-O-Methyl-uridine
  modified_base 74: mod_base = OTHER; note = 2'-O-Methyl-adenosine
  modified_base 75: mod_base = OTHER; note = 2'-O-Methyl-adenosine
  modified_base 76: mod_base = OTHER; note = 2'-O-Methyl-adenosine
  modified_base 77: mod_base = OTHER; note = 2'-O-Methyl-adenosine
  modified_base 78: mod_base = OTHER; note = 2'-O-Methyl-adenosine
  modified_base 79: mod_base = OTHER; note = 2'-O-Methyl-guanosine
  modified_base 80: mod_base = OTHER; note = 2'-O-Methyl-uridine
  modified_base 82: mod_base = OTHER; note = 2'-O-Methyl-guanosine
  modified_base 83: mod_base = OTHER; note = 2'-O-Methyl-cytidine
  modified_base 84: mod_base = OTHER; note = 2'-O-Methyl-adenosine
  modified_base 85: mod_base = OTHER; note = 2'-O-Methyl-cytidine
  modified_base 86: mod_base = OTHER; note = 2'-O-Methyl-cytidine
  modified_base 87: mod_base = OTHER; note = 2'-O-Methyl-guanosine
  modified_base 89: mod_base = OTHER; note = 2'-O-Methyl-guanosine
  modified_base 92: mod_base = OTHER; note = 2'-O-Methyl-guanosine
  modified_base 93: mod_base = OTHER; note = 2'-O-Methyl-guanosine
  modified_base 94: mod_base = OTHER; note = 2'-O-Methyl-uridine
  modified_base 95: mod_base = OTHER; note = 2'-O-Methyl-guanosine
  modified_base 96: mod_base = OTHER; note = 2'-O-Methyl-cytidine
  modified_base 97: mod_base = OTHER; note = 2'-O-Methyl-uridine phosphorothioate
  modified_base 98: mod_base = OTHER; note = 2'-O-Methyl-uridine phosphorothioate
  modified_base 99: mod_base = OTHER; note = 2'-O-Methyl-uridine phosphorothioate
  modified_base 100: mod_base = OTHER; note = 2'-O-Methyl-uridine

SEQ ID NO: 2284 - RNA, 100 nt, synthetic construct; identical to SEQ ID NO: 339
  source 1..100: mol_type = other RNA
  modified_base 1: mod_base = OTHER; note = 2'-O-Methyl-uridine phosphorothioate
  modified_base 2: mod_base = OTHER; note = 2'-O-Methyl-cytidine phosphorothioate
  modified_base 3: mod_base = OTHER; note = 2'-O-Methyl-adenosine phosphorothioate
  modified_base 21: mod_base = OTHER; note = 2'-O-Methyl-guanosine
  modified_base 28: mod_base = OTHER; note = 2'-O-Methyl-adenosine
  modified_base 29: mod_base = OTHER; note = 2'-O-Methyl-guanosine
  modified_base 30: mod_base = OTHER; note = 2'-O-Methyl-cytidine
  modified_base 31: mod_base = OTHER; note = 2'-O-Methyl-uridine
  modified_base 32: mod_base = OTHER; note = 2'-O-Methyl-adenosine
  modified_base 33: mod_base = OTHER; note = 2'-O-Methyl-guanosine
  modified_base 34: mod_base = OTHER; note = 2'-O-Methyl-adenosine
  modified_base 35: mod_base = OTHER; note = 2'-O-Methyl-adenosine
  modified_base 36: mod_base = OTHER; note = 2'-O-Methyl-adenosine
  modified_base 37: mod_base = OTHER; note = 2'-O-Methyl-uridine
  modified_base 38: mod_base = OTHER; note = 2'-O-Methyl-adenosine
  modified_base 39: mod_base = OTHER; note = 2'-O-Methyl-guanosine
  modified_base 40: mod_base = OTHER; note = 2'-O-Methyl-cytidine
  modified_base 41: mod_base = OTHER; note = 2'-O-Methyl-adenosine
  modified_base 42: mod_base = OTHER; note = 2'-O-Methyl-adenosine
  modified_base 46: mod_base = OTHER; note = 2'-O-Methyl-adenosine
  modified_base 48: mod_base = OTHER; note = 2'-O-Methyl-adenosine
  modified_base 50: mod_base = OTHER; note = 2'-O-Methyl-uridine
  modified_base 52: mod_base = OTHER; note = 2'-O-Methyl-adenosine
  modified_base 53: mod_base = OTHER; note = 2'-O-Methyl-guanosine
  modified_base 54: mod_base = OTHER; note = 2'-O-Methyl-guanosine
  modified_base 55: mod_base = OTHER; note = 2'-O-Methyl-cytidine
  modified_base 56: mod_base = OTHER; note = 2'-O-Methyl-uridine
  modified_base 57: mod_base = OTHER; note = 2'-O-Methyl-adenosine
  modified_base 60: mod_base = OTHER; note = 2'-O-Methyl-cytidine
  modified_base 61: mod_base = OTHER; note = 2'-O-Methyl-cytidine
  modified_base 66: mod_base = OTHER; note = 2'-O-Methyl-uridine
  modified_base 67: mod_base = OTHER; note = 2'-O-Methyl-cytidine
  modified_base 70: mod_base = OTHER; note = 2'-O-Methyl-cytidine
  modified_base 71: mod_base = OTHER; note = 2'-O-Methyl-uridine
  modified_base 72: mod_base = OTHER; note = 2'-O-Methyl-uridine
  modified_base 73: mod_base = OTHER; note = 2'-O-Methyl-guanosine
  modified_base 74: mod_base = OTHER; note = 2'-O-Methyl-adenosine
  modified_base 75: mod_base = OTHER; note = 2'-O-Methyl-adenosine
  modified_base 76: mod_base = OTHER; note = 2'-O-Methyl-adenosine
  modified_base 77: mod_base = OTHER; note = 2'-O-Methyl-adenosine
  modified_base 78: mod_base = OTHER; note = 2'-O-Methyl-adenosine
  modified_base 79: mod_base = OTHER; note = 2'-O-Methyl-guanosine
  modified_base 80: mod_base = OTHER; note = 2'-O-Methyl-uridine
  modified_base 81: mod_base = OTHER; note = 2'-O-Methyl-guanosine
  modified_base 83: mod_base = OTHER; note = 2'-O-Methyl-cytidine
  modified_base 84: mod_base = OTHER; note = 2'-O-Methyl-adenosine
  modified_base 85: mod_base = OTHER; note = 2'-O-Methyl-cytidine
  modified_base 86: mod_base = OTHER; note = 2'-O-Methyl-cytidine
  modified_base 87: mod_base = OTHER; note = 2'-O-Methyl-guanosine
  modified_base 88: mod_base = OTHER; note = 2'-O-Methyl-adenosine
  modified_base 89: mod_base = OTHER; note = 2'-O-Methyl-guanosine
  modified_base 90: mod_base = OTHER; note = 2'-O-Methyl-uridine
  modified_base 91: mod_base = OTHER; note = 2'-O-Methyl-cytidine
  modified_base 92: mod_base = OTHER; note = 2'-O-Methyl-guanosine
  modified_base 93: mod_base = OTHER; note = 2'-O-Methyl-guanosine
  modified_base 94: mod_base = OTHER; note = 2'-O-Methyl-uridine
  modified_base 95: mod_base = OTHER; note = 2'-O-Methyl-guanosine
  modified_base 96: mod_base = OTHER; note = 2'-O-Methyl-cytidine
  modified_base 97: mod_base = OTHER; note = 2'-O-Methyl-uridine phosphorothioate
  modified_base 98: mod_base = OTHER; note = 2'-O-Methyl-uridine phosphorothioate
  modified_base 99: mod_base = OTHER; note = 2'-O-Methyl-uridine phosphorothioate
  modified_base 100: mod_base = OTHER; note = 2'-O-Methyl-uridine

SEQ ID NO: 2285 - RNA, 100 nt, synthetic construct; identical to SEQ ID NO: 363
  source 1..100: mol_type = other RNA
  modified_base 1: mod_base = OTHER; note = 2'-O-Methyl-guanosine phosphorothioate
  modified_base 2: mod_base = OTHER; note = 2'-O-Methyl-cytidine phosphorothioate
  modified_base 3: mod_base = OTHER; note = 2'-O-Methyl-cytidine phosphorothioate
  modified_base 21: mod_base = OTHER; note = 2'-O-Methyl-guanosine
  modified_base 28: mod_base = OTHER; note = 2'-O-Methyl-adenosine
  modified_base 29: mod_base = OTHER; note = 2'-O-Methyl-guanosine
  modified_base 30: mod_base = OTHER; note = 2'-O-Methyl-cytidine
  modified_base 31: mod_base = OTHER; note = 2'-O-Methyl-uridine
  modified_base 32: mod_base = OTHER; note = 2'-O-Methyl-adenosine
  modified_base 33: mod_base = OTHER; note = 2'-O-Methyl-guanosine
  modified_base 34: mod_base = OTHER; note = 2'-O-Methyl-adenosine
  modified_base 35: mod_base = OTHER; note = 2'-O-Methyl-adenosine
  modified_base 36: mod_base = OTHER; note = 2'-O-Methyl-adenosine
  modified_base 37: mod_base = OTHER; note = 2'-O-Methyl-uridine
  modified_base 38: mod_base = OTHER; note = 2'-O-Methyl-adenosine
  modified_base 39: mod_base = OTHER; note = 2'-O-Methyl-guanosine
  modified_base 40: mod_base = OTHER; note = 2'-O-Methyl-cytidine
  modified_base 41: mod_base = OTHER; note = 2'-O-Methyl-adenosine
  modified_base 42: mod_base = OTHER; note = 2'-O-Methyl-adenosine
  modified_base 46: mod_base = OTHER; note = 2'-O-Methyl-adenosine
  modified_base 48: mod_base = OTHER; note = 2'-O-Methyl-adenosine
  modified_base 50: mod_base = OTHER; note = 2'-O-Methyl-uridine
  modified_base 52: mod_base = OTHER; note = 2'-O-Methyl-adenosine
  modified_base 53: mod_base = OTHER; note = 2'-O-Methyl-guanosine
  modified_base 54: mod_base = OTHER; note = 2'-O-Methyl-guanosine
  modified_base 55: mod_base = OTHER; note = 2'-O-Methyl-cytidine
  modified_base 56: mod_base = OTHER; note = 2'-O-Methyl-uridine
  modified_base 57: mod_base = OTHER; note = 2'-O-Methyl-adenosine
  modified_base 60: mod_base = OTHER; note = 2'-O-Methyl-cytidine
  modified_base 61: mod_base = OTHER; note = 2'-O-Methyl-cytidine
  modified_base 66: mod_base = OTHER; note = 2'-O-Methyl-uridine
  modified_base 67: mod_base = OTHER; note = 2'-O-Methyl-cytidine
  modified_base 70: mod_base = OTHER; note = 2'-O-Methyl-cytidine
  modified_base 71: mod_base = OTHER; note = 2'-O-Methyl-uridine
  modified_base 72: mod_base = OTHER; note = 2'-O-Methyl-uridine
  modified_base 73: mod_base = OTHER; note = 2'-O-Methyl-guanosine
  modified_base 74: mod_base = OTHER; note = 2'-O-Methyl-adenosine
  modified_base 75: mod_base = OTHER; note = 2'-O-Methyl-adenosine
  modified_base 76: mod_base = OTHER; note = 2'-O-Methyl-adenosine
  modified_base 77: mod_base = OTHER; note = 2'-O-Methyl-adenosine
  modified_base 78: mod_base = OTHER; note = 2'-O-Methyl-adenosine
  modified_base 79: mod_base = OTHER; note = 2'-O-Methyl-guanosine
  modified_base 80: mod_base = OTHER; note = 2'-O-Methyl-uridine
  modified_base 81: mod_base = OTHER; note = 2'-O-Methyl-guanosine
  modified_base 83: mod_base = OTHER; note = 2'-O-Methyl-cytidine
  modified_base 84: mod_base = OTHER; note = 2'-O-Methyl-adenosine
  modified_base 85: mod_base = OTHER; note = 2'-O-Methyl-cytidine
  modified_base 86: mod_base = OTHER; note = 2'-O-Methyl-cytidine
  modified_base 87: mod_base = OTHER; note = 2'-O-Methyl-guanosine
  modified_base 88: mod_base = OTHER; note = 2'-O-Methyl-adenosine
  modified_base 89: mod_base = OTHER; note = 2'-O-Methyl-guanosine
  modified_base 90: mod_base = OTHER; note = 2'-O-Methyl-uridine
  modified_base 91: mod_base = OTHER; note = 2'-O-Methyl-cytidine
  modified_base 92: mod_base = OTHER; note = 2'-O-Methyl-guanosine
  modified_base 93: mod_base = OTHER; note = 2'-O-Methyl-guanosine
  modified_base 94: mod_base = OTHER; note = 2'-O-Methyl-uridine
  modified_base 95: mod_base = OTHER; note = 2'-O-Methyl-guanosine
  modified_base 96: mod_base = OTHER; note = 2'-O-Methyl-cytidine
  modified_base 97: mod_base = OTHER; note = 2'-O-Methyl-uridine phosphorothioate
  modified_base 98: mod_base = OTHER; note = 2'-O-Methyl-uridine phosphorothioate
  modified_base 99: mod_base = OTHER; note = 2'-O-Methyl-uridine phosphorothioate
  modified_base 100: mod_base = OTHER; note = 2'-O-Methyl-uridine

SEQ ID NO: 2286 - RNA, 100 nt, synthetic construct; identical to SEQ ID NO: 365
  source 1..100: mol_type = other RNA
  modified_base 1: mod_base = OTHER; note = 2'-O-Methyl-guanosine phosphorothioate
  modified_base 2: mod_base = OTHER; note = 2'-O-Methyl-guanosine phosphorothioate
  modified_base 3: mod_base = OTHER; note = 2'-O-Methyl-guanosine phosphorothioate
  modified_base 21: mod_base = OTHER; note = 2'-O-Methyl-guanosine
  modified_base 28: mod_base = OTHER; note = 2'-O-Methyl-adenosine
  modified_base 29: mod_base = OTHER; note = 2'-O-Methyl-guanosine
  modified_base 30: mod_base = OTHER; note = 2'-O-Methyl-cytidine
  modified_base 31: mod_base = OTHER; note = 2'-O-Methyl-uridine
  modified_base 32: mod_base = OTHER; note = 2'-O-Methyl-adenosine
  modified_base 33: mod_base = OTHER; note = 2'-O-Methyl-guanosine
  modified_base 34: mod_base = OTHER; note = 2'-O-Methyl-adenosine
  modified_base 35: mod_base = OTHER; note = 2'-O-Methyl-adenosine
  modified_base 36: mod_base = OTHER; note = 2'-O-Methyl-adenosine
  modified_base 37: mod_base = OTHER; note = 2'-O-Methyl-uridine
  modified_base 38: mod_base = OTHER; note = 2'-O-Methyl-adenosine
  modified_base 39: mod_base = OTHER; note = 2'-O-Methyl-guanosine
  modified_base 40: mod_base = OTHER; note = 2'-O-Methyl-cytidine
  modified_base 41: mod_base = OTHER; note = 2'-O-Methyl-adenosine
  modified_base 42: mod_base = OTHER; note = 2'-O-Methyl-adenosine
  modified_base 46: mod_base = OTHER; note = 2'-O-Methyl-adenosine
  modified_base 48: mod_base = OTHER; note = 2'-O-Methyl-adenosine
  modified_base 50: mod_base = OTHER; note = 2'-O-Methyl-uridine
  modified_base 52: mod_base = OTHER; note = 2'-O-Methyl-adenosine
  modified_base 53: mod_base = OTHER; note = 2'-O-Methyl-guanosine
  modified_base 54: mod_base = OTHER; note = 2'-O-Methyl-guanosine
  modified_base 55: mod_base = OTHER; note = 2'-O-Methyl-cytidine
  modified_base 56: mod_base = OTHER; note = 2'-O-Methyl-uridine
  modified_base 57: mod_base = OTHER; note = 2'-O-Methyl-adenosine
  modified_base 60: mod_base = OTHER; note = 2'-O-Methyl-cytidine
  modified_base 61: mod_base = OTHER; note = 2'-O-Methyl-cytidine
  modified_base 66: mod_base = OTHER; note = 2'-O-Methyl-uridine
  modified_base 67: mod_base = OTHER; note = 2'-O-Methyl-cytidine
  modified_base 70: mod_base = OTHER; note = 2'-O-Methyl-cytidine
  modified_base 71: mod_base = OTHER; note = 2'-O-Methyl-uridine
  modified_base 72: mod_base = OTHER; note = 2'-O-Methyl-uridine
  modified_base 73: mod_base = OTHER; note = 2'-O-Methyl-guanosine
  modified_base 74: mod_base = OTHER; note = 2'-O-Methyl-adenosine
  modified_base 75: mod_base = OTHER; note = 2'-O-Methyl-adenosine
  modified_base 76: mod_base = OTHER; note = 2'-O-Methyl-adenosine
  modified_base 77: mod_base = OTHER; note = 2'-O-Methyl-adenosine
  modified_base 78: mod_base = OTHER; note = 2'-O-Methyl-adenosine
  modified_base 79: mod_base = OTHER; note = 2'-O-Methyl-guanosine
  modified_base 80: mod_base = OTHER; note = 2'-O-Methyl-uridine
  modified_base 81: mod_base = OTHER; note = 2'-O-Methyl-guanosine
  modified_base 83: mod_base = OTHER; note = 2'-O-Methyl-cytidine
  modified_base 84: mod_base = OTHER; note = 2'-O-Methyl-adenosine
  modified_base 85: mod_base = OTHER; note = 2'-O-Methyl-cytidine
  modified_base 86: mod_base = OTHER; note = 2'-O-Methyl-cytidine
  modified_base 87: mod_base = OTHER; note = 2'-O-Methyl-guanosine
  modified_base 88: mod_base = OTHER; note = 2'-O-Methyl-adenosine
  modified_base 89: mod_base = OTHER; note = 2'-O-Methyl-guanosine
  modified_base 90: mod_base = OTHER; note = 2'-O-Methyl-uridine
  modified_base 91: mod_base = OTHER; note = 2'-O-Methyl-cytidine
  modified_base 92: mod_base = OTHER; note = 2'-O-Methyl-guanosine
  modified_base 93: mod_base = OTHER; note = 2'-O-Methyl-guanosine
  modified_base 94: mod_base = OTHER; note = 2'-O-Methyl-uridine
  modified_base 95: mod_base = OTHER; note = 2'-O-Methyl-guanosine
  modified_base 96: mod_base = OTHER; note = 2'-O-Methyl-cytidine
  modified_base 97: mod_base = OTHER; note = 2'-O-Methyl-uridine phosphorothioate
  modified_base 98: mod_base = OTHER; note = 2'-O-Methyl-uridine phosphorothioate
  modified_base 99: mod_base = OTHER; note = 2'-O-Methyl-uridine phosphorothioate
  modified_base 100: mod_base = OTHER; note = 2'-O-Methyl-uridine

SEQ ID NO: 2287 - RNA, 100 nt, synthetic construct; identical to SEQ ID NO: 372
  source 1..100: mol_type = other RNA
  modified_base 1: mod_base = OTHER; note = 2'-O-Methyl-cytidine phosphorothioate
  modified_base 2: mod_base = OTHER; note = 2'-O-Methyl-uridine phosphorothioate
  modified_base 3: mod_base = OTHER; note = 2'-O-Methyl-adenosine phosphorothioate
  modified_base 21: mod_base = OTHER; note = 2'-O-Methyl-guanosine
  modified_base 28: mod_base = OTHER; note = 2'-O-Methyl-adenosine
  modified_base 29: mod_base = OTHER; note = 2'-O-Methyl-guanosine
  modified_base 30: mod_base = OTHER; note = 2'-O-Methyl-cytidine
  modified_base 31: mod_base = OTHER; note = 2'-O-Methyl-uridine
  modified_base 32: mod_base = OTHER; note = 2'-O-Methyl-adenosine
  modified_base 33: mod_base = OTHER; note = 2'-O-Methyl-guanosine
  modified_base 34: mod_base = OTHER; note = 2'-O-Methyl-adenosine
  modified_base 35: mod_base = OTHER; note = 2'-O-Methyl-adenosine
  modified_base 36: mod_base = OTHER; note = 2'-O-Methyl-adenosine
  modified_base 37: mod_base = OTHER; note = 2'-O-Methyl-uridine
  modified_base 38: mod_base = OTHER; note = 2'-O-Methyl-adenosine
  modified_base 39: mod_base = OTHER; note = 2'-O-Methyl-guanosine
  modified_base 40: mod_base = OTHER; note = 2'-O-Methyl-cytidine
  modified_base 41: mod_base = OTHER; note = 2'-O-Methyl-adenosine
  modified_base 42: mod_base = OTHER; note = 2'-O-Methyl-adenosine
  modified_base 46: mod_base = OTHER; note = 2'-O-Methyl-adenosine
  modified_base 48: mod_base = OTHER; note = 2'-O-Methyl-adenosine
  modified_base 50: mod_base = OTHER; note = 2'-O-Methyl-uridine
  modified_base 52: mod_base = OTHER; note = 2'-O-Methyl-adenosine
  modified_base 53: mod_base = OTHER; note = 2'-O-Methyl-guanosine
  modified_base 54: mod_base = OTHER; note = 2'-O-Methyl-guanosine
  modified_base 55: mod_base = OTHER; note = 2'-O-Methyl-cytidine
  modified_base 56: mod_base = OTHER; note = 2'-O-Methyl-uridine
  modified_base 57: mod_base = OTHER; note = 2'-O-Methyl-adenosine
  modified_base 60: mod_base = OTHER; note = 2'-O-Methyl-cytidine
  modified_base 61: mod_base = OTHER; note = 2'-O-Methyl-cytidine
  modified_base 66: mod_base = OTHER; note = 2'-O-Methyl-uridine
  modified_base 67: mod_base = OTHER; note = 2'-O-Methyl-cytidine
  modified_base 70: mod_base = OTHER; note = 2'-O-Methyl-cytidine
  modified_base 71: mod_base = OTHER; note = 2'-O-Methyl-uridine
  modified_base 72: mod_base = OTHER; note = 2'-O-Methyl-uridine
  modified_base 73: mod_base = OTHER; note = 2'-O-Methyl-guanosine
  modified_base 74: mod_base = OTHER; note = 2'-O-Methyl-adenosine
  modified_base 75: mod_base = OTHER; note = 2'-O-Methyl-adenosine
  modified_base 76: mod_base = OTHER; note = 2'-O-Methyl-adenosine
  modified_base 77: mod_base = OTHER; note = 2'-O-Methyl-adenosine
  modified_base 78: mod_base = OTHER; note = 2'-O-Methyl-adenosine
  modified_base 79: mod_base = OTHER; note = 2'-O-Methyl-guanosine
  modified_base 80: mod_base = OTHER; note = 2'-O-Methyl-uridine
  modified_base 81: mod_base = OTHER; note = 2'-O-Methyl-guanosine
  modified_base 83: mod_base = OTHER; note = 2'-O-Methyl-cytidine
  modified_base 84: mod_base = OTHER; note = 2'-O-Methyl-adenosine
  modified_base 85: mod_base = OTHER; note = 2'-O-Methyl-cytidine
  modified_base 86: mod_base = OTHER; note = 2'-O-Methyl-cytidine
  modified_base 87: mod_base = OTHER; note = 2'-O-Methyl-guanosine
  modified_base 88: mod_base = OTHER; note = 2'-O-Methyl-adenosine
  modified_base 89: mod_base = OTHER; note = 2'-O-Methyl-guanosine
  modified_base 90: mod_base = OTHER; note = 2'-O-Methyl-uridine
  modified_base 91: mod_base = OTHER; note = 2'-O-Methyl-cytidine
  modified_base 92: mod_base = OTHER; note = 2'-O-Methyl-guanosine
  modified_base 93: mod_base = OTHER; note = 2'-O-Methyl-guanosine
  modified_base 94: mod_base = OTHER; note = 2'-O-Methyl-uridine
  modified_base 95: mod_base = OTHER; note = 2'-O-Methyl-guanosine
  modified_base 96: mod_base = OTHER; note = 2'-O-Methyl-cytidine
  modified_base 97: mod_base = OTHER; note = 2'-O-Methyl-uridine phosphorothioate
  modified_base 98: mod_base = OTHER; note = 2'-O-Methyl-uridine phosphorothioate
  modified_base 99: mod_base = OTHER; note = 2'-O-Methyl-uridine phosphorothioate
  modified_base 100: mod_base = OTHER; note = 2'-O-Methyl-uridine

SEQ ID NO: 2288 - RNA, 100 nt, synthetic construct; identical to SEQ ID NO: 382
  source 1..100: mol_type = other RNA
  modified_base 1: mod_base = OTHER; note = 2'-O-Methyl-cytidine phosphorothioate
  modified_base 2: mod_base = OTHER; note = 2'-O-Methyl-uridine phosphorothioate
  modified_base 3: mod_base = OTHER; note = 2'-O-Methyl-guanosine phosphorothioate
  modified_base 21: mod_base = OTHER; note = 2'-O-Methyl-guanosine
  modified_base 28: mod_base = OTHER; note = 2'-O-Methyl-adenosine
  modified_base 29: mod_base = OTHER; note = 2'-O-Methyl-guanosine
  modified_base 30: mod_base = OTHER; note = 2'-O-Methyl-cytidine
  modified_base 31: mod_base = OTHER; note = 2'-O-Methyl-uridine
  modified_base 32: mod_base = OTHER; note = 2'-O-Methyl-adenosine
  modified_base 33: mod_base = OTHER; note = 2'-O-Methyl-guanosine
  modified_base 34: mod_base = OTHER; note = 2'-O-Methyl-adenosine
  modified_base 35: mod_base = OTHER; note = 2'-O-Methyl-adenosine
  modified_base 36: mod_base = OTHER; note = 2'-O-Methyl-adenosine
  modified_base 37: mod_base = OTHER; note = 2'-O-Methyl-uridine
  modified_base 38: mod_base = OTHER; note = 2'-O-Methyl-adenosine
  modified_base 39: mod_base = OTHER; note = 2'-O-Methyl-guanosine
  modified_base 40: mod_base = OTHER; note = 2'-O-Methyl-cytidine
  modified_base 41: mod_base = OTHER; note = 2'-O-Methyl-adenosine
  modified_base 42: mod_base = OTHER; note = 2'-O-Methyl-adenosine
  modified_base 46: mod_base = OTHER; note = 2'-O-Methyl-adenosine
  modified_base 48: mod_base = OTHER; note = 2'-O-Methyl-adenosine
  modified_base 50: mod_base = OTHER; note = 2'-O-Methyl-uridine
  modified_base 52: mod_base = OTHER; note = 2'-O-Methyl-adenosine
  modified_base 53: mod_base = OTHER; note = 2'-O-Methyl-guanosine
  modified_base 54: mod_base = OTHER; note = 2'-O-Methyl-guanosine
  modified_base 55: mod_base = OTHER; note = 2'-O-Methyl-cytidine
  modified_base 56: mod_base = OTHER; note = 2'-O-Methyl-uridine
  modified_base 57: mod_base = OTHER; note = 2'-O-Methyl-adenosine
  modified_base 60: mod_base = OTHER; note = 2'-O-Methyl-cytidine
  modified_base 61: mod_base = OTHER; note = 2'-O-Methyl-cytidine
  modified_base 66: mod_base = OTHER; note = 2'-O-Methyl-uridine
  modified_base 67: mod_base = OTHER; note = 2'-O-Methyl-cytidine
  modified_base 70: mod_base = OTHER; note = 2'-O-Methyl-cytidine
  modified_base 71: mod_base = OTHER; note = 2'-O-Methyl-uridine
  modified_base 72: mod_base = OTHER; note = 2'-O-Methyl-uridine
  modified_base 73: mod_base = OTHER; note = 2'-O-Methyl-guanosine
  modified_base 74: mod_base = OTHER; note = 2'-O-Methyl-adenosine
  modified_base 75: mod_base = OTHER; note = 2'-O-Methyl-adenosine
  modified_base 76: mod_base = OTHER; note = 2'-O-Methyl-adenosine
  modified_base 77: mod_base = OTHER; note = 2'-O-Methyl-adenosine
  modified_base 78: mod_base = OTHER; note = 2'-O-Methyl-adenosine
  modified_base 79: mod_base = OTHER; note = 2'-O-Methyl-guanosine
  modified_base 80: mod_base = OTHER; note = 2'-O-Methyl-uridine
  modified_base 81: mod_base = OTHER; note = 2'-O-Methyl-guanosine
  modified_base 83: mod_base = OTHER; note = 2'-O-Methyl-cytidine
  modified_base 84: mod_base = OTHER; note = 2'-O-Methyl-adenosine
  modified_base 85: mod_base = OTHER; note = 2'-O-Methyl-cytidine
  modified_base 86: mod_base = OTHER; note = 2'-O-Methyl-cytidine
  modified_base 87: mod_base = OTHER; note = 2'-O-Methyl-guanosine
  modified_base 88: mod_base = OTHER; note = 2'-O-Methyl-adenosine
  modified_base 89: mod_base = OTHER; note = 2'-O-Methyl-guanosine
  modified_base 90: mod_base = OTHER; note = 2'-O-Methyl-uridine
  modified_base 91: mod_base = OTHER; note = 2'-O-Methyl-cytidine
  modified_base 92: mod_base = OTHER; note = 2'-O-Methyl-guanosine
  modified_base 93: mod_base = OTHER; note = 2'-O-Methyl-guanosine
  modified_base 94: mod_base = OTHER; note = 2'-O-Methyl-uridine
  modified_base 95: mod_base = OTHER; note = 2'-O-Methyl-guanosine
  modified_base 96: mod_base = OTHER; note = 2'-O-Methyl-cytidine
  modified_base 97: mod_base = OTHER; note = 2'-O-Methyl-uridine phosphorothioate
  modified_base 98: mod_base = OTHER; note = 2'-O-Methyl-uridine phosphorothioate
  modified_base 99: mod_base = OTHER; note = 2'-O-Methyl-uridine phosphorothioate
  modified_base 100: mod_base = OTHER; note = 2'-O-Methyl-uridine

SEQ ID NO: 2289 - RNA, 100 nt, synthetic construct; identical to SEQ ID NO: 384
  source 1..100: mol_type = other RNA
  modified_base 1: mod_base = OTHER; note = 2'-O-Methyl-cytidine phosphorothioate
  modified_base 2: mod_base = OTHER; note = 2'-O-Methyl-guanosine phosphorothioate
  modified_base 3: mod_base = OTHER; note = 2'-O-Methyl-guanosine phosphorothioate
  modified_base 21: mod_base = OTHER; note = 2'-O-Methyl-guanosine
  modified_base 28: mod_base = OTHER; note = 2'-O-Methyl-adenosine
  modified_base 29: mod_base = OTHER; note = 2'-O-Methyl-guanosine
  modified_base 30: mod_base = OTHER; note = 2'-O-Methyl-cytidine
  modified_base 31: mod_base = OTHER; note = 2'-O-Methyl-uridine
  modified_base 32: mod_base = OTHER; note = 2'-O-Methyl-adenosine
  modified_base 33: mod_base = OTHER; note = 2'-O-Methyl-guanosine
  modified_base 34: mod_base = OTHER; note = 2'-O-Methyl-adenosine
  modified_base 35: mod_base = OTHER; note = 2'-O-Methyl-adenosine
  modified_base 36: mod_base = OTHER; note = 2'-O-Methyl-adenosine
  modified_base 37: mod_base = OTHER; note = 2'-O-Methyl-uridine
  modified_base 38: mod_base = OTHER; note = 2'-O-Methyl-adenosine
  modified_base 39: mod_base = OTHER; note = 2'-O-Methyl-guanosine
  modified_base 40: mod_base = OTHER; note = 2'-O-Methyl-cytidine
  modified_base 41: mod_base = OTHER; note = 2'-O-Methyl-adenosine
  modified_base 42: mod_base = OTHER; note = 2'-O-Methyl-adenosine
  modified_base 46: mod_base = OTHER; note = 2'-O-Methyl-adenosine
  modified_base 48: mod_base = OTHER; note = 2'-O-Methyl-adenosine
  modified_base 50: mod_base = OTHER; note = 2'-O-Methyl-uridine
  modified_base 52: mod_base = OTHER; note = 2'-O-Methyl-adenosine
  modified_base 53: mod_base = OTHER; note = 2'-O-Methyl-guanosine
  modified_base 54: mod_base = OTHER; note = 2'-O-Methyl-guanosine
  modified_base 55: mod_base = OTHER; note = 2'-O-Methyl-cytidine
  modified_base 56: mod_base = OTHER; note = 2'-O-Methyl-uridine
  modified_base 57: mod_base = OTHER; note = 2'-O-Methyl-adenosine
  modified_base 60: mod_base = OTHER; note = 2'-O-Methyl-cytidine
  modified_base 61: mod_base = OTHER; note = 2'-O-Methyl-cytidine
  modified_base 66: mod_base = OTHER; note = 2'-O-Methyl-uridine
  modified_base 67: mod_base = OTHER; note = 2'-O-Methyl-cytidine
  modified_base 70: mod_base = OTHER; note = 2'-O-Methyl-cytidine
  modified_base 71: mod_base = OTHER; note = 2'-O-Methyl-uridine
  modified_base 72: mod_base = OTHER; note = 2'-O-Methyl-uridine
  modified_base 73: mod_base = OTHER; note = 2'-O-Methyl-guanosine
  modified_base 74: mod_base = OTHER; note = 2'-O-Methyl-adenosine
  modified_base 75: mod_base = OTHER; note = 2'-O-Methyl-adenosine
  modified_base 76: mod_base = OTHER; note = 2'-O-Methyl-adenosine
  modified_base 77: mod_base = OTHER; note = 2'-O-Methyl-adenosine
  modified_base 78: mod_base = OTHER; note = 2'-O-Methyl-adenosine
  modified_base 79: mod_base = OTHER; note = 2'-O-Methyl-guanosine
  modified_base 80: mod_base = OTHER; note = 2'-O-Methyl-uridine
  modified_base 81: mod_base = OTHER; note = 2'-O-Methyl-guanosine
  modified_base 83: mod_base = OTHER; note = 2'-O-Methyl-cytidine
  modified_base 84: mod_base = OTHER; note = 2'-O-Methyl-adenosine
  modified_base 85: mod_base = OTHER; note = 2'-O-Methyl-cytidine
  modified_base 86: mod_base = OTHER; note = 2'-O-Methyl-cytidine
  modified_base 87: mod_base = OTHER; note = 2'-O-Methyl-guanosine
  modified_base 88: mod_base = OTHER; note = 2'-O-Methyl-adenosine
  modified_base 89: mod_base = OTHER; note = 2'-O-Methyl-guanosine
  modified_base 90: mod_base = OTHER; note = 2'-O-Methyl-uridine
  modified_base 91: mod_base = OTHER; note = 2'-O-Methyl-cytidine
  modified_base 92: mod_base = OTHER; note = 2'-O-Methyl-guanosine
  modified_base 93: mod_base = OTHER; note = 2'-O-Methyl-guanosine
  modified_base 94: mod_base = OTHER; note = 2'-O-Methyl-uridine
  modified_base 95: mod_base = OTHER; note = 2'-O-Methyl-guanosine
  modified_base 96: mod_base = OTHER; note = 2'-O-Methyl-cytidine
  modified_base 97: mod_base = OTHER; note = 2'-O-Methyl-uridine phosphorothioate
  modified_base 98: mod_base = OTHER; note = 2'-O-Methyl-uridine phosphorothioate
  modified_base 99: mod_base = OTHER; note = 2'-O-Methyl-uridine phosphorothioate
  modified_base 100: mod_base = OTHER; note = 2'-O-Methyl-uridine

SEQ ID NO: 2290 - RNA, 100 nt, synthetic construct; identical to SEQ ID NO: 390
  source 1..100: mol_type = other RNA
  modified_base 1: mod_base = OTHER; note = 2'-O-Methyl-cytidine phosphorothioate
  modified_base 2: mod_base = OTHER; note = 2'-O-Methyl-guanosine phosphorothioate
  modified_base 3: mod_base = OTHER; note = 2'-O-Methyl-cytidine phosphorothioate
  modified_base 21: mod_base = OTHER; note = 2'-O-Methyl-guanosine
  modified_base 28: mod_base = OTHER; note = 2'-O-Methyl-adenosine
  modified_base 29: mod_base = OTHER; note = 2'-O-Methyl-guanosine
  modified_base 30: mod_base = OTHER; note = 2'-O-Methyl-cytidine
  modified_base 31: mod_base = OTHER; note = 2'-O-Methyl-uridine
  modified_base 32: mod_base = OTHER; note = 2'-O-Methyl-adenosine
  modified_base 33: mod_base = OTHER; note = 2'-O-Methyl-guanosine
  modified_base 34: mod_base = OTHER; note = 2'-O-Methyl-adenosine
  modified_base 35: mod_base = OTHER; note = 2'-O-Methyl-adenosine
  modified_base 36: mod_base = OTHER; note = 2'-O-Methyl-adenosine
  modified_base 37: mod_base = OTHER; note = 2'-O-Methyl-uridine
  modified_base 38: mod_base = OTHER; note = 2'-O-Methyl-adenosine
  modified_base 39: mod_base = OTHER; note = 2'-O-Methyl-guanosine
  modified_base 40: mod_base = OTHER; note = 2'-O-Methyl-cytidine
  modified_base 41: mod_base = OTHER; note = 2'-O-Methyl-adenosine
  modified_base 42: mod_base = OTHER; note = 2'-O-Methyl-adenosine
  modified_base 46: mod_base = OTHER; note = 2'-O-Methyl-adenosine
  modified_base 48: mod_base = OTHER; note = 2'-O-Methyl-adenosine
  modified_base 50: mod_base = OTHER; note = 2'-O-Methyl-uridine
  modified_base 52: mod_base = OTHER; note = 2'-O-Methyl-adenosine
  modified_base 53: mod_base = OTHER; note = 2'-O-Methyl-guanosine
  modified_base 54: mod_base = OTHER; note = 2'-O-Methyl-guanosine
  modified_base 55: mod_base = OTHER; note = 2'-O-Methyl-cytidine
  modified_base 56: mod_base = OTHER; note = 2'-O-Methyl-uridine
  modified_base 57: mod_base = OTHER; note = 2'-O-Methyl-adenosine
  modified_base 60: mod_base = OTHER; note = 2'-O-Methyl-cytidine
  modified_base 61: mod_base = OTHER; note = 2'-O-Methyl-cytidine
  modified_base 66: mod_base = OTHER; note = 2'-O-Methyl-uridine
  modified_base 67: mod_base = OTHER; note = 2'-O-Methyl-cytidine
  modified_base 70: mod_base = OTHER; note = 2'-O-Methyl-cytidine
  modified_base 71: mod_base = OTHER; note = 2'-O-Methyl-uridine
  modified_base 72: mod_base = OTHER; note = 2'-O-Methyl-uridine
  modified_base 73: mod_base = OTHER; note = 2'-O-Methyl-guanosine
  modified_base 74: mod_base = OTHER; note = 2'-O-Methyl-adenosine
  modified_base 75: mod_base = OTHER; note = 2'-O-Methyl-adenosine
  modified_base 76: mod_base = OTHER; note = 2'-O-Methyl-adenosine
  modified_base 77: mod_base = OTHER; note = 2'-O-Methyl-adenosine
  modified_base 78: mod_base = OTHER; note = 2'-O-Methyl-adenosine
  modified_base 79: mod_base = OTHER; note = 2'-O-Methyl-guanosine
  modified_base 80: mod_base = OTHER; note = 2'-O-Methyl-uridine
  modified_base 81: mod_base = OTHER; note = 2'-O-Methyl-guanosine
  modified_base 83: mod_base = OTHER; note = 2'-O-Methyl-cytidine
  modified_base 84: mod_base = OTHER; note = 2'-O-Methyl-adenosine
  modified_base 85: mod_base = OTHER; note = 2'-O-Methyl-cytidine
  modified_base 86: mod_base = OTHER; note = 2'-O-Methyl-cytidine
  modified_base 87: mod_base = OTHER; note = 2'-O-Methyl-guanosine
  modified_base 88: mod_base = OTHER; note = 2'-O-Methyl-adenosine
  modified_base 89: mod_base = OTHER; note = 2'-O-Methyl-guanosine
  modified_base 90: mod_base = OTHER; note = 2'-O-Methyl-uridine
  modified_base 91: mod_base = OTHER; note = 2'-O-Methyl-cytidine
  modified_base 92: mod_base = OTHER; note = 2'-O-Methyl-guanosine
  modified_base 93: mod_base = OTHER; note = 2'-O-Methyl-guanosine
  modified_base 94: mod_base = OTHER; note = 2'-O-Methyl-uridine
  modified_base 95: mod_base = OTHER; note = 2'-O-Methyl-guanosine
  modified_base 96: mod_base = OTHER; note = 2'-O-Methyl-cytidine
  modified_base 97: mod_base = OTHER; note = 2'-O-Methyl-uridine phosphorothioate
  modified_base 98: mod_base = OTHER; note = 2'-O-Methyl-uridine phosphorothioate
  modified_base 99: mod_base = OTHER; note = 2'-O-Methyl-uridine phosphorothioate
  modified_base 100: mod_base = OTHER; note = 2'-O-Methyl-uridine

SEQ ID NO: 2291 - RNA, 100 nt, synthetic construct; identical to SEQ ID NO: 421
  source 1..100: mol_type = other RNA
  modified_base 1: mod_base = OTHER; note = 2'-O-Methyl-cytidine phosphorothioate
  modified_base 2: mod_base = OTHER; note = 2'-O-Methyl-cytidine phosphorothioate
  modified_base 3: mod_base = OTHER; note = 2'-O-Methyl-cytidine phosphorothioate
  modified_base 97: mod_base = OTHER; note = uridine phosphorothioate
  modified_base 98: mod_base = OTHER; note = 2'-O-Methyl-uridine phosphorothioate
  modified_base 99: mod_base = OTHER; note = 2'-O-Methyl-uridine phosphorothioate
  modified_base 100: mod_base = OTHER; note = 2'-O-Methyl-uridine

SEQ ID NO: 2292 - RNA, 100 nt, synthetic construct; identical to SEQ ID NO: 253
  source 1..100: mol_type = other RNA
  modified_base 1: mod_base = OTHER; note = 2'-O-Methyl-guanosine phosphorothioate
  modified_base 2: mod_base = OTHER; note = 2'-O-Methyl-guanosine phosphorothioate
  modified_base 3: mod_base = OTHER; note = 2'-O-Methyl-uridine phosphorothioate
  modified_base 21: mod_base = OTHER; note = 2'-O-Methyl-guanosine
  modified_base 25: mod_base = OTHER; note = 2'-O-Methyl-uridine
  modified_base 28: mod_base = OTHER; note = 2'-O-Methyl-adenosine
  modified_base 29: mod_base = OTHER; note = 2'-O-Methyl-guanosine
  modified_base 30: mod_base = OTHER; note = 2'-O-Methyl-cytidine
  modified_base 31: mod_base = OTHER; note = 2'-O-Methyl-uridine
  modified_base 32: mod_base = OTHER; note = 2'-O-Methyl-adenosine
  modified_base 33: mod_base = OTHER; note = 2'-O-Methyl-guanosine
  modified_base 34: mod_base = OTHER; note = 2'-O-Methyl-adenosine
  modified_base 35: mod_base = OTHER; note = 2'-O-Methyl-adenosine
  modified_base 36: mod_base = OTHER; note = 2'-O-Methyl-adenosine
  modified_base 37: mod_base = OTHER; note = 2'-O-Methyl-uridine
  modified_base 38: mod_base = OTHER; note = 2'-O-Methyl-adenosine
  modified_base 39: mod_base = OTHER; note = 2'-O-Methyl-guanosine
  modified_base 40: mod_base = OTHER; note = 2'-O-Methyl-cytidine
  modified_base 41: mod_base = OTHER; note = 2'-O-Methyl-adenosine
  modified_base 42: mod_base = OTHER; note = 2'-O-Methyl-adenosine
  modified_base 46: mod_base = OTHER; note = 2'-O-Methyl-adenosine
  modified_base 48: mod_base = OTHER; note = 2'-O-Methyl-adenosine
  modified_base 50: mod_base = OTHER; note = 2'-O-Methyl-uridine
  modified_base 52: mod_base = OTHER; note = 2'-O-Methyl-adenosine
  modified_base 53: mod_base = OTHER; note = 2'-O-Methyl-guanosine
  modified_base 54: mod_base = OTHER; note = 2'-O-Methyl-guanosine
  modified_base 55: mod_base = OTHER; note = 2'-O-Methyl-cytidine
  modified_base 56: mod_base = OTHER; note = 2'-O-Methyl-uridine
  modified_base 57: mod_base = OTHER; note = 2'-O-Methyl-adenosine
  modified_base 60: mod_base = OTHER; note = 2'-O-Methyl-cytidine
  modified_base 61: mod_base = OTHER; note = 2'-O-Methyl-cytidine
  modified_base 66: mod_base = OTHER; note = 2'-O-Methyl-uridine
  modified_base 67: mod_base = OTHER; note = 2'-O-Methyl-cytidine
  modified_base 70: mod_base = OTHER; note = 2'-O-Methyl-cytidine
  modified_base 71: mod_base = OTHER; note = 2'-O-Methyl-uridine
  modified_base 72: mod_base = OTHER; note = 2'-O-Methyl-uridine
  modified_base 73: mod_base = OTHER; note = 2'-O-Methyl-guanosine
  modified_base 74: mod_base = OTHER; note = 2'-O-Methyl-adenosine
  modified_base 75: mod_base = OTHER; note = 2'-O-Methyl-adenosine
  modified_base 76: mod_base = OTHER; note = 2'-O-Methyl-adenosine
  modified_base 77: mod_base = OTHER; note = 2'-O-Methyl-adenosine
  modified_base 78: mod_base = OTHER; note = 2'-O-Methyl-adenosine
  modified_base 79: mod_base = OTHER; note = 2'-O-Methyl-guanosine
  modified_base 80: mod_base = OTHER; note = 2'-O-Methyl-uridine
  modified_base 81: mod_base = OTHER; note = 2'-O-Methyl-guanosine
  modified_base 83: mod_base = OTHER; note = 2'-O-Methyl-cytidine
  modified_base 84: mod_base = OTHER; note = 2'-O-Methyl-adenosine
  modified_base 85: mod_base = OTHER; note = 2'-O-Methyl-cytidine
  modified_base 86: mod_base = OTHER; note = 2'-O-Methyl-cytidine
  modified_base 87: mod_base = OTHER; note = 2'-O-Methyl-guanosine
  modified_base 88: mod_base = OTHER; note = 2'-O-Methyl-adenosine
  modified_base 89: mod_base = OTHER; note = 2'-O-Methyl-guanosine
  modified_base 90: mod_base = OTHER; note = 2'-O-Methyl-uridine
  modified_base 91: mod_base = OTHER; note = 2'-O-Methyl-cytidine
  modified_base 92: mod_base = OTHER; note = 2'-O-Methyl-guanosine
  modified_base 93: mod_base = OTHER; note = 2'-O-Methyl-guanosine
  modified_base 94: mod_base = OTHER; note = 2'-O-Methyl-uridine
  modified_base 95: mod_base = OTHER; note = 2'-O-Methyl-guanosine
  modified_base 96: mod_base = OTHER; note = 2'-O-Methyl-cytidine
  modified_base 97: mod_base = OTHER; note = 2'-O-Methyl-uridine phosphorothioate
  modified_base 98: mod_base = OTHER; note = 2'-O-Methyl-uridine phosphorothioate
  modified_base 99: mod_base = OTHER; note = 2'-O-Methyl-uridine phosphorothioate
  modified_base 100: mod_base = OTHER; note = 2'-O-Methyl-uridine

SEQ ID NO: 2293 - RNA, 100 nt, synthetic construct; identical to SEQ ID NO: 253
  source 1..100: mol_type = other RNA
  modified_base 1: mod_base = OTHER; note = 2'-O-Methyl-guanosine phosphorothioate
  modified_base 2: mod_base = OTHER; note = 2'-O-Methyl-guanosine phosphorothioate
  modified_base 3: mod_base = OTHER; note = 2'-O-Methyl-uridine phosphorothioate
  modified_base 21: mod_base = OTHER; note = 2'-O-Methyl-guanosine
  modified_base 28: mod_base = OTHER; note = 2'-O-Methyl-adenosine
  modified_base 29: mod_base = OTHER; note = 2'-O-Methyl-guanosine
  modified_base 30: mod_base = OTHER; note = 2'-O-Methyl-cytidine
  modified_base 31: mod_base = OTHER; note = 2'-O-Methyl-uridine
  modified_base 32: mod_base = OTHER; note = 2'-O-Methyl-adenosine
  modified_base 33: mod_base = OTHER; note = 2'-O-Methyl-guanosine
  modified_base 34: mod_base = OTHER; note = 2'-O-Methyl-adenosine
  modified_base 35: mod_base = OTHER; note = 2'-O-Methyl-adenosine
  modified_base 36: mod_base = OTHER; note = 2'-O-Methyl-adenosine
  modified_base 37: mod_base = OTHER; note = 2'-O-Methyl-uridine
  modified_base 38: mod_base = OTHER; note = 2'-O-Methyl-adenosine
  modified_base 39: mod_base = OTHER; note = 2'-O-Methyl-guanosine
  modified_base 40: mod_base = OTHER; note = 2'-O-Methyl-cytidine
  modified_base 41: mod_base = OTHER; note = 2'-O-Methyl-adenosine
  modified_base 42: mod_base = OTHER; note = 2'-O-Methyl-adenosine
  modified_base 46: mod_base = OTHER; note = 2'-O-Methyl-adenosine
  modified_base 48: mod_base = OTHER; note = 2'-O-Methyl-adenosine
  modified_base 50: mod_base = OTHER; note = 2'-O-Methyl-uridine
  modified_base 52: mod_base = OTHER; note = 2'-O-Methyl-adenosine
  modified_base 53: mod_base = OTHER; note = 2'-O-Methyl-guanosine
  modified_base 54: mod_base = OTHER; note = 2'-O-Methyl-guanosine
  modified_base 55: mod_base = OTHER; note = 2'-O-Methyl-cytidine
  modified_base 56: mod_base = OTHER; note = 2'-O-Methyl-uridine
  modified_base 57: mod_base = OTHER; note = 2'-O-Methyl-adenosine
  modified_base 60: mod_base = OTHER; note = 2'-O-Methyl-cytidine
  modified_base 61: mod_base = OTHER; note = 2'-O-Methyl-cytidine
  modified_base 64: mod_base = OTHER; note = 2'-O-Methyl-uridine
  modified_base 66: mod_base = OTHER; note = 2'-O-Methyl-uridine
  modified_base 67: mod_base = OTHER; note = 2'-O-Methyl-cytidine
  modified_base 70: mod_base = OTHER; note = 2'-O-Methyl-cytidine
  modified_base 71: mod_base = OTHER; note = 2'-O-Methyl-uridine
  modified_base 72: mod_base = OTHER; note = 2'-O-Methyl-uridine
  modified_base 73: mod_base = OTHER; note = 2'-O-Methyl-guanosine
  modified_base 74: mod_base = OTHER; note = 2'-O-Methyl-adenosine
  modified_base 75: mod_base = OTHER; note = 2'-O-Methyl-adenosine
  modified_base 76: mod_base = OTHER; note = 2'-O-Methyl-adenosine
  modified_base 77: mod_base = OTHER; note = 2'-O-Methyl-adenosine
  modified_base 78: mod_base = OTHER; note = 2'-O-Methyl-adenosine
  modified_base 79: mod_base = OTHER; note = 2'-O-Methyl-guanosine
  modified_base 80: mod_base = OTHER; note = 2'-O-Methyl-uridine
  modified_base 81: mod_base = OTHER; note = 2'-O-Methyl-guanosine
  modified_base 83: mod_base = OTHER; note = 2'-O-Methyl-cytidine
  modified_base 84: mod_base = OTHER; note = 2'-O-Methyl-adenosine
  modified_base 85: mod_base = OTHER; note = 2'-O-Methyl-cytidine
  modified_base 86: mod_base = OTHER; note = 2'-O-Methyl-cytidine
  modified_base 87: mod_base = OTHER; note = 2'-O-Methyl-guanosine
  modified_base 88: mod_base = OTHER; note = 2'-O-Methyl-adenosine
  modified_base 89: mod_base = OTHER; note = 2'-O-Methyl-guanosine
  modified_base 90: mod_base = OTHER; note = 2'-O-Methyl-uridine
  modified_base 91: mod_base = OTHER; note = 2'-O-Methyl-cytidine
  modified_base 92: mod_base = OTHER; note = 2'-O-Methyl-guanosine
  modified_base 93: mod_base = OTHER; note = 2'-O-Methyl-guanosine
  modified_base 94: mod_base = OTHER; note = 2'-O-Methyl-uridine
  modified_base 95: mod_base = OTHER; note = 2'-O-Methyl-guanosine
  modified_base 96: mod_base = OTHER; note = 2'-O-Methyl-cytidine
  modified_base 97: mod_base = OTHER; note = 2'-O-Methyl-uridine phosphorothioate
  modified_base 98: mod_base = OTHER; note = 2'-O-Methyl-uridine phosphorothioate
  modified_base 99: mod_base = OTHER; note = 2'-O-Methyl-uridine phosphorothioate
  modified_base 100: mod_base = OTHER; note = 2'-O-Methyl-uridine

SEQ ID NO: 2294 - RNA, 100 nt, synthetic construct; identical to SEQ ID NO: 253
  source 1..100: mol_type = other RNA
  modified_base 1: mod_base = OTHER; note = 2'-O-Methyl-guanosine phosphorothioate
  modified_base 2: mod_base = OTHER; note = 2'-O-Methyl-guanosine phosphorothioate
  modified_base 3: mod_base = OTHER; note = 2'-O-Methyl-uridine phosphorothioate
  modified_base 21: mod_base = OTHER; note = 2'-O-Methyl-guanosine
  modified_base 25: mod_base = OTHER; note = 2'-O-Methyl-uridine
  modified_base 28: mod_base = OTHER; note = 2'-O-Methyl-adenosine
  modified_base 29: mod_base = OTHER; note = 2'-O-Methyl-guanosine
  modified_base 30: mod_base = OTHER; note = 2'-O-Methyl-cytidine
  modified_base 31: mod_base = OTHER; note = 2'-O-Methyl-uridine
  modified_base 32: mod_base = OTHER; note = 2'-O-Methyl-adenosine
  modified_base 33: mod_base = OTHER; note = 2'-O-Methyl-guanosine
  modified_base 34: mod_base = OTHER; note = 2'-O-Methyl-adenosine
  modified_base 35: mod_base = OTHER; note = 2'-O-Methyl-adenosine
  modified_base 36: mod_base = OTHER; note = 2'-O-Methyl-adenosine
  modified_base 37: mod_base = OTHER; note = 2'-O-Methyl-uridine
  modified_base 38: mod_base = OTHER; note = 2'-O-Methyl-adenosine
  modified_base 39: mod_base = OTHER; note = 2'-O-Methyl-guanosine
  modified_base 40: mod_base = OTHER; note = 2'-O-Methyl-cytidine
  modified_base 41: mod_base = OTHER; note = 2'-O-Methyl-adenosine
  modified_base 42: mod_base = OTHER; note = 2'-O-Methyl-adenosine
  modified_base 46: mod_base = OTHER; note = 2'-O-Methyl-adenosine
  modified_base 48: mod_base = OTHER; note = 2'-O-Methyl-adenosine
  modified_base 50: mod_base = OTHER; note = 2'-O-Methyl-uridine
  modified_base 52: mod_base = OTHER; note = 2'-O-Methyl-adenosine
  modified_base 53: mod_base = OTHER; note = 2'-O-Methyl-guanosine
  modified_base 54: mod_base = OTHER; note = 2'-O-Methyl-guanosine
  modified_base 55: mod_base = OTHER; note = 2'-O-Methyl-cytidine
  modified_base 56: mod_base = OTHER; note = 2'-O-Methyl-uridine
  modified_base 57: mod_base = OTHER; note = 2'-O-Methyl-adenosine
  modified_base 60: mod_base = OTHER; note = 2'-O-Methyl-cytidine
  modified_base 61: mod_base = OTHER; note = 2'-O-Methyl-cytidine
  modified_base 64: mod_base = OTHER; note = 2'-O-Methyl-uridine
  modified_base 66: mod_base = OTHER; note = 2'-O-Methyl-uridine
  modified_base 67: mod_base = OTHER; note = 2'-O-Methyl-cytidine
  modified_base 70: mod_base = OTHER; note = 2'-O-Methyl-cytidine
  modified_base 71: mod_base = OTHER; note = 2'-O-Methyl-uridine
  modified_base 72: mod_base = OTHER; note = 2'-O-Methyl-uridine
  modified_base 73: mod_base = OTHER; note = 2'-O-Methyl-guanosine
  modified_base 74: mod_base = OTHER; note = 2'-O-Methyl-adenosine
  modified_base 75: mod_base = OTHER; note = 2'-O-Methyl-adenosine
  modified_base 76: mod_base = OTHER; note = 2'-O-Methyl-adenosine
  modified_base 77: mod_base = OTHER; note = 2'-O-Methyl-adenosine
  modified_base 78: mod_base = OTHER; note = 2'-O-Methyl-adenosine
  modified_base 79: mod_base = OTHER; note = 2'-O-Methyl-guanosine
  modified_base 80: mod_base = OTHER; note = 2'-O-Methyl-uridine
  modified_base 81: mod_base = OTHER; note = 2'-O-Methyl-guanosine
  modified_base 83: mod_base = OTHER; note = 2'-O-Methyl-cytidine
  modified_base 84: mod_base = OTHER; note = 2'-O-Methyl-adenosine
  modified_base 85: mod_base = OTHER; note = 2'-O-Methyl-cytidine
  modified_base 86: mod_base = OTHER; note = 2'-O-Methyl-cytidine
  modified_base 87: mod_base = OTHER; note = 2'-O-Methyl-guanosine
  modified_base 88: mod_base = OTHER; note = 2'-O-Methyl-adenosine
  modified_base 89: mod_base = OTHER; note = 2'-O-Methyl-guanosine
  modified_base 90: mod_base = OTHER; note = 2'-O-Methyl-uridine
  modified_base 91: mod_base = OTHER; note = 2'-O-Methyl-cytidine
  modified_base 92: mod_base = OTHER; note = 2'-O-Methyl-guanosine
  modified_base 93: mod_base = OTHER; note = 2'-O-Methyl-guanosine
  modified_base 94: mod_base = OTHER; note = 2'-O-Methyl-uridine
  modified_base 95: mod_base = OTHER; note = 2'-O-Methyl-guanosine
  modified_base 96: mod_base = OTHER; note = 2'-O-Methyl-cytidine
  modified_base 97: mod_base = OTHER; note = 2'-O-Methyl-uridine phosphorothioate
  modified_base 98: mod_base = OTHER; note = 2'-O-Methyl-uridine phosphorothioate
  modified_base 99: mod_base = OTHER; note = 2'-O-Methyl-uridine phosphorothioate
  modified_base 100: mod_base = OTHER; note = 2'-O-Methyl-uridine

SEQ ID NO: 2295 - RNA, 100 nt, synthetic construct; identical to SEQ ID NO: 253
  source 1..100: mol_type = other RNA
  modified_base 1: mod_base = OTHER; note = 2'-O-Methyl-guanosine phosphorothioate
  modified_base 2: mod_base = OTHER; note = 2'-O-Methyl-guanosine phosphorothioate
  modified_base 3: mod_base = OTHER; note = 2'-O-Methyl-uridine phosphorothioate
  modified_base 21: mod_base = OTHER; note = 2'-O-Methyl-guanosine
  modified_base 25: mod_base = OTHER; note = 2'-O-Methyl-uridine
  modified_base 28: mod_base = OTHER; note = 2'-O-Methyl-adenosine
  modified_base 29: mod_base = OTHER; note = 2'-O-Methyl-guanosine
  modified_base 30: mod_base = OTHER; note = 2'-O-Methyl-cytidine
  modified_base 31: mod_base = OTHER; note = 2'-O-Methyl-uridine
  modified_base 32: mod_base = OTHER; note = 2'-O-Methyl-adenosine
  modified_base 33: mod_base = OTHER; note = 2'-O-Methyl-guanosine
  modified_base 34: mod_base = OTHER; note = 2'-O-Methyl-adenosine
  modified_base 35: mod_base = OTHER; note = 2'-O-Methyl-adenosine
  modified_base 36: mod_base = OTHER; note = 2'-O-Methyl-adenosine
  modified_base 37: mod_base = OTHER; note = 2'-O-Methyl-uridine
  modified_base 38: mod_base = OTHER; note = 2'-O-Methyl-adenosine
  modified_base 39: mod_base = OTHER; note = 2'-O-Methyl-guanosine
  modified_base 40: mod_base = OTHER; note = 2'-O-Methyl-cytidine
  modified_base 41: mod_base = OTHER; note = 2'-O-Methyl-adenosine
  modified_base 42: mod_base = OTHER; note = 2'-O-Methyl-adenosine
  modified_base 45: mod_base = OTHER; note = 2'-O-Methyl-uridine
  modified_base 46: mod_base = OTHER; note = 2'-O-Methyl-adenosine
  modified_base 48: mod_base = OTHER; note = 2'-O-Methyl-adenosine
  modified_base 50: mod_base = OTHER; note = 2'-O-Methyl-uridine
  modified_base 52: mod_base = OTHER; note = 2'-O-Methyl-adenosine
  modified_base 53: mod_base = OTHER; note = 2'-O-Methyl-guanosine
  modified_base 54: mod_base = OTHER; note = 2'-O-Methyl-guanosine
  modified_base 55: mod_base = OTHER; note = 2'-O-Methyl-cytidine
  modified_base 56: mod_base = OTHER; note = 2'-O-Methyl-uridine
  modified_base 57: mod_base = OTHER; note = 2'-O-Methyl-adenosine
  modified_base 60: mod_base = OTHER; note = 2'-O-Methyl-cytidine
  modified_base 61: mod_base = OTHER; note = 2'-O-Methyl-cytidine
  modified_base 66: mod_base = OTHER; note = 2'-O-Methyl-uridine
  modified_base 67: mod_base = OTHER; note = 2'-O-Methyl-cytidine
  modified_base 70: mod_base = OTHER; note = 2'-O-Methyl-cytidine
  modified_base 71: mod_base = OTHER; note = 2'-O-Methyl-uridine
  modified_base 72: mod_base = OTHER; note = 2'-O-Methyl-uridine
  modified_base 73: mod_base = OTHER; note = 2'-O-Methyl-guanosine
  modified_base 74: mod_base = OTHER; note = 2'-O-Methyl-adenosine
  modified_base 75: mod_base = OTHER; note = 2'-O-Methyl-adenosine
  modified_base 76: mod_base = OTHER; note = 2'-O-Methyl-adenosine
  modified_base 77: mod_base = OTHER; note = 2'-O-Methyl-adenosine
  modified_base 78: mod_base = OTHER; note = 2'-O-Methyl-adenosine
  modified_base 79: mod_base = OTHER; note = 2'-O-Methyl-guanosine
  modified_base 80: mod_base = OTHER; note = 2'-O-Methyl-uridine
  modified_base 81: mod_base = OTHER; note = 2'-O-Methyl-guanosine
  modified_base 83: mod_base = OTHER; note = 2'-O-Methyl-cytidine
  modified_base 84: mod_base = OTHER; note = 2'-O-Methyl-adenosine
  modified_base 85: mod_base = OTHER; note = 2'-O-Methyl-cytidine
  modified_base 86: mod_base = OTHER; note = 2'-O-Methyl-cytidine
  modified_base 87: mod_base = OTHER; note = 2'-O-Methyl-guanosine
  modified_base 88: mod_base = OTHER; note = 2'-O-Methyl-adenosine
  modified_base 89: mod_base = OTHER; note = 2'-O-Methyl-guanosine
  modified_base 90: mod_base = OTHER; note = 2'-O-Methyl-uridine
  modified_base 91: mod_base = OTHER; note = 2'-O-Methyl-cytidine
  modified_base 92: mod_base = OTHER; note = 2'-O-Methyl-guanosine
  modified_base 93: mod_base = OTHER; note = 2'-O-Methyl-guanosine
  modified_base 94: mod_base = OTHER; note = 2'-O-Methyl-uridine
  modified_base 95: mod_base = OTHER; note = 2'-O-Methyl-guanosine
  modified_base 96: mod_base = OTHER; note = 2'-O-Methyl-cytidine
  modified_base 97: mod_base = OTHER; note = 2'-O-Methyl-uridine phosphorothioate
  modified_base 98: mod_base = OTHER; note = 2'-O-Methyl-uridine phosphorothioate
  modified_base 99: mod_base = OTHER; note = 2'-O-Methyl-uridine phosphorothioate
  modified_base 100: mod_base = OTHER; note = 2'-O-Methyl-uridine

SEQ ID NO: 2296 - RNA, 100 nt, synthetic construct; identical to SEQ ID NO: 253
  source 1..100: mol_type = other RNA
  modified_base 1: mod_base = OTHER; note = 2'-O-Methyl-guanosine phosphorothioate
  modified_base 2: mod_base = OTHER; note = 2'-O-Methyl-guanosine phosphorothioate
  modified_base 3: mod_base = OTHER; note = 2'-O-Methyl-uridine phosphorothioate
  modified_base 21: mod_base = OTHER; note = 2'-O-Methyl-guanosine
  modified_base 28: mod_base = OTHER; note = 2'-O-Methyl-adenosine
  modified_base 29: mod_base = OTHER; note = 2'-O-Methyl-guanosine
  modified_base 30: mod_base = OTHER; note = 2'-O-Methyl-cytidine
  modified_base 31: mod_base = OTHER; note = 2'-O-Methyl-uridine
  modified_base 32: mod_base = OTHER; note = 2'-O-Methyl-adenosine
  modified_base 33: mod_base = OTHER; note = 2'-O-Methyl-guanosine
  modified_base 34: mod_base = OTHER; note = 2'-O-Methyl-adenosine
  modified_base 35: mod_base = OTHER; note = 2'-O-Methyl-adenosine
  modified_base 36: mod_base = OTHER; note = 2'-O-Methyl-adenosine
  modified_base 37: mod_base = OTHER; note = 2'-O-Methyl-uridine
  modified_base 38: mod_base = OTHER; note = 2'-O-Methyl-adenosine
  modified_base 39: mod_base = OTHER; note = 2'-O-Methyl-guanosine
  modified_base 40: mod_base = OTHER; note = 2'-O-Methyl-cytidine
  modified_base 41: mod_base = OTHER; note = 2'-O-Methyl-adenosine
  modified_base 42: mod_base = OTHER; note = 2'-O-Methyl-adenosine
  modified_base 45: mod_base = OTHER; note = 2'-O-Methyl-uridine
  modified_base 46: mod_base = OTHER; note = 2'-O-Methyl-adenosine
  modified_base 48: mod_base = OTHER; note = 2'-O-Methyl-adenosine
  modified_base 50: mod_base = OTHER; note = 2'-O-Methyl-uridine
  modified_base 52: mod_base = OTHER; note = 2'-O-Methyl-adenosine
  modified_base 53: mod_base = OTHER; note = 2'-O-Methyl-guanosine
  modified_base 54: mod_base = OTHER; note = 2'-O-Methyl-guanosine
  modified_base 55: mod_base = OTHER; note = 2'-O-Methyl-cytidine
  modified_base 56: mod_base = OTHER; note = 2'-O-Methyl-uridine
  modified_base 57: mod_base = OTHER; note = 2'-O-Methyl-adenosine
  modified_base 60: mod_base = OTHER; note = 2'-O-Methyl-cytidine
  modified_base 61: mod_base = OTHER; note = 2'-O-Methyl-cytidine
  modified_base 64: mod_base = OTHER; note = 2'-O-Methyl-uridine
  modified_base 66: mod_base = OTHER; note = 2'-O-Methyl-uridine
  modified_base 67: mod_base = OTHER; note = 2'-O-Methyl-cytidine
  modified_base 70: mod_base = OTHER; note = 2'-O-Methyl-cytidine
  modified_base 71: mod_base = OTHER; note = 2'-O-Methyl-uridine
  modified_base 72: mod_base = OTHER; note = 2'-O-Methyl-uridine
  modified_base 73: mod_base = OTHER; note = 2'-O-Methyl-guanosine
  modified_base 74: mod_base = OTHER; note = 2'-O-Methyl-adenosine
  modified_base 75: mod_base = OTHER; note = 2'-O-Methyl-adenosine
  modified_base 76: mod_base = OTHER; note = 2'-O-Methyl-adenosine
  modified_base 77: mod_base = OTHER; note = 2'-O-Methyl-adenosine
  modified_base 78: mod_base = OTHER; note = 2'-O-Methyl-adenosine
  modified_base 79: mod_base = OTHER; note = 2'-O-Methyl-guanosine
  modified_base 80: mod_base = OTHER; note = 2'-O-Methyl-uridine
  modified_base 81: mod_base = OTHER; note = 2'-O-Methyl-guanosine
  modified_base 83: mod_base = OTHER; note = 2'-O-Methyl-cytidine
  modified_base 84: mod_base = OTHER; note = 2'-O-Methyl-adenosine
  modified_base 85: mod_base = OTHER; note = 2'-O-Methyl-cytidine
  modified_base 86: mod_base = OTHER; note = 2'-O-Methyl-cytidine
  modified_base 87: mod_base = OTHER; note = 2'-O-Methyl-guanosine
  modified_base 88: mod_base = OTHER; note = 2'-O-Methyl-adenosine
  modified_base 89: mod_base = OTHER; note = 2'-O-Methyl-guanosine
  modified_base 90: mod_base = OTHER; note = 2'-O-Methyl-uridine
  modified_base 91: mod_base = OTHER; note = 2'-O-Methyl-cytidine
  modified_base 92: mod_base = OTHER; note = 2'-O-Methyl-guanosine
  modified_base 93: mod_base = OTHER; note = 2'-O-Methyl-guanosine
  modified_base 94: mod_base = OTHER; note = 2'-O-Methyl-uridine
  modified_base 95: mod_base = OTHER; note = 2'-O-Methyl-guanosine
  modified_base 96: mod_base = OTHER; note = 2'-O-Methyl-cytidine
  modified_base 97: mod_base = OTHER; note = 2'-O-Methyl-uridine phosphorothioate
  modified_base 98: mod_base = OTHER; note = 2'-O-Methyl-uridine phosphorothioate
  modified_base 99: mod_base = OTHER; note = 2'-O-Methyl-uridine phosphorothioate
  modified_base 100: mod_base = OTHER; note = 2'-O-Methyl-uridine

SEQ ID NO: 2297 - RNA, 100 nt, synthetic construct; identical to SEQ ID NO: 253
  source 1..100: mol_type = other RNA
  modified_base 1: mod_base = OTHER; note = 2'-O-Methyl-guanosine phosphorothioate
  modified_base 2: mod_base = OTHER; note = 2'-O-Methyl-guanosine phosphorothioate
  modified_base 3: mod_base = OTHER; note = 2'-O-Methyl-uridine phosphorothioate
  modified_base 21: mod_base = OTHER; note = 2'-O-Methyl-guanosine
  modified_base 25: mod_base = OTHER; note = 2'-O-Methyl-uridine
  modified_base 28: mod_base = OTHER; note = 2'-O-Methyl-adenosine
  modified_base 29: mod_base = OTHER; note = 2'-O-Methyl-guanosine
  modified_base 30: mod_base = OTHER; note = 2'-O-Methyl-cytidine
  modified_base 31: mod_base = OTHER; note = 2'-O-Methyl-uridine
  modified_base 32: mod_base = OTHER; note = 2'-O-Methyl-adenosine
  modified_base 33: mod_base = OTHER; note = 2'-O-Methyl-guanosine
  modified_base 34: mod_base = OTHER; note = 2'-O-Methyl-adenosine
  modified_base 35: mod_base = OTHER; note = 2'-O-Methyl-adenosine
  modified_base 36: mod_base = OTHER; note = 2'-O-Methyl-adenosine
  modified_base 37: mod_base = OTHER; note = 2'-O-Methyl-uridine
  modified_base 38: mod_base = OTHER; note = 2'-O-Methyl-adenosine
  modified_base 39: mod_base = OTHER; note = 2'-O-Methyl-guanosine
  modified_base 40: mod_base = OTHER; note = 2'-O-Methyl-cytidine
  modified_base 41: mod_base = OTHER; note = 2'-O-Methyl-adenosine
  modified_base 42: mod_base = OTHER; note = 2'-O-Methyl-adenosine
  modified_base 45: mod_base = OTHER; note = 2'-O-Methyl-uridine
  modified_base 46: mod_base = OTHER; note = 2'-O-Methyl-adenosine
  modified_base 48: mod_base = OTHER; note = 2'-O-Methyl-adenosine
  modified_base 50: mod_base = OTHER; note = 2'-O-Methyl-uridine
  modified_base 52: mod_base = OTHER; note = 2'-O-Methyl-adenosine
  modified_base 53: mod_base = OTHER; note = 2'-O-Methyl-guanosine
  modified_base 54: mod_base = OTHER; note = 2'-O-Methyl-guanosine
  modified_base 55: mod_base = OTHER; note = 2'-O-Methyl-cytidine
  modified_base 56: mod_base = OTHER; note = 2'-O-Methyl-uridine
  modified_base 57: mod_base = OTHER; note = 2'-O-Methyl-adenosine
  modified_base 60: mod_base = OTHER; note = 2'-O-Methyl-cytidine
  modified_base 61: mod_base = OTHER; note = 2'-O-Methyl-cytidine
  modified_base 64: mod_base = OTHER; note = 2'-O-Methyl-uridine
  modified_base 66: mod_base = OTHER; note = 2'-O-Methyl-uridine
  modified_base 67: mod_base = OTHER; note = 2'-O-Methyl-cytidine
  modified_base 70: mod_base = OTHER; note = 2'-O-Methyl-cytidine
  modified_base 71: mod_base = OTHER; note = 2'-O-Methyl-uridine
  modified_base 72: mod_base = OTHER; note = 2'-O-Methyl-uridine
  modified_base 73: mod_base = OTHER; note = 2'-O-Methyl-guanosine
  modified_base 74: mod_base = OTHER; note = 2'-O-Methyl-adenosine
  modified_base 75: mod_base = OTHER; note = 2'-O-Methyl-adenosine
  modified_base 76: mod_base = OTHER; note = 2'-O-Methyl-adenosine
  modified_base 77: mod_base = OTHER; note = 2'-O-Methyl-adenosine
  modified_base 78: mod_base = OTHER; note = 2'-O-Methyl-adenosine
  modified_base 79: mod_base = OTHER; note = 2'-O-Methyl-guanosine
  modified_base 80: mod_base = OTHER; note = 2'-O-Methyl-uridine
  modified_base 81: mod_base = OTHER; note = 2'-O-Methyl-guanosine
  modified_base 83: mod_base = OTHER; note = 2'-O-Methyl-cytidine
  modified_base 84: mod_base = OTHER; note = 2'-O-Methyl-adenosine
  modified_base 85: mod_base = OTHER; note = 2'-O-Methyl-cytidine
  modified_base 86: mod_base = OTHER; note = 2'-O-Methyl-cytidine
  modified_base 87: mod_base = OTHER; note = 2'-O-Methyl-guanosine
  modified_base 88: mod_base = OTHER; note = 2'-O-Methyl-adenosine
  modified_base 89: mod_base = OTHER; note = 2'-O-Methyl-guanosine
  modified_base 90: mod_base = OTHER; note = 2'-O-Methyl-uridine
  modified_base 91: mod_base = OTHER; note = 2'-O-Methyl-cytidine
  modified_base 92: mod_base = OTHER; note = 2'-O-Methyl-guanosine
  modified_base 93: mod_base = OTHER; note = 2'-O-Methyl-guanosine
  modified_base 94: mod_base = OTHER; note = 2'-O-Methyl-uridine
  modified_base 95: mod_base = OTHER; note = 2'-O-Methyl-guanosine
  modified_base 96: mod_base = OTHER; note = 2'-O-Methyl-cytidine
  modified_base 97: mod_base = OTHER; note = 2'-O-Methyl-uridine phosphorothioate
  modified_base 98: mod_base = OTHER; note = 2'-O-Methyl-uridine phosphorothioate
  modified_base 99: mod_base = OTHER; note = 2'-O-Methyl-uridine phosphorothioate
  modified_base 100: mod_base = OTHER; note = 2'-O-Methyl-uridine

SEQ ID NO: 2298 - RNA, 100 nt, synthetic construct; identical to SEQ ID NO: 253
  source 1..100: mol_type = other RNA
  modified_base 1: mod_base = OTHER; note = 2'-O-Methyl-guanosine phosphorothioate
  modified_base 2: mod_base = OTHER; note = 2'-O-Methyl-guanosine phosphorothioate
  modified_base 3: mod_base = OTHER; note = 2'-O-Methyl-uridine phosphorothioate
  modified_base 21: mod_base = OTHER; note = 2'-O-Methyl-guanosine
  modified_base 25: mod_base = OTHER; note = 2'-O-Methyl-uridine
  modified_base 28: mod_base = OTHER; note = 2'-O-Methyl-adenosine
  modified_base 29: mod_base = OTHER; note = 2'-O-Methyl-guanosine
  modified_base 30: mod_base = OTHER; note = 2'-O-Methyl-cytidine
  modified_base 31: mod_base = OTHER; note = 2'-O-Methyl-uridine
  modified_base 32: mod_base = OTHER; note = 2'-O-Methyl-adenosine
  modified_base 33: mod_base = OTHER; note = 2'-O-Methyl-guanosine
  modified_base 34: mod_base = OTHER; note = 2'-O-Methyl-adenosine
  modified_base 35: mod_base = OTHER; note = 2'-O-Methyl-adenosine
  modified_base 36: mod_base = OTHER; note = 2'-O-Methyl-adenosine
  modified_base 37: mod_base = OTHER; note = 2'-O-Methyl-uridine
  modified_base 38: mod_base = OTHER; note = 2'-O-Methyl-adenosine
  modified_base 39: mod_base = OTHER; note = 2'-O-Methyl-guanosine
  modified_base 40: mod_base = OTHER; note = 2'-O-Methyl-cytidine
  modified_base 41: mod_base = OTHER; note = 2'-O-Methyl-adenosine
  modified_base 42: mod_base = OTHER; note = 2'-O-Methyl-adenosine
  modified_base 45: mod_base = OTHER; note = 2'-O-Methyl-uridine phosphorothioate
  modified_base 46: mod_base = OTHER; note = 2'-O-Methyl-adenosine
  modified_base 48: mod_base = OTHER; note = 2'-O-Methyl-adenosine
  modified_base 50: mod_base = OTHER; note = 2'-O-Methyl-uridine
  modified_base 52: mod_base = OTHER; note = 2'-O-Methyl-adenosine
  modified_base 53: mod_base = OTHER; note = 2'-O-Methyl-guanosine
  modified_base 54: mod_base = OTHER; note = 2'-O-Methyl-guanosine
  modified_base 55: mod_base = OTHER; note = 2'-O-Methyl-cytidine
  modified_base 56: mod_base = OTHER; note = 2'-O-Methyl-uridine
  modified_base 57: mod_base = OTHER; note = 2'-O-Methyl-adenosine
  modified_base 60: mod_base = OTHER; note = 2'-O-Methyl-cytidine
  modified_base 61: mod_base = OTHER; note = 2'-O-Methyl-cytidine
  modified_base 64: mod_base = OTHER; note = 2'-O-Methyl-uridine phosphorothioate
  modified_base 66: mod_base = OTHER; note = 2'-O-Methyl-uridine
  modified_base 67: mod_base = OTHER; note = 2'-O-Methyl-cytidine
  modified_base 70: mod_base = OTHER; note = 2'-O-Methyl-cytidine
  modified_base 71: mod_base = OTHER; note = 2'-O-Methyl-uridine
  modified_base 72: mod_base = OTHER; note = 2'-O-Methyl-uridine
  modified_base 73: mod_base = OTHER; note = 2'-O-Methyl-guanosine
  modified_base 74: mod_base = OTHER; note = 2'-O-Methyl-adenosine
  modified_base 75: mod_base = OTHER; note = 2'-O-Methyl-adenosine
  modified_base 76: mod_base = OTHER; note = 2'-O-Methyl-adenosine
  modified_base 77: mod_base = OTHER; note = 2'-O-Methyl-adenosine
  modified_base 78: mod_base = OTHER; note = 2'-O-Methyl-adenosine
  modified_base 79: mod_base = OTHER; note = 2'-O-Methyl-guanosine
  modified_base 80: mod_base = OTHER; note = 2'-O-Methyl-uridine
  modified_base 81: mod_base = OTHER; note = 2'-O-Methyl-guanosine
  modified_base 83: mod_base = OTHER; note = 2'-O-Methyl-cytidine
  modified_base 84: mod_base = OTHER; note = 2'-O-Methyl-adenosine
  modified_base 85: mod_base = OTHER; note = 2'-O-Methyl-cytidine
  modified_base 86: mod_base = OTHER; note = 2'-O-Methyl-cytidine
  modified_base 87: mod_base = OTHER; note = 2'-O-Methyl-guanosine
  modified_base 88: mod_base = OTHER; note = 2'-O-Methyl-adenosine
  modified_base 89: mod_base = OTHER; note = 2'-O-Methyl-guanosine
  modified_base 90: mod_base = OTHER; note = 2'-O-Methyl-uridine
  modified_base 91: mod_base = OTHER; note = 2'-O-Methyl-cytidine
  modified_base 92: mod_base = OTHER; note = 2'-O-Methyl-guanosine
  modified_base 93: mod_base = OTHER; note = 2'-O-Methyl-guanosine
  modified_base 94: mod_base = OTHER; note = 2'-O-Methyl-uridine
  modified_base 95: mod_base = OTHER; note = 2'-O-Methyl-guanosine
  modified_base 96: mod_base = OTHER; note = 2'-O-Methyl-cytidine
  modified_base 97: mod_base = OTHER; note = 2'-O-Methyl-uridine phosphorothioate
  modified_base 98: mod_base = OTHER; note = 2'-O-Methyl-uridine phosphorothioate
  modified_base 99: mod_base = OTHER; note = 2'-O-Methyl-uridine phosphorothioate
  modified_base 100: mod_base = OTHER; note = 2'-O-Methyl-uridine

SEQ ID NO: 2299 - RNA, 100 nt, synthetic construct; identical to SEQ ID NO: 253
  source 1..100: mol_type = other RNA
  modified_base 1: mod_base = OTHER; note = 2'-O-Methyl-guanosine phosphorothioate
  modified_base 2: mod_base = OTHER; note = 2'-O-Methyl-guanosine phosphorothioate
  modified_base 3: mod_base = OTHER; note = 2'-O-Methyl-uridine phosphorothioate
  modified_base 6: mod_base = OTHER; note = 2'-O-Methyl-uridine
  modified_base 12: mod_base = OTHER; note = 2'-O-Methyl-uridine
  modified_base 19: mod_base = OTHER; note = 2'-O-Methyl-cytidine
  modified_base 21: mod_base = OTHER; note = 2'-O-Methyl-guanosine
  modified_base 28: mod_base = OTHER; note = 2'-O-Methyl-adenosine
  modified_base 29: mod_base = OTHER; note = 2'-O-Methyl-guanosine
  modified_base 30: mod_base = OTHER; note = 2'-O-Methyl-cytidine
  modified_base 31: mod_base = OTHER; note = 2'-O-Methyl-uridine
  modified_base 32: mod_base = OTHER; note = 2'-O-Methyl-adenosine
  modified_base 33: mod_base = OTHER; note = 2'-O-Methyl-guanosine
  modified_base 34: mod_base = OTHER; note = 2'-O-Methyl-adenosine
  modified_base 35: mod_base = OTHER; note = 2'-O-Methyl-adenosine
  modified_base 36: mod_base = OTHER; note = 2'-O-Methyl-adenosine
  modified_base 37: mod_base = OTHER; note = 2'-O-Methyl-uridine
  modified_base 38: mod_base = OTHER; note = 2'-O-Methyl-adenosine
  modified_base 39: mod_base = OTHER; note = 2'-O-Methyl-guanosine
  modified_base 40: mod_base = OTHER; note = 2'-O-Methyl-cytidine
  modified_base 41: mod_base = OTHER; note = 2'-O-Methyl-adenosine
  modified_base 42: mod_base = OTHER; note = 2'-O-Methyl-adenosine
  modified_base 46: mod_base = OTHER; note = 2'-O-Methyl-adenosine
  modified_base 48: mod_base = OTHER; note = 2'-O-Methyl-adenosine
  modified_base 50: mod_base = OTHER; note = 2'-O-Methyl-uridine
  modified_base 52: mod_base = OTHER; note = 2'-O-Methyl-adenosine
  modified_base 53: mod_base = OTHER; note = 2'-O-Methyl-guanosine
  modified_base 54: mod_base = OTHER; note = 2'-O-Methyl-guanosine
  modified_base 55: mod_base = OTHER; note = 2'-O-Methyl-cytidine
  modified_base 56: mod_base = OTHER; note = 2'-O-Methyl-uridine
  modified_base 57: mod_base = OTHER; note = 2'-O-Methyl-adenosine
  modified_base 60: mod_base = OTHER; note = 2'-O-Methyl-cytidine
  modified_base 61: mod_base = OTHER; note = 2'-O-Methyl-cytidine
  modified_base 66: mod_base = OTHER; note = 2'-O-Methyl-uridine
  modified_base 67: mod_base = OTHER; note = 2'-O-Methyl-cytidine
  modified_base 70: mod_base = OTHER; note = 2'-O-Methyl-cytidine
  modified_base 71: mod_base = OTHER; note = 2'-O-Methyl-uridine
  modified_base 72: mod_base = OTHER; note = 2'-O-Methyl-uridine
  modified_base 73: mod_base = OTHER; note = 2'-O-Methyl-guanosine
  modified_base 74: mod_base = OTHER; note = 2'-O-Methyl-adenosine
  modified_base 75: mod_base = OTHER; note = 2'-O-Methyl-adenosine
  modified_base 76: mod_base = OTHER; note = 2'-O-Methyl-adenosine
  modified_base 77: mod_base = OTHER; note = 2'-O-Methyl-adenosine
  modified_base 78: mod_base = OTHER; note = 2'-O-Methyl-adenosine
  modified_base 79: mod_base = OTHER; note = 2'-O-Methyl-guanosine
  modified_base 80: mod_base = OTHER; note = 2'-O-Methyl-uridine
  modified_base 81: mod_base = OTHER; note = 2'-O-Methyl-guanosine
  modified_base 83: mod_base = OTHER; note = 2'-O-Methyl-cytidine
  modified_base 84: mod_base = OTHER; note = 2'-O-Methyl-adenosine
  modified_base 85: mod_base = OTHER; note = 2'-O-Methyl-cytidine
  modified_base 86: mod_base = OTHER; note = 2'-O-Methyl-cytidine
  modified_base 87: mod_base = OTHER; note = 2'-O-Methyl-guanosine
  modified_base 88: mod_base = OTHER; note = 2'-O-Methyl-adenosine
  modified_base 89: mod_base = OTHER; note = 2'-O-Methyl-guanosine
  modified_base 90: mod_base = OTHER; note = 2'-O-Methyl-uridine
  modified_base 91: mod_base = OTHER; note = 2'-O-Methyl-cytidine
  modified_base 92: mod_base = OTHER; note = 2'-O-Methyl-guanosine
  modified_base 93: mod_base = OTHER; note = 2'-O-Methyl-guanosine
  modified_base 94: mod_base = OTHER; note = 2'-O-Methyl-uridine
  modified_base 95: mod_base = OTHER; note = 2'-O-Methyl-guanosine
  modified_base 96: mod_base = OTHER; note = 2'-O-Methyl-cytidine
  modified_base 97: mod_base = OTHER; note = 2'-O-Methyl-uridine phosphorothioate
  modified_base 98: mod_base = OTHER; note = 2'-O-Methyl-uridine phosphorothioate
  modified_base 99: mod_base = OTHER; note = 2'-O-Methyl-uridine phosphorothioate
  modified_base 100: mod_base = OTHER; note = 2'-O-Methyl-uridine

SEQ ID NO: 2300 - RNA, 100 nt, synthetic construct; identical to SEQ ID NO: 253
  source 1..100: mol_type = other RNA
  modified_base 1: mod_base = OTHER; note = 2'-O-Methyl-guanosine phosphorothioate
  modified_base 2: mod_base = OTHER; note = 2'-O-Methyl-guanosine phosphorothioate
  modified_base 3: mod_base = OTHER; note = 2'-O-Methyl-uridine phosphorothioate
  modified_base 6: mod_base = OTHER; note = 2'-O-Methyl-uridine
  modified_base 12: mod_base = OTHER; note = 2'-O-Methyl-uridine
  modified_base 19: mod_base = OTHER; note = 2'-O-Methyl-cytidine
  modified_base 21: mod_base = OTHER; note = 2'-O-Methyl-guanosine
  modified_base 28: mod_base = OTHER; note = 2'-O-Methyl-adenosine
  modified_base 29: mod_base = OTHER; note = 2'-O-Methyl-guanosine
  modified_base 30: mod_base = OTHER; note = 2'-O-Methyl-cytidine
  modified_base 31: mod_base = OTHER; note = 2'-O-Methyl-uridine
  modified_base 32: mod_base = OTHER; note = 2'-O-Methyl-adenosine
  modified_base 33: mod_base = OTHER; note = 2'-O-Methyl-guanosine
  modified_base 34: mod_base = OTHER; note = 2'-O-Methyl-adenosine
  modified_base 35: mod_base = OTHER; note = 2'-O-Methyl-adenosine
  modified_base 36: mod_base = OTHER; note = 2'-O-Methyl-adenosine
  modified_base 37: mod_base = OTHER; note = 2'-O-Methyl-uridine
  modified_base 38: mod_base = OTHER; note = 2'-O-Methyl-adenosine
  modified_base 39: mod_base = OTHER; note = 2'-O-Methyl-guanosine
  modified_base 40: mod_base = OTHER; note = 2'-O-Methyl-cytidine
  modified_base 41: mod_base = OTHER; note = 2'-O-Methyl-adenosine
  modified_base 42: mod_base = OTHER; note = 2'-O-Methyl-adenosine
  modified_base 45: mod_base = OTHER; note = uridine phosphorothioate
  modified_base 46: mod_base = OTHER; note = 2'-O-Methyl-adenosine
  modified_base 48: mod_base = OTHER; note = 2'-O-Methyl-adenosine
  modified_base 50: mod_base = OTHER; note = 2'-O-Methyl-uridine
  modified_base 52: mod_base = OTHER; note = 2'-O-Methyl-adenosine
  modified_base 53: mod_base = OTHER; note = 2'-O-Methyl-guanosine
  modified_base 54: mod_base = OTHER; note = 2'-O-Methyl-guanosine
  modified_base 55: mod_base = OTHER; note = 2'-O-Methyl-cytidine
  modified_base 56: mod_base = OTHER; note = 2'-O-Methyl-uridine
  modified_base 57: mod_base = OTHER; note = 2'-O-Methyl-adenosine
  modified_base 60: mod_base = OTHER; note = 2'-O-Methyl-cytidine
  modified_base 61: mod_base = OTHER; note = 2'-O-Methyl-cytidine
  modified_base 64: mod_base = OTHER; note = uridine phosphorothioate
  modified_base 66: mod_base = OTHER; note = 2'-O-Methyl-uridine
  modified_base 67: mod_base = OTHER; note = 2'-O-Methyl-cytidine
  modified_base 70: mod_base = OTHER; note = 2'-O-Methyl-cytidine
  modified_base 71: mod_base = OTHER; note = 2'-O-Methyl-uridine
  modified_base 72: mod_base = OTHER; note = 2'-O-Methyl-uridine
  modified_base 73: mod_base = OTHER; note = 2'-O-Methyl-guanosine
  modified_base 74: mod_base = OTHER; note = 2'-O-Methyl-adenosine
  modified_base 75: mod_base = OTHER; note = 2'-O-Methyl-adenosine
  modified_base 76: mod_base = OTHER; note = 2'-O-Methyl-adenosine
  modified_base 77: mod_base = OTHER; note = 2'-O-Methyl-adenosine
  modified_base 78: mod_base = OTHER; note = 2'-O-Methyl-adenosine
  modified_base 79: mod_base = OTHER; note = 2'-O-Methyl-guanosine
  modified_base 80: mod_base = OTHER; note = 2'-O-Methyl-uridine
  modified_base 81: mod_base = OTHER; note = 2'-O-Methyl-guanosine
  modified_base 83: mod_base = OTHER; note = 2'-O-Methyl-cytidine
  modified_base 84: mod_base = OTHER; note = 2'-O-Methyl-adenosine
  modified_base 85: mod_base = OTHER; note = 2'-O-Methyl-cytidine
  modified_base 86: mod_base = OTHER; note = 2'-O-Methyl-cytidine
  modified_base 87: mod_base = OTHER; note = 2'-O-Methyl-guanosine
  modified_base 88: mod_base = OTHER; note = 2'-O-Methyl-adenosine
  modified_base 89: mod_base = OTHER; note = 2'-O-Methyl-guanosine
  modified_base 90: mod_base = OTHER; note = 2'-O-Methyl-uridine
  modified_base 91: mod_base = OTHER; note = 2'-O-Methyl-cytidine
  modified_base 92: mod_base = OTHER; note = 2'-O-Methyl-guanosine
  modified_base 93: mod_base = OTHER; note = 2'-O-Methyl-guanosine
  modified_base 94: mod_base = OTHER; note = 2'-O-Methyl-uridine
  modified_base 95: mod_base = OTHER; note = 2'-O-Methyl-guanosine
  modified_base 96: mod_base = OTHER; note = 2'-O-Methyl-cytidine
  modified_base 97: mod_base = OTHER; note = 2'-O-Methyl-uridine phosphorothioate
  modified_base 98: mod_base = OTHER; note = 2'-O-Methyl-uridine phosphorothioate
  modified_base 99: mod_base = OTHER; note = 2'-O-Methyl-uridine phosphorothioate
  modified_base 100: mod_base = OTHER; note = 2'-O-Methyl-uridine

SEQ ID NO: 2301 - RNA, 100 nt, synthetic construct; identical to SEQ ID NO: 259
  source 1..100: mol_type = other RNA
  modified_base 1: mod_base = OTHER; note = 2'-O-Methyl-guanosine phosphorothioate
  modified_base 2: mod_base = OTHER; note = 2'-O-Methyl-cytidine phosphorothioate
  modified_base 3: mod_base = OTHER; note = 2'-O-Methyl-uridine phosphorothioate
  modified_base 21: mod_base = OTHER; note = 2'-O-Methyl-guanosine
  modified_base 28: mod_base = OTHER; note = 2'-O-Methyl-adenosine
  modified_base 29: mod_base = OTHER; note = 2'-O-Methyl-guanosine
  modified_base 30: mod_base = OTHER; note = 2'-O-Methyl-cytidine
  modified_base 31: mod_base = OTHER; note = 2'-O-Methyl-uridine
  modified_base 32: mod_base = OTHER; note = 2'-O-Methyl-adenosine
  modified_base 33: mod_base = OTHER; note = 2'-O-Methyl-guanosine
  modified_base 34: mod_base = OTHER; note = 2'-O-Methyl-adenosine
  modified_base 35: mod_base = OTHER; note = 2'-O-Methyl-adenosine
  modified_base 36: mod_base = OTHER; note = 2'-O-Methyl-adenosine
  modified_base 37: mod_base = OTHER; note = 2'-O-Methyl-uridine
  modified_base 38: mod_base = OTHER; note = 2'-O-Methyl-adenosine
  modified_base 39: mod_base = OTHER; note = 2'-O-Methyl-guanosine
  modified_base 40: mod_base = OTHER; note = 2'-O-Methyl-cytidine
  modified_base 41: mod_base = OTHER; note = 2'-O-Methyl-adenosine
  modified_base 42: mod_base = OTHER; note = 2'-O-Methyl-adenosine
  modified_base 46: mod_base = OTHER; note = 2'-O-Methyl-adenosine
  modified_base 48: mod_base = OTHER; note = 2'-O-Methyl-adenosine
  modified_base 50: mod_base = OTHER; note = 2'-O-Methyl-uridine
  modified_base 52: mod_base = OTHER; note = 2'-O-Methyl-adenosine
  modified_base 53: mod_base = OTHER; note = 2'-O-Methyl-guanosine
  modified_base 54: mod_base = OTHER; note = 2'-O-Methyl-guanosine
  modified_base 55: mod_base = OTHER; note = 2'-O-Methyl-cytidine
  modified_base 56: mod_base = OTHER; note = 2'-O-Methyl-uridine
  modified_base 57: mod_base = OTHER; note = 2'-O-Methyl-adenosine
  modified_base 60: mod_base = OTHER; note = 2'-O-Methyl-cytidine
  modified_base 61: mod_base = OTHER; note = 2'-O-Methyl-cytidine
  modified_base 66: mod_base = OTHER; note = 2'-O-Methyl-uridine
  modified_base 67: mod_base = OTHER; note = 2'-O-Methyl-cytidine
  modified_base 70: mod_base = OTHER; note = 2'-O-Methyl-cytidine
  modified_base 71: mod_base = OTHER; note = 2'-O-Methyl-uridine
  modified_base 72: mod_base = OTHER; note = 2'-O-Methyl-uridine
  modified_base 73: mod_base = OTHER; note = 2'-O-Methyl-guanosine
  modified_base 74: mod_base = OTHER; note = 2'-O-Methyl-adenosine
  modified_base 75: mod_base = OTHER; note = 2'-O-Methyl-adenosine
  modified_base 76: mod_base = OTHER; note = 2'-O-Methyl-adenosine
  modified_base 77: mod_base = OTHER; note = 2'-O-Methyl-adenosine
  modified_base 78: mod_base = OTHER; note = 2'-O-Methyl-adenosine
  modified_base 79: mod_base = OTHER; note = 2'-O-Methyl-guanosine
  modified_base 80: mod_base = OTHER; note = 2'-O-Methyl-uridine
  modified_base 81: mod_base = OTHER; note = 2'-O-Methyl-guanosine
  modified_base 83: mod_base = OTHER; note = 2'-O-Methyl-cytidine
  modified_base 84: mod_base = OTHER; note = 2'-O-Methyl-adenosine
  modified_base 85: mod_base = OTHER; note = 2'-O-Methyl-cytidine
  modified_base 86: mod_base = OTHER; note = 2'-O-Methyl-cytidine
  modified_base 87: mod_base = OTHER; note = 2'-O-Methyl-guanosine
  modified_base 88: mod_base = OTHER; note = 2'-O-Methyl-adenosine
  modified_base 89: mod_base = OTHER; note = 2'-O-Methyl-guanosine
  modified_base 90: mod_base = OTHER; note = 2'-O-Methyl-uridine
  modified_base 91: mod_base = OTHER; note = 2'-O-Methyl-cytidine
  modified_base 92: mod_base = OTHER; note = 2'-O-Methyl-guanosine
  modified_base 93: mod_base = OTHER; note = 2'-O-Methyl-guanosine
  modified_base 94: mod_base = OTHER; note = 2'-O-Methyl-uridine
  modified_base 95: mod_base = OTHER; note = 2'-O-Methyl-guanosine
  modified_base 96: mod_base = OTHER; note = 2'-O-Methyl-cytidine
  modified_base 97: mod_base = OTHER; note = 2'-O-Methyl-uridine phosphorothioate
  modified_base 98: mod_base = OTHER; note = 2'-O-Methyl-uridine phosphorothioate
  modified_base 99: mod_base = OTHER; note = 2'-O-Methyl-uridine phosphorothioate
  modified_base 100: mod_base = OTHER; note = 2'-O-Methyl-uridine

SEQ ID NO: 2302 - RNA, 100 nt, synthetic construct; identical to SEQ ID NO: 260
  source 1..100: mol_type = other RNA
  modified_base 1: mod_base = OTHER; note = 2'-O-Methyl-uridine phosphorothioate
  modified_base 2: mod_base = OTHER; note = 2'-O-Methyl-guanosine phosphorothioate
  modified_base 3: mod_base = OTHER; note = 2'-O-Methyl-cytidine phosphorothioate
  modified_base 21: mod_base = OTHER; note = 2'-O-Methyl-guanosine
  modified_base 28: mod_base = OTHER; note = 2'-O-Methyl-adenosine
  modified_base 29: mod_base = OTHER; note = 2'-O-Methyl-guanosine
  modified_base 30: mod_base = OTHER; note = 2'-O-Methyl-cytidine
  modified_base 31: mod_base = OTHER; note = 2'-O-Methyl-uridine
  modified_base 32: mod_base = OTHER; note = 2'-O-Methyl-adenosine
  modified_base 33: mod_base = OTHER; note = 2'-O-Methyl-guanosine
  modified_base 34: mod_base = OTHER; note = 2'-O-Methyl-adenosine
  modified_base 35: mod_base = OTHER; note = 2'-O-Methyl-adenosine
  modified_base 36: mod_base = OTHER; note = 2'-O-Methyl-adenosine
  modified_base 37: mod_base = OTHER; note = 2'-O-Methyl-uridine
  modified_base 38: mod_base = OTHER; note = 2'-O-Methyl-adenosine
  modified_base 39: mod_base = OTHER; note = 2'-O-Methyl-guanosine
  modified_base 40: mod_base = OTHER; note = 2'-O-Methyl-cytidine
  modified_base 41: mod_base = OTHER; note = 2'-O-Methyl-adenosine
  modified_base 42: mod_base = OTHER; note = 2'-O-Methyl-adenosine
  modified_base 46: mod_base = OTHER; note = 2'-O-Methyl-adenosine
  modified_base 48: mod_base = OTHER; note = 2'-O-Methyl-adenosine
  modified_base 50: mod_base = OTHER; note = 2'-O-Methyl-uridine
  modified_base 52: mod_base = OTHER; note = 2'-O-Methyl-adenosine
  modified_base 53: mod_base = OTHER; note = 2'-O-Methyl-guanosine
  modified_base 54: mod_base = OTHER; note = 2'-O-Methyl-guanosine
  modified_base 55: mod_base = OTHER; note = 2'-O-Methyl-cytidine
  modified_base 56: mod_base = OTHER; note = 2'-O-Methyl-uridine
  modified_base 57: mod_base = OTHER; note = 2'-O-Methyl-adenosine
  modified_base 60: mod_base = OTHER; note = 2'-O-Methyl-cytidine
  modified_base 61: mod_base = OTHER; note = 2'-O-Methyl-cytidine
  modified_base 66: mod_base = OTHER; note = 2'-O-Methyl-uridine
  modified_base 67: mod_base = OTHER; note = 2'-O-Methyl-cytidine
  modified_base 70: mod_base = OTHER; note = 2'-O-Methyl-cytidine
  modified_base 71: mod_base = OTHER; note = 2'-O-Methyl-uridine
  modified_base 72: mod_base = OTHER; note = 2'-O-Methyl-uridine
  modified_base 73: mod_base = OTHER; note = 2'-O-Methyl-guanosine
  modified_base 74: mod_base = OTHER; note = 2'-O-Methyl-adenosine
  modified_base 75: mod_base = OTHER; note = 2'-O-Methyl-adenosine
  modified_base 76: mod_base = OTHER; note = 2'-O-Methyl-adenosine
  modified_base 77: mod_base = OTHER; note = 2'-O-Methyl-adenosine
  modified_base 78: mod_base = OTHER; note = 2'-O-Methyl-adenosine
  modified_base 79: mod_base = OTHER; note = 2'-O-Methyl-guanosine
  modified_base 80: mod_base = OTHER; note = 2'-O-Methyl-uridine
  modified_base 81: mod_base = OTHER; note = 2'-O-Methyl-guanosine
  modified_base 83: mod_base = OTHER; note = 2'-O-Methyl-cytidine
  modified_base 84: mod_base = OTHER; note = 2'-O-Methyl-adenosine
  modified_base 85: mod_base = OTHER; note = 2'-O-Methyl-cytidine
  modified_base 86: mod_base = OTHER; note = 2'-O-Methyl-cytidine
  modified_base 87: mod_base = OTHER; note = 2'-O-Methyl-guanosine
  modified_base 88: mod_base = OTHER; note = 2'-O-Methyl-adenosine
  modified_base 89: mod_base = OTHER; note = 2'-O-Methyl-guanosine
  modified_base 90: mod_base = OTHER; note = 2'-O-Methyl-uridine
  modified_base 91: mod_base = OTHER; note = 2'-O-Methyl-cytidine
  modified_base 92: mod_base = OTHER; note = 2'-O-Methyl-guanosine
  modified_base 93: mod_base = OTHER; note = 2'-O-Methyl-guanosine
  modified_base 94: mod_base = OTHER; note = 2'-O-Methyl-uridine
  modified_base 95: mod_base = OTHER; note = 2'-O-Methyl-guanosine
  modified_base 96: mod_base = OTHER; note = 2'-O-Methyl-cytidine
  modified_base 97: mod_base = OTHER; note = 2'-O-Methyl-uridine phosphorothioate
  modified_base 98: mod_base = OTHER; note = 2'-O-Methyl-uridine phosphorothioate
  modified_base 99: mod_base = OTHER; note = 2'-O-Methyl-uridine phosphorothioate
  modified_base 100: mod_base = OTHER; note = 2'-O-Methyl-uridine

SEQ ID NO: 2303 - RNA, 100 nt, synthetic construct; identical to SEQ ID NO: 421
  source 1..100: mol_type = other RNA
  modified_base 1: mod_base = OTHER; note = 2'-O-Methyl-cytidine phosphorothioate
  modified_base 2: mod_base = OTHER; note = 2'-O-Methyl-cytidine phosphorothioate
  modified_base 3: mod_base = OTHER; note = 2'-O-Methyl-cytidine phosphorothioate
  modified_base 29: mod_base = OTHER; note = 2'-O-Methyl-guanosine
  modified_base 30: mod_base = OTHER; note = 2'-O-Methyl-cytidine
  modified_base 31: mod_base = OTHER; note = 2'-O-Methyl-uridine
  modified_base 32: mod_base = OTHER; note = 2'-O-Methyl-adenosine
  modified_base 33: mod_base = OTHER; note = 2'-O-Methyl-guanosine
  modified_base 34: mod_base = OTHER; note = 2'-O-Methyl-adenosine
  modified_base 35: mod_base = OTHER; note = 2'-O-Methyl-adenosine
  modified_base 36: mod_base = OTHER; note = 2'-O-Methyl-adenosine
  modified_base 37: mod_base = OTHER; note = 2'-O-Methyl-uridine
  modified_base 38: mod_base = OTHER; note = 2'-O-Methyl-adenosine
  modified_base 39: mod_base = OTHER; note = 2'-O-Methyl-guanosine
  modified_base 40: mod_base = OTHER; note = 2'-O-Methyl-cytidine
  modified_base 69: mod_base = OTHER; note = 2'-O-Methyl-adenosine
  modified_base 70: mod_base = OTHER; note = 2'-O-Methyl-cytidine
  modified_base 71: mod_base = OTHER; note = 2'-O-Methyl-uridine
  modified_base 72: mod_base = OTHER; note = 2'-O-Methyl-uridine
  modified_base 73: mod_base = OTHER; note = 2'-O-Methyl-guanosine
  modified_base 74: mod_base = OTHER; note = 2'-O-Methyl-adenosine
  modified_base 75: mod_base = OTHER; note = 2'-O-Methyl-adenosine
  modified_base 76: mod_base = OTHER; note = 2'-O-Methyl-adenosine
  modified_base 77: mod_base = OTHER; note = 2'-O-Methyl-adenosine
  modified_base 78: mod_base = OTHER; note = 2'-O-Methyl-adenosine
  modified_base 79: mod_base = OTHER; note = 2'-O-Methyl-guanosine
  modified_base 80: mod_base = OTHER; note = 2'-O-Methyl-uridine
  modified_base 81: mod_base = OTHER; note = 2'-O-Methyl-guanosine
  modified_base 82: mod_base = OTHER; note = 2'-O-Methyl-guanosine
  modified_base 83: mod_base = OTHER; note = 2'-O-Methyl-cytidine
  modified_base 84: mod_base = OTHER; note = 2'-O-Methyl-adenosine
  modified_base 85: mod_base = OTHER; note = 2'-O-Methyl-cytidine
  modified_base 86: mod_base = OTHER; note = 2'-O-Methyl-cytidine
  modified_base 87: mod_base = OTHER; note = 2'-O-Methyl-guanosine
  modified_base 88: mod_base = OTHER; note = 2'-O-Methyl-adenosine
  modified_base 89: mod_base = OTHER; note = 2'-O-Methyl-guanosine
  modified_base 90: mod_base = OTHER; note = 2'-O-Methyl-uridine
  modified_base 91: mod_base = OTHER; note = 2'-O-Methyl-cytidine
  modified_base 92: mod_base = OTHER; note = 2'-O-Methyl-guanosine
  modified_base 93: mod_base = OTHER; note = 2'-O-Methyl-guanosine
  modified_base 94: mod_base = OTHER; note = 2'-O-Methyl-uridine
  modified_base 95: mod_base = OTHER; note = 2'-O-Methyl-guanosine
  modified_base 96: mod_base = OTHER; note = 2'-O-Methyl-cytidine
  modified_base 97: mod_base = OTHER; note = 2'-O-Methyl-uridine phosphorothioate
  modified_base 98: mod_base = OTHER; note = 2'-O-Methyl-uridine phosphorothioate
  modified_base 99: mod_base = OTHER; note = 2'-O-Methyl-uridine phosphorothioate
  modified_base 100: mod_base = OTHER; note = 2'-O-Methyl-uridine

SEQ ID NO: 2304 - RNA, 103 nt, synthetic construct; identical to SEQ ID NO: 1643
  source 1..103: mol_type = other RNA
  modified_base 1: mod_base = OTHER; note = 2'-O-Methyl-cytidine phosphorothioate
  modified_base 2: mod_base = OTHER; note = 2'-O-Methyl-cytidine phosphorothioate
  modified_base 3: mod_base = OTHER; note = 2'-O-Methyl-cytidine phosphorothioate
  modified_base 21: mod_base = OTHER; note = 2'-O-Methyl-guanosine
  modified_base 28: mod_base = OTHER; note = 2'-O-Methyl-adenosine
  modified_base 29: mod_base = OTHER; note = 2'-O-Methyl-guanosine
  modified_base 30: mod_base = OTHER; note = 2'-O-Methyl-cytidine
  modified_base 31: mod_base = OTHER; note = 2'-O-Methyl-uridine
  modified_base 32: mod_base = OTHER; note = 2'-O-Methyl-adenosine
  modified_base 34: mod_base = OTHER; note = 2'-O-Methyl-adenosine
  modified_base 35: mod_base = OTHER; note = 2'-O-Methyl-adenosine
  modified_base 36: mod_base = OTHER; note = 2'-O-Methyl-adenosine
  modified_base 37: mod_base = OTHER; note = 2'-O-Methyl-uridine
  modified_base 38: mod_base = OTHER; note = 2'-O-Methyl-adenosine
  modified_base 39: mod_base = OTHER; note = 2'-O-Methyl-guanosine
  modified_base 40: mod_base = OTHER; note = 2'-O-Methyl-cytidine
  modified_base 41: mod_base = OTHER; note = 2'-O-Methyl-adenosine
  modified_base 42: mod_base = OTHER; note = 2'-O-Methyl-adenosine
  modified_base 45: mod_base = OTHER; note = uridine phosphorothioate
  modified_base 46: mod_base = OTHER; note = 2'-O-Methyl-adenosine
  modified_base 48: mod_base = OTHER; note = 2'-O-Methyl-adenosine
  modified_base 50: mod_base = OTHER; note = 2'-O-Methyl-uridine
  modified_base 52: mod_base = OTHER; note = 2'-O-Methyl-adenosine
  modified_base 53: mod_base = OTHER; note = 2'-O-Methyl-guanosine
  modified_base 54: mod_base = OTHER; note = 2'-O-Methyl-guanosine
  modified_base 55: mod_base = OTHER; note = 2'-O-Methyl-cytidine
  modified_base 56: mod_base = OTHER; note = 2'-O-Methyl-uridine
  modified_base 57: mod_base = OTHER; note = 2'-O-Methyl-adenosine
  modified_base 60: mod_base = OTHER; note = 2'-O-Methyl-cytidine
  modified_base 61: mod_base = OTHER; note = 2'-O-Methyl-cytidine
  modified_base 64: mod_base = OTHER; note = uridine phosphorothioate
  modified_base 66: mod_base = OTHER; note = 2'-O-Methyl-uridine
  modified_base 67: mod_base = OTHER; note = 2'-O-Methyl-cytidine
  modified_base 70: mod_base = OTHER; note = 2'-O-Methyl-cytidine
  modified_base 71: mod_base = OTHER; note = 2'-O-Methyl-uridine
  modified_base 72: mod_base = OTHER; note = 2'-O-Methyl-uridine
  modified_base 74: mod_base = OTHER; note = 2'-O-Methyl-adenosine
  modified_base 75: mod_base = OTHER; note = 2'-O-Methyl-adenosine
  modified_base 76: mod_base = OTHER; note = 2'-O-Methyl-adenosine
  modified_base 77: mod_base = OTHER; note = 2'-O-Methyl-adenosine
  modified_base 78: mod_base = OTHER; note = 2'-O-Methyl-adenosine
  modified_base 79: mod_base = OTHER; note = 2'-O-Methyl-guanosine
  modified_base 80: mod_base = OTHER; note = 2'-O-Methyl-uridine
  modified_base 81: mod_base = OTHER; note = 2'-O-Methyl-guanosine
  modified_base 83: mod_base = OTHER; note = 2'-O-Methyl-cytidine
  modified_base 84: mod_base = OTHER; note = 2'-O-Methyl-adenosine
  modified_base 85: mod_base = OTHER; note = 2'-O-Methyl-cytidine
  modified_base 86: mod_base = OTHER; note = 2'-O-Methyl-cytidine
  modified_base 87: mod_base = OTHER; note = 2'-O-Methyl-guanosine
  modified_base 88: mod_base = OTHER; note = 2'-O-Methyl-adenosine
  modified_base 89: mod_base = OTHER; note = 2'-O-Methyl-guanosine
  modified_base 90: mod_base = OTHER; note = 2'-O-Methyl-uridine
  modified_base 91: mod_base = OTHER; note = 2'-O-Methyl-cytidine
  modified_base 92: mod_base = OTHER; note = 2'-O-Methyl-guanosine
  modified_base 93: mod_base = OTHER; note = 2'-O-Methyl-guanosine
  modified_base 94: mod_base = OTHER; note = 2'-O-Methyl-uridine
  modified_base 95: mod_base = OTHER; note = 2'-O-Methyl-guanosine
  modified_base 96: mod_base = OTHER; note = 2'-O-Methyl-cytidine
  modified_base 97: mod_base = OTHER; note = 2'-O-Methyl-uridine
  modified_base 98: mod_base = OTHER; note = 2'-O-Methyl-uridine phosphorothioate
  modified_base 99: mod_base = OTHER; note = 2'-O-Methyl-uridine phosphorothioate
  modified_base 100: mod_base = OTHER; note = 2'-O-Methyl-uridine
  modified_base 101: mod_base = OTHER; note = 2'-O-Methyl-uridine
  modified_base 103: mod_base = OTHER; note = 2'-O-Methyl-uridine

SEQ ID NO: 2305 - RNA, 103 nt, synthetic construct; identical to SEQ ID NO: 1643
  source 1..103: mol_type = other RNA
  modified_base 1: mod_base = OTHER; note = 2'-O-Methyl-cytidine phosphorothioate
  modified_base 2: mod_base = OTHER; note = 2'-O-Methyl-cytidine phosphorothioate
  modified_base 3: mod_base = OTHER; note = 2'-O-Methyl-cytidine phosphorothioate
  modified_base 21: mod_base = OTHER; note = 2'-O-Methyl-guanosine
  modified_base 28: mod_base = OTHER; note = 2'-O-Methyl-adenosine
  modified_base 29: mod_base = OTHER; note = 2'-O-Methyl-guanosine
  modified_base 30: mod_base = OTHER; note = 2'-O-Methyl-cytidine
  modified_base 31: mod_base = OTHER; note = 2'-O-Methyl-uridine
  modified_base 32: mod_base = OTHER; note = 2'-O-Methyl-adenosine
  modified_base 34: mod_base = OTHER; note = 2'-O-Methyl-adenosine
  modified_base 35: mod_base = OTHER; note = 2'-O-Methyl-adenosine
  modified_base 36: mod_base = OTHER; note = 2'-O-Methyl-adenosine
  modified_base 37: mod_base = OTHER; note = 2'-O-Methyl-uridine
  modified_base 38: mod_base = OTHER; note = 2'-O-Methyl-adenosine
  modified_base 39: mod_base = OTHER; note = 2'-O-Methyl-guanosine
  modified_base 40: mod_base = OTHER; note = 2'-O-Methyl-cytidine
  modified_base 41: mod_base = OTHER; note = 2'-O-Methyl-adenosine
  modified_base 42: mod_base = OTHER; note = 2'-O-Methyl-adenosine
  modified_base 45: mod_base = OTHER; note = uridine phosphorothioate
  modified_base 46: mod_base = OTHER; note = 2'-O-Methyl-adenosine
  modified_base 48: mod_base = OTHER; note = 2'-O-Methyl-adenosine
  modified_base 50: mod_base = OTHER; note = 2'-O-Methyl-uridine
  modified_base 52: mod_base = OTHER; note = 2'-O-Methyl-adenosine
  modified_base 53: mod_base = OTHER; note = 2'-O-Methyl-guanosine
  modified_base 54: mod_base = OTHER; note = 2'-O-Methyl-guanosine
  modified_base 55: mod_base = OTHER; note = 2'-O-Methyl-cytidine
  modified_base 56: mod_base = OTHER; note = 2'-O-Methyl-uridine
  modified_base 57: mod_base = OTHER; note = 2'-O-Methyl-adenosine
  modified_base 60: mod_base = OTHER; note = 2'-O-Methyl-cytidine
  modified_base 61: mod_base = OTHER; note = 2'-O-Methyl-cytidine
  modified_base 66: mod_base = OTHER; note = 2'-O-Methyl-uridine
  modified_base 67: mod_base = OTHER; note = 2'-O-Methyl-cytidine
  modified_base 70: mod_base = OTHER; note = 2'-O-Methyl-cytidine
  modified_base 71: mod_base = OTHER; note = 2'-O-Methyl-uridine
  modified_base 72: mod_base = OTHER; note = 2'-O-Methyl-uridine
  modified_base 74: mod_base = OTHER; note = 2'-O-Methyl-adenosine
  modified_base 75: mod_base = OTHER; note = 2'-O-Methyl-adenosine
  modified_base 76: mod_base = OTHER; note = 2'-O-Methyl-adenosine
  modified_base 77: mod_base = OTHER; note = 2'-O-Methyl-adenosine
  modified_base 78: mod_base = OTHER; note = 2'-O-Methyl-adenosine
  modified_base 79: mod_base = OTHER; note = 2'-O-Methyl-guanosine
  modified_base 80: mod_base = OTHER; note = 2'-O-Methyl-uridine
  modified_base 81: mod_base = OTHER; note = 2'-O-Methyl-guanosine
  modified_base 83: mod_base = OTHER; note = 2'-O-Methyl-cytidine
  modified_base 84: mod_base = OTHER; note = 2'-O-Methyl-adenosine
  modified_base 85: mod_base = OTHER; note = 2'-O-Methyl-cytidine
  modified_base 86: mod_base = OTHER; note = 2'-O-Methyl-cytidine
  modified_base 87: mod_base = OTHER; note = 2'-O-Methyl-guanosine
  modified_base 88: mod_base = OTHER; note = 2'-O-Methyl-adenosine
  modified_base 89: mod_base = OTHER; note = 2'-O-Methyl-guanosine
  modified_base 90: mod_base = OTHER; note = 2'-O-Methyl-uridine
  modified_base 91: mod_base = OTHER; note = 2'-O-Methyl-cytidine
  modified_base 92: mod_base = OTHER; note = 2'-O-Methyl-guanosine
  modified_base 93: mod_base = OTHER; note = 2'-O-Methyl-guanosine
  modified_base 94: mod_base = OTHER; note = 2'-O-Methyl-uridine
  modified_base 95: mod_base = OTHER; note = 2'-O-Methyl-guanosine
  modified_base 96: mod_base = OTHER; note = 2'-O-Methyl-cytidine
  modified_base 97: mod_base = OTHER; note = 2'-O-Methyl-uridine
  modified_base 98: mod_base = OTHER; note = 2'-O-Methyl-uridine phosphorothioate
  modified_base 99: mod_base = OTHER; note = 2'-O-Methyl-uridine phosphorothioate
  modified_base 100: mod_base = OTHER; note = 2'-O-Methyl-uridine
  modified_base 101: mod_base = OTHER; note = 2'-O-Methyl-uridine
  modified_base 103: mod_base = OTHER; note = 2'-O-Methyl-uridine

SEQ ID NO: 2306 - RNA, 103 nt, synthetic construct; identical to SEQ ID NO: 1643
  source 1..103: mol_type = other RNA
  modified_base 1: mod_base = OTHER; note = 2'-O-Methyl-cytidine phosphorothioate
  modified_base 2: mod_base = OTHER; note = 2'-O-Methyl-cytidine phosphorothioate
  modified_base 3: mod_base = OTHER; note = 2'-O-Methyl-cytidine phosphorothioate
  modified_base 21: mod_base = OTHER; note = 2'-O-Methyl-guanosine
  modified_base 28: mod_base = OTHER; note = 2'-O-Methyl-adenosine
  modified_base 29: mod_base = OTHER; note = 2'-O-Methyl-guanosine
  modified_base 30: mod_base = OTHER; note = 2'-O-Methyl-cytidine
  modified_base 31: mod_base = OTHER; note = 2'-O-Methyl-uridine
  modified_base 32: mod_base = OTHER; note = 2'-O-Methyl-adenosine
  modified_base 34: mod_base = OTHER; note = 2'-O-Methyl-adenosine
  modified_base 35: mod_base = OTHER; note = 2'-O-Methyl-adenosine
  modified_base 36: mod_base = OTHER; note = 2'-O-Methyl-adenosine
  modified_base 37: mod_base = OTHER; note = 2'-O-Methyl-uridine
  modified_base 38: mod_base = OTHER; note = 2'-O-Methyl-adenosine
  modified_base 39: mod_base = OTHER; note = 2'-O-Methyl-guanosine
  modified_base 40: mod_base = OTHER; note = 2'-O-Methyl-cytidine
  modified_base 41: mod_base = OTHER; note = 2'-O-Methyl-adenosine
  modified_base 42: mod_base = OTHER; note = 2'-O-Methyl-adenosine
  modified_base 46: mod_base = OTHER; note = 2'-O-Methyl-adenosine
  modified_base 48: mod_base = OTHER; note = 2'-O-Methyl-adenosine
  modified_base 50: mod_base = OTHER; note = 2'-O-Methyl-uridine
  modified_base 52: mod_base = OTHER; note = 2'-O-Methyl-adenosine
  modified_base 53: mod_base = OTHER; note = 2'-O-Methyl-guanosine
  modified_base 54: mod_base = OTHER; note = 2'-O-Methyl-guanosine
  modified_base 55: mod_base = OTHER; note = 2'-O-Methyl-cytidine
  modified_base 56: mod_base = OTHER; note = 2'-O-Methyl-uridine
  modified_base 57: mod_base = OTHER; note = 2'-O-Methyl-adenosine
  modified_base 60: mod_base = OTHER; note = 2'-O-Methyl-cytidine
  modified_base 61: mod_base = OTHER; note = 2'-O-Methyl-cytidine
  modified_base 64: mod_base = OTHER; note = uridine phosphorothioate
  modified_base 66: mod_base = OTHER; note = 2'-O-Methyl-uridine
  modified_base 67: mod_base = OTHER; note = 2'-O-Methyl-cytidine
  modified_base 70: mod_base = OTHER; note = 2'-O-Methyl-cytidine
  modified_base 71: mod_base = OTHER; note = 2'-O-Methyl-uridine
  modified_base 72: mod_base = OTHER; note = 2'-O-Methyl-uridine
  modified_base 74: mod_base = OTHER; note = 2'-O-Methyl-adenosine
  modified_base 75: mod_base = OTHER; note = 2'-O-Methyl-adenosine
  modified_base 76: mod_base = OTHER; note = 2'-O-Methyl-adenosine
  modified_base 77: mod_base = OTHER; note = 2'-O-Methyl-adenosine
  modified_base 78: mod_base = OTHER; note = 2'-O-Methyl-adenosine
  modified_base 79: mod_base = OTHER; note = 2'-O-Methyl-guanosine
  modified_base 80: mod_base = OTHER; note = 2'-O-Methyl-uridine
  modified_base 81: mod_base = OTHER; note = 2'-O-Methyl-guanosine
  modified_base 83: mod_base = OTHER; note = 2'-O-Methyl-cytidine
  modified_base 84: mod_base = OTHER; note = 2'-O-Methyl-adenosine
  modified_base 85: mod_base = OTHER; note = 2'-O-Methyl-cytidine
  modified_base 86: mod_base = OTHER; note = 2'-O-Methyl-cytidine
  modified_base 87: mod_base = OTHER; note = 2'-O-Methyl-guanosine
  modified_base 88: mod_base = OTHER; note = 2'-O-Methyl-adenosine
  modified_base 89: mod_base = OTHER; note = 2'-O-Methyl-guanosine
  modified_base 90: mod_base = OTHER; note = 2'-O-Methyl-uridine
  modified_base 91: mod_base = OTHER; note = 2'-O-Methyl-cytidine
  modified_base 92: mod_base = OTHER; note = 2'-O-Methyl-guanosine
  modified_base 93: mod_base = OTHER; note = 2'-O-Methyl-guanosine
  modified_base 94: mod_base = OTHER; note = 2'-O-Methyl-uridine
  modified_base 95: mod_base = OTHER; note = 2'-O-Methyl-guanosine
  modified_base 96: mod_base = OTHER; note = 2'-O-Methyl-cytidine
  modified_base 97: mod_base = OTHER; note = 2'-O-Methyl-uridine
  modified_base 98: mod_base = OTHER; note = 2'-O-Methyl-uridine phosphorothioate
  modified_base 99: mod_base = OTHER; note = 2'-O-Methyl-uridine phosphorothioate
  modified_base 100: mod_base = OTHER; note = 2'-O-Methyl-uridine
  modified_base 101: mod_base = OTHER; note = 2'-O-Methyl-uridine
  modified_base 103: mod_base = OTHER; note = 2'-O-Methyl-uridine

SEQ ID NO: 2307 - RNA, 100 nt, synthetic construct; identical to SEQ ID NO: 421
  source 1..100: mol_type = other RNA
  modified_base 1: mod_base = OTHER; note = 2'-O-Methyl-cytidine phosphorothioate
  modified_base 2: mod_base = OTHER; note = 2'-O-Methyl-cytidine phosphorothioate
  modified_base 3: mod_base = OTHER; note = 2'-O-Methyl-cytidine phosphorothioate
  modified_base 21: mod_base = OTHER; note = 2'-O-Methyl-guanosine
  modified_base 28: mod_base = OTHER; note = 2'-O-Methyl-adenosine
  modified_base 29: mod_base = OTHER; note = 2'-O-Methyl-guanosine
  modified_base 30: mod_base = OTHER; note = 2'-O-Methyl-cytidine
  modified_base 31: mod_base = OTHER; note = 2'-O-Methyl-uridine
  modified_base 32: mod_base = OTHER; note = 2'-O-Methyl-adenosine
  modified_base 33: mod_base = OTHER; note = 2'-O-Methyl-guanosine
  modified_base 34: mod_base = OTHER; note = 2'-O-Methyl-adenosine
  modified_base 35: mod_base = OTHER; note = 2'-O-Methyl-adenosine
  modified_base 36: mod_base = OTHER; note = 2'-O-Methyl-adenosine
  modified_base 37: mod_base = OTHER; note = 2'-O-Methyl-uridine
  modified_base 38: mod_base = OTHER; note = 2'-O-Methyl-adenosine
  modified_base 39: mod_base = OTHER; note = 2'-O-Methyl-guanosine
  modified_base 40: mod_base = OTHER; note = 2'-O-Methyl-cytidine
  modified_base 41: mod_base = OTHER; note = 2'-O-Methyl-adenosine
  modified_base 42: mod_base = OTHER; note = 2'-O-Methyl-adenosine
  modified_base 46: mod_base = OTHER; note = 2'-O-Methyl-adenosine
  modified_base 48: mod_base = OTHER; note = 2'-O-Methyl-adenosine
  modified_base 50: mod_base = OTHER; note = 2'-O-Methyl-uridine
  modified_base 52: mod_base = OTHER; note = 2'-O-Methyl-adenosine
  modified_base 53: mod_base = OTHER; note = 2'-O-Methyl-guanosine
  modified_base 54: mod_base = OTHER; note = 2'-O-Methyl-guanosine
  modified_base 55: mod_base = OTHER; note = 2'-O-Methyl-cytidine
  modified_base 56: mod_base = OTHER; note = 2'-O-Methyl-uridine
  modified_base 57: mod_base = OTHER; note = 2'-O-Methyl-adenosine
  modified_base 61: mod_base = OTHER; note = 2'-O-Methyl-cytidine
  modified_base 66: mod_base = OTHER; note = 2'-O-Methyl-uridine
  modified_base 67: mod_base = OTHER; note = 2'-O-Methyl-cytidine
  modified_base 70: mod_base = OTHER; note = 2'-O-Methyl-cytidine
  modified_base 71: mod_base = OTHER; note = 2'-O-Methyl-uridine
  modified_base 72: mod_base = OTHER; note = 2'-O-Methyl-uridine
  modified_base 73: mod_base = OTHER; note = 2'-O-Methyl-guanosine
  modified_base 74: mod_base = OTHER; note = 2'-O-Methyl-adenosine
  modified_base 75: mod_base = OTHER; note = 2'-O-Methyl-adenosine
  modified_base 76: mod_base = OTHER; note = 2'-O-Methyl-adenosine
  modified_base 77: mod_base = OTHER; note = 2'-O-Methyl-adenosine
  modified_base 78: mod_base = OTHER; note = 2'-O-Methyl-adenosine
  modified_base 79: mod_base = OTHER; note = 2'-O-Methyl-guanosine
  modified_base 80: mod_base = OTHER; note = 2'-O-Methyl-uridine
  modified_base 81: mod_base = OTHER; note = 2'-O-Methyl-guanosine
  modified_base 82: mod_base = OTHER; note = 2'-O-Methyl-guanosine
  modified_base 83: mod_base = OTHER; note = 2'-O-Methyl-cytidine
  modified_base 84: mod_base = OTHER; note = 2'-O-Methyl-adenosine
  modified_base 85: mod_base = OTHER; note = 2'-O-Methyl-cytidine
  modified_base 86: mod_base = OTHER; note = 2'-O-Methyl-cytidine
  modified_base 87: mod_base = OTHER; note = 2'-O-Methyl-guanosine
  modified_base 88: mod_base = OTHER; note = 2'-O-Methyl-adenosine
  modified_base 89: mod_base = OTHER; note = 2'-O-Methyl-guanosine
  modified_base 90: mod_base = OTHER; note = 2'-O-Methyl-uridine
  modified_base 91: mod_base = OTHER; note = 2'-O-Methyl-cytidine
  modified_base 92: mod_base = OTHER; note = 2'-O-Methyl-guanosine
  modified_base 93: mod_base = OTHER; note = 2'-O-Methyl-guanosine
  modified_base 94: mod_base = OTHER; note = 2'-O-Methyl-uridine
  modified_base 95: mod_base = OTHER; note = 2'-O-Methyl-guanosine
  modified_base 96: mod_base = OTHER; note = 2'-O-Methyl-cytidine
  modified_base 97: mod_base = OTHER; note = 2'-O-Methyl-uridine phosphorothioate
  modified_base 98: mod_base = OTHER; note = 2'-O-Methyl-uridine phosphorothioate
  modified_base 99: mod_base = OTHER; note = 2'-O-Methyl-uridine phosphorothioate
  modified_base 100: mod_base = OTHER; note = 2'-O-Methyl-uridine

SEQ ID NO: 2308 - RNA, 100 nt, synthetic construct; identical to SEQ ID NO: 421
  source 1..100: mol_type = other RNA
  modified_base 1: mod_base = OTHER; note = 2'-O-Methyl-cytidine phosphorothioate
  modified_base 2: mod_base = OTHER; note = 2'-O-Methyl-cytidine phosphorothioate
  modified_base 3: mod_base = OTHER; note = 2'-O-Methyl-cytidine phosphorothioate
  modified_base 21: mod_base = OTHER; note = 2'-O-Methyl-guanosine
  modified_base 28: mod_base = OTHER; note = 2'-O-Methyl-adenosine
  modified_base 29: mod_base = OTHER; note = 2'-O-Methyl-guanosine
  modified_base 30: mod_base = OTHER; note = 2'-O-Methyl-cytidine
  modified_base 31: mod_base = OTHER; note = 2'-O-Methyl-uridine
  modified_base 32: mod_base = OTHER; note = 2'-O-Methyl-adenosine
  modified_base 33: mod_base = OTHER; note = 2'-O-Methyl-guanosine
  modified_base 34: mod_base = OTHER; note = 2'-O-Methyl-adenosine
  modified_base 35: mod_base = OTHER; note = 2'-O-Methyl-adenosine
  modified_base 36: mod_base = OTHER; note = 2'-O-Methyl-adenosine
  modified_base 37: mod_base = OTHER; note = 2'-O-Methyl-uridine
  modified_base 38: mod_base = OTHER; note = 2'-O-Methyl-adenosine
  modified_base 39: mod_base = OTHER; note = 2'-O-Methyl-guanosine
  modified_base 40: mod_base = OTHER; note = 2'-O-Methyl-cytidine
  modified_base 41: mod_base = OTHER; note = 2'-O-Methyl-adenosine
  modified_base 42: mod_base = OTHER; note = 2'-O-Methyl-adenosine
  modified_base 46: mod_base = OTHER; note = 2'-O-Methyl-adenosine
  modified_base 48: mod_base = OTHER; note = 2'-O-Methyl-adenosine
  modified_base 50: mod_base = OTHER; note = 2'-O-Methyl-uridine
  modified_base 52: mod_base = OTHER; note = 2'-O-Methyl-adenosine
  modified_base 53: mod_base = OTHER; note = 2'-O-Methyl-guanosine
  modified_base 54: mod_base = OTHER; note = 2'-O-Methyl-guanosine
  modified_base 55: mod_base = OTHER; note = 2'-O-Methyl-cytidine
  modified_base 56: mod_base = OTHER; note = 2'-O-Methyl-uridine
  modified_base 57: mod_base = OTHER; note = 2'-O-Methyl-adenosine
  modified_base 59: mod_base = OTHER; note = 2'-O-Methyl-uridine
  modified_base 61: mod_base = OTHER; note = 2'-O-Methyl-cytidine
  modified_base 65: mod_base = OTHER; note = 2'-O-Methyl-adenosine
  modified_base 66: mod_base = OTHER; note = 2'-O-Methyl-uridine
  modified_base 67: mod_base = OTHER; note = 2'-O-Methyl-cytidine
  modified_base 70: mod_base = OTHER; note = 2'-O-Methyl-cytidine
  modified_base 71: mod_base = OTHER; note = 2'-O-Methyl-uridine
  modified_base 72: mod_base = OTHER; note = 2'-O-Methyl-uridine
  modified_base 73: mod_base = OTHER; note = 2'-O-Methyl-guanosine
  modified_base 74: mod_base = OTHER; note = 2'-O-Methyl-adenosine
  modified_base 75: mod_base = OTHER; note = 2'-O-Methyl-adenosine
  modified_base 76: mod_base = OTHER; note = 2'-O-Methyl-adenosine
  modified_base 77: mod_base = OTHER; note = 2'-O-Methyl-adenosine
  modified_base 78: mod_base = OTHER; note = 2'-O-Methyl-adenosine
  modified_base 79: mod_base = OTHER; note = 2'-O-Methyl-guanosine
  modified_base 80: mod_base = OTHER; note = 2'-O-Methyl-uridine
  modified_base 81: mod_base = OTHER; note = 2'-O-Methyl-guanosine
  modified_base 82: mod_base = OTHER; note = 2'-O-Methyl-guanosine
  modified_base 83: mod_base = OTHER; note = 2'-O-Methyl-cytidine
  modified_base 84: mod_base = OTHER; note = 2'-O-Methyl-adenosine
  modified_base 85: mod_base = OTHER; note = 2'-O-Methyl-cytidine
  modified_base 86: mod_base = OTHER; note = 2'-O-Methyl-cytidine
  modified_base 87: mod_base = OTHER; note = 2'-O-Methyl-guanosine
  modified_base 88: mod_base = OTHER; note = 2'-O-Methyl-adenosine
  modified_base 89: mod_base = OTHER; note = 2'-O-Methyl-guanosine
  modified_base 90: mod_base = OTHER; note = 2'-O-Methyl-uridine
  modified_base 91: mod_base = OTHER; note = 2'-O-Methyl-cytidine
  modified_base 92: mod_base = OTHER; note = 2'-O-Methyl-guanosine
  modified_base 93: mod_base = OTHER; note = 2'-O-Methyl-guanosine
  modified_base 94: mod_base = OTHER; note = 2'-O-Methyl-uridine
  modified_base 95: mod_base = OTHER; note = 2'-O-Methyl-guanosine
  modified_base 96: mod_base = OTHER; note = 2'-O-Methyl-cytidine
  modified_base 97: mod_base = OTHER; note = 2'-O-Methyl-uridine phosphorothioate
  modified_base 98: mod_base = OTHER; note = 2'-O-Methyl-uridine phosphorothioate
  modified_base 99: mod_base = OTHER; note = 2'-O-Methyl-uridine phosphorothioate
  modified_base 100: mod_base = OTHER; note = 2'-O-Methyl-uridine

SEQ ID NO: 2309 - RNA, 100 nt, synthetic construct; identical to SEQ ID NO: 421
  source 1..100: mol_type = other RNA
  modified_base 1: mod_base = OTHER; note = 2'-O-Methyl-cytidine phosphorothioate
  modified_base 2: mod_base = OTHER; note = 2'-O-Methyl-cytidine phosphorothioate
  modified_base 3: mod_base = OTHER; note = 2'-O-Methyl-cytidine phosphorothioate
  modified_base 21: mod_base = OTHER; note = 2'-O-Methyl-guanosine
  modified_base 25: mod_base = OTHER; note = 2'-O-Methyl-uridine
  modified_base 26: mod_base = OTHER; note = 2'-O-Methyl-adenosine
  modified_base 27: mod_base = OTHER; note = 2'-O-Methyl-guanosine
  modified_base 28: mod_base = OTHER; note = 2'-O-Methyl-adenosine
  modified_base 29: mod_base = OTHER; note = 2'-O-Methyl-guanosine
  modified_base 30: mod_base = OTHER; note = 2'-O-Methyl-cytidine
  modified_base 31: mod_base = OTHER; note = 2'-O-Methyl-uridine
  modified_base 32: mod_base = OTHER; note = 2'-O-Methyl-adenosine
  modified_base 33: mod_base = OTHER; note = 2'-O-Methyl-guanosine
  modified_base 34: mod_base = OTHER; note = 2'-O-Methyl-adenosine
  modified_base 35: mod_base = OTHER; note = 2'-O-Methyl-adenosine
  modified_base 36: mod_base = OTHER; note = 2'-O-Methyl-adenosine
  modified_base 37: mod_base = OTHER; note = 2'-O-Methyl-uridine
  modified_base 38: mod_base = OTHER; note = 2'-O-Methyl-adenosine
  modified_base 39: mod_base = OTHER; note = 2'-O-Methyl-guanosine
  modified_base 40: mod_base = OTHER; note = 2'-O-Methyl-cytidine
  modified_base 41: mod_base = OTHER; note = 2'-O-Methyl-adenosine
  modified_base 42: mod_base = OTHER; note = 2'-O-Methyl-adenosine
  modified_base 46: mod_base = OTHER; note = 2'-O-Methyl-adenosine
  modified_base 48: mod_base = OTHER; note = 2'-O-Methyl-adenosine
  modified_base 50: mod_base = OTHER; note = 2'-O-Methyl-uridine
  modified_base 51: mod_base = OTHER; note = 2'-O-Methyl-adenosine
  modified_base 52: mod_base = OTHER; note = 2'-O-Methyl-adenosine
  modified_base 53: mod_base = OTHER; note = 2'-O-Methyl-guanosine
  modified_base 54: mod_base = OTHER; note = 2'-O-Methyl-guanosine
  modified_base 55: mod_base = OTHER; note = 2'-O-Methyl-cytidine
  modified_base 56: mod_base = OTHER; note = 2'-O-Methyl-uridine
  modified_base 57: mod_base = OTHER; note = 2'-O-Methyl-adenosine
  modified_base 59: mod_base = OTHER; note = 2'-O-Methyl-uridine
  modified_base 60: mod_base = OTHER; note = 2'-O-Methyl-cytidine
  modified_base 61: mod_base = OTHER; note = 2'-O-Methyl-cytidine
  modified_base 62: mod_base = OTHER; note = 2'-O-Methyl-guanosine
  modified_base 65: mod_base = OTHER; note = 2'-O-Methyl-adenosine
  modified_base 66: mod_base = OTHER; note = 2'-O-Methyl-uridine
  modified_base 67: mod_base = OTHER; note = 2'-O-Methyl-cytidine
  modified_base 68: mod_base = OTHER; note = 2'-O-Methyl-adenosine
  modified_base 69: mod_base = OTHER; note = 2'-O-Methyl-adenosine
  modified_base 70: mod_base = OTHER; note = 2'-O-Methyl-cytidine
  modified_base 71: mod_base = OTHER; note = 2'-O-Methyl-uridine
  modified_base 72: mod_base = OTHER; note = 2'-O-Methyl-uridine
  modified_base 73: mod_base = OTHER; note = 2'-O-Methyl-guanosine
  modified_base 74: mod_base = OTHER; note = 2'-O-Methyl-adenosine
  modified_base 75: mod_base = OTHER; note = 2'-O-Methyl-adenosine
  modified_base 76: mod_base = OTHER; note = 2'-O-Methyl-adenosine
  modified_base 77: mod_base = OTHER; note = 2'-O-Methyl-adenosine
  modified_base 78: mod_base = OTHER; note = 2'-O-Methyl-adenosine
  modified_base 79: mod_base = OTHER; note = 2'-O-Methyl-guanosine
  modified_base 80: mod_base = OTHER; note = 2'-O-Methyl-uridine
  modified_base 81: mod_base = OTHER; note = 2'-O-Methyl-guanosine
  modified_base 82: mod_base = OTHER; note = 2'-O-Methyl-guanosine
  modified_base 83: mod_base = OTHER; note = 2'-O-Methyl-cytidine
  modified_base 84: mod_base = OTHER; note = 2'-O-Methyl-adenosine
  modified_base 85: mod_base = OTHER; note = 2'-O-Methyl-cytidine
  modified_base 86: mod_base = OTHER; note = 2'-O-Methyl-cytidine
  modified_base 87: mod_base = OTHER; note = 2'-O-Methyl-guanosine
  modified_base 88: mod_base = OTHER; note = 2'-O-Methyl-adenosine
  modified_base 89: mod_base = OTHER; note = 2'-O-Methyl-guanosine
  modified_base 90: mod_base = OTHER; note = 2'-O-Methyl-uridine
  modified_base 91: mod_base = OTHER; note = 2'-O-Methyl-cytidine
  modified_base 92: mod_base = OTHER; note = 2'-O-Methyl-guanosine
  modified_base 93: mod_base = OTHER; note = 2'-O-Methyl-guanosine
  modified_base 94: mod_base = OTHER; note = 2'-O-Methyl-uridine
  modified_base 95: mod_base = OTHER; note = 2'-O-Methyl-guanosine
  modified_base 96: mod_base = OTHER; note = 2'-O-Methyl-cytidine
  modified_base 97: mod_base = OTHER; note = 2'-O-Methyl-uridine phosphorothioate
  modified_base 98: mod_base = OTHER; note = 2'-O-Methyl-uridine phosphorothioate
  modified_base 99: mod_base = OTHER; note = 2'-O-Methyl-uridine phosphorothioate
  modified_base 100: mod_base = OTHER; note = 2'-O-Methyl-uridine

SEQ ID NO: 2310 - RNA, 100 nt, synthetic construct; identical to SEQ ID NO: 9
  source 1..100: mol_type = other RNA
  modified_base 1: mod_base = OTHER; note = 2'-O-Methyl-cytidine phosphorothioate
  modified_base 2: mod_base = OTHER; note = 2'-O-Methyl-cytidine phosphorothioate
  modified_base 3: mod_base = OTHER; note = 2'-O-Methyl-cytidine phosphorothioate
  modified_base 21: mod_base = OTHER; note = 2'-O-Methyl-guanosine
  modified_base 25: mod_base = OTHER; note = 2'-O-Methyl-uridine
  modified_base 26: mod_base = OTHER; note = 2'-O-Methyl-adenosine
  modified_base 27: mod_base = OTHER; note = 2'-O-Methyl-guanosine
  modified_base 28: mod_base = OTHER; note = 2'-O-Methyl-adenosine
  modified_base 29: mod_base = OTHER; note = 2'-O-Methyl-guanosine
  modified_base 30: mod_base = OTHER; note = 2'-O-Methyl-cytidine
  modified_base 31: mod_base = OTHER; note = 2'-O-Methyl-uridine
  modified_base 32: mod_base = OTHER; note = 2'-O-Methyl-adenosine
  modified_base 33: mod_base = OTHER; note = 2'-O-Methyl-guanosine
  modified_base 34: mod_base = OTHER; note = 2'-O-Methyl-adenosine
  modified_base 35: mod_base = OTHER; note = 2'-O-Methyl-adenosine
  modified_base 36: mod_base = OTHER; note = 2'-O-Methyl-adenosine
  modified_base 37: mod_base = OTHER; note = 2'-O-Methyl-uridine
  modified_base 38: mod_base = OTHER; note = 2'-O-Methyl-adenosine
  modified_base 39: mod_base = OTHER; note = 2'-O-Methyl-guanosine
  modified_base 40: mod_base = OTHER; note = 2'-O-Methyl-cytidine
  modified_base 41: mod_base = OTHER; note = 2'-O-Methyl-adenosine
  modified_base 42: mod_base = OTHER; note = 2'-O-Methyl-adenosine
  modified_base 46: mod_base = OTHER; note = 2'-O-Methyl-adenosine
  modified_base 48: mod_base = OTHER; note = 2'-O-Methyl-adenosine
  modified_base 50: mod_base = OTHER; note = 2'-O-Methyl-uridine
  modified_base 51: mod_base = OTHER; note = 2'-O-Methyl-adenosine
  modified_base 52: mod_base = OTHER; note = 2'-O-Methyl-adenosine
  modified_base 53: mod_base = OTHER; note = 2'-O-Methyl-guanosine
  modified_base 54: mod_base = OTHER; note = 2'-O-Methyl-guanosine
  modified_base 55: mod_base = OTHER; note = 2'-O-Methyl-cytidine
  modified_base 56: mod_base = OTHER; note = 2'-O-Methyl-uridine
  modified_base 57: mod_base = OTHER; note = 2'-O-Methyl-adenosine
  modified_base 59: mod_base = OTHER; note = 2'-O-Methyl-uridine
  modified_base 60: mod_base = OTHER; note = 2'-O-Methyl-cytidine
  modified_base 61: mod_base = OTHER; note = 2'-O-Methyl-cytidine
  modified_base 62: mod_base = OTHER; note = 2'-O-Methyl-guanosine
  modified_base 65: mod_base = OTHER; note = 2'-O-Methyl-adenosine
  modified_base 66: mod_base = OTHER; note = 2'-O-Methyl-uridine
  modified_base 67: mod_base = OTHER; note = 2'-O-Methyl-cytidine
  modified_base 68: mod_base = OTHER; note = 2'-O-Methyl-adenosine
  modified_base 69: mod_base = OTHER; note = 2'-O-Methyl-adenosine
  modified_base 70: mod_base = OTHER; note = 2'-O-Methyl-cytidine
  modified_base 71: mod_base = OTHER; note = 2'-O-Methyl-uridine
  modified_base 72: mod_base = OTHER; note = 2'-O-Methyl-uridine
  modified_base 73: mod_base = OTHER; note = 2'-O-Methyl-guanosine
  modified_base 74: mod_base = OTHER; note = 2'-O-Methyl-adenosine
  modified_base 75: mod_base = OTHER; note = 2'-O-Methyl-adenosine
  modified_base 76: mod_base = OTHER; note = 2'-O-Methyl-adenosine
  modified_base 77: mod_base = OTHER; note = 2'-O-Methyl-adenosine
  modified_base 78: mod_base = OTHER; note = 2'-O-Methyl-adenosine
  modified_base 79: mod_base = OTHER; note = 2'-O-Methyl-guanosine
  modified_base 80: mod_base = OTHER; note = 2'-O-Methyl-uridine
  modified_base 81: mod_base = OTHER; note = 2'-O-Methyl-guanosine
  modified_base 82: mod_base = OTHER; note = 2'-O-Methyl-guanosine
  modified_base 83: mod_base = OTHER; note = 2'-O-Methyl-cytidine
  modified_base 84: mod_base = OTHER; note = 2'-O-Methyl-adenosine
  modified_base 85: mod_base = OTHER; note = 2'-O-Methyl-cytidine
  modified_base 86: mod_base = OTHER; note = 2'-O-Methyl-cytidine
  modified_base 87: mod_base = OTHER; note = 2'-O-Methyl-guanosine
  modified_base 88: mod_base = OTHER; note = 2'-O-Methyl-adenosine
  modified_base 89: mod_base = OTHER; note = 2'-O-Methyl-guanosine
  modified_base 90: mod_base = OTHER; note = 2'-O-Methyl-uridine
  modified_base 91: mod_base = OTHER; note = 2'-O-Methyl-cytidine
  modified_base 92: mod_base = OTHER; note = 2'-O-Methyl-guanosine
  modified_base 93: mod_base = OTHER; note = 2'-O-Methyl-guanosine
  modified_base 94: mod_base = OTHER; note = 2'-O-Methyl-uridine
  modified_base 95: mod_base = OTHER; note = 2'-O-Methyl-guanosine
  modified_base 96: mod_base = OTHER; note = 2'-O-Methyl-cytidine
  modified_base 97: mod_base = OTHER; note = 2'-O-Methyl-uridine phosphorothioate
  modified_base 98: mod_base = OTHER; note = 2'-O-Methyl-uridine phosphorothioate
  modified_base 99: mod_base = OTHER; note = 2'-O-Methyl-uridine phosphorothioate
  modified_base 100: mod_base = OTHER; note = 2'-O-Methyl-uridine

SEQ ID NO: 2311 - RNA, 99 nt, synthetic construct; identical to SEQ ID NO: 442
  source 1..99: mol_type = other RNA
  modified_base 1: mod_base = OTHER; note = 2'-O-Methyl-adenosine phosphorothioate
  modified_base 2: mod_base = OTHER; note = 2'-O-Methyl-guanosine phosphorothioate
  modified_base 3: mod_base = OTHER; note = 2'-O-Methyl-adenosine phosphorothioate
  modified_base 96: mod_base = OTHER; note = uridine phosphorothioate
  modified_base 97: mod_base = OTHER; note = 2'-O-Methyl-uridine phosphorothioate
  modified_base 98: mod_base = OTHER; note = 2'-O-Methyl-uridine phosphorothioate
  modified_base 99: mod_base = OTHER; note = 2'-O-Methyl-uridine

SEQ ID NO: 2312 - RNA, 98 nt, synthetic construct; identical to SEQ ID NO: 443
  source 1..98: mol_type = other RNA
  modified_base 1: mod_base = OTHER; note = 2'-O-Methyl-guanosine phosphorothioate
  modified_base 2: mod_base = OTHER; note = 2'-O-Methyl-adenosine phosphorothioate
  modified_base 95: mod_base = OTHER; note = uridine phosphorothioate
  modified_base 96: mod_base = OTHER; note = 2'-O-Methyl-uridine phosphorothioate
  modified_base 97: mod_base = OTHER; note = 2'-O-Methyl-uridine phosphorothioate
  modified_base 98: mod_base = OTHER; note = 2'-O-Methyl-uridine

SEQ ID NO: 2313 - RNA, 97 nt, synthetic construct; identical to SEQ ID NO: 444
  source 1..97: mol_type = other RNA
  modified_base 1: mod_base = OTHER; note = 2'-O-Methyl-adenosine phosphorothioate
  modified_base 2: mod_base = OTHER; note = 2'-O-Methyl-uridine phosphorothioate
  modified_base 94: mod_base = OTHER; note = uridine phosphorothioate
  modified_base 95: mod_base = OTHER; note = 2'-O-Methyl-uridine phosphorothioate
  modified_base 96: mod_base = OTHER; note = 2'-O-Methyl-uridine phosphorothioate
  modified_base 97: mod_base = OTHER; note = 2'-O-Methyl-uridine

SEQ ID NO: 2314 - RNA, 99 nt, synthetic construct; identical to SEQ ID NO: 442
  source 1..99: mol_type = other RNA
  modified_base 1: mod_base = OTHER; note = 2'-O-Methyl-adenosine phosphorothioate
  modified_base 2: mod_base = OTHER; note = 2'-O-Methyl-guanosine phosphorothioate
  modified_base 96: mod_base = OTHER; note = uridine phosphorothioate
  modified_base 97: mod_base = OTHER; note = 2'-O-Methyl-uridine phosphorothioate
  modified_base 98: mod_base = OTHER; note = 2'-O-Methyl-uridine phosphorothioate
  modified_base 99: mod_base = OTHER; note = 2'-O-Methyl-uridine

SEQ ID NO: 2315 - RNA, 97 nt, synthetic construct; identical to SEQ ID NO: 444
  source 1..97: mol_type = other RNA
  modified_base 1: mod_base = OTHER; note = 2'-O-Methyl-adenosine phosphorothioate
  modified_base 2: mod_base = OTHER; note = uridine phosphorothioate
  modified_base 94: mod_base = OTHER; note = uridine phosphorothioate
  modified_base 95: mod_base = OTHER; note = 2'-O-Methyl-uridine phosphorothioate
  modified_base 96: mod_base = OTHER; note = 2'-O-Methyl-uridine phosphorothioate
  modified_base 97: mod_base = OTHER; note = 2'-O-Methyl-uridine

SEQ ID NO: 2316 - RNA, 100 nt, synthetic construct; identical to SEQ ID NO: 55
  source 1..100: mol_type = other RNA
  modified_base 1: mod_base = OTHER; note = 2'-O-Methyl-cytidine phosphorothioate
  modified_base 2: mod_base = OTHER; note = 2'-O-Methyl-adenosine phosphorothioate
  modified_base 3: mod_base = OTHER; note = 2'-O-Methyl-guanosine phosphorothioate
  modified_base 21: mod_base = OTHER; note = 2'-O-Methyl-guanosine
  modified_base 25: mod_base = OTHER; note = uridine phosphorothioate
  modified_base 28: mod_base = OTHER; note = 2'-O-Methyl-adenosine
  modified_base 29: mod_base = OTHER; note = 2'-O-Methyl-guanosine
  modified_base 30: mod_base = OTHER; note = 2'-O-Methyl-cytidine
  modified_base 31: mod_base = OTHER; note = 2'-O-Methyl-uridine
  modified_base 32: mod_base = OTHER; note = 2'-O-Methyl-adenosine
  modified_base 33: mod_base = OTHER; note = 2'-O-Methyl-guanosine
  modified_base 34: mod_base = OTHER; note = 2'-O-Methyl-adenosine
  modified_base 35: mod_base = OTHER; note = 2'-O-Methyl-adenosine
  modified_base 36: mod_base = OTHER; note = 2'-O-Methyl-adenosine
  modified_base 37: mod_base = OTHER; note = 2'-O-Methyl-uridine
  modified_base 38: mod_base = OTHER; note = 2'-O-Methyl-adenosine
  modified_base 39: mod_base = OTHER; note = 2'-O-Methyl-guanosine
  modified_base 40: mod_base = OTHER; note = 2'-O-Methyl-cytidine
  modified_base 41: mod_base = OTHER; note = 2'-O-Methyl-adenosine
  modified_base 42: mod_base = OTHER; note = 2'-O-Methyl-adenosine
  modified_base 46: mod_base = OTHER; note = 2'-O-Methyl-adenosine
  modified_base 48: mod_base = OTHER; note = 2'-O-Methyl-adenosine
  modified_base 50: mod_base = OTHER; note = 2'-O-Methyl-uridine
  modified_base 52: mod_base = OTHER; note = 2'-O-Methyl-adenosine
  modified_base 53: mod_base = OTHER; note = 2'-O-Methyl-guanosine
  modified_base 54: mod_base = OTHER; note = 2'-O-Methyl-guanosine
  modified_base 55: mod_base = OTHER; note = 2'-O-Methyl-cytidine
  modified_base 56: mod_base = OTHER; note = 2'-O-Methyl-uridine
  modified_base 57: mod_base = OTHER; note = 2'-O-Methyl-adenosine
  modified_base 60: mod_base = OTHER; note = 2'-O-Methyl-cytidine
  modified_base 61: mod_base = OTHER; note = 2'-O-Methyl-cytidine
  modified_base 66: mod_base = OTHER; note = 2'-O-Methyl-uridine
  modified_base 67: mod_base = OTHER; note = 2'-O-Methyl-cytidine
  modified_base 70: mod_base = OTHER; note = 2'-O-Methyl-cytidine
  modified_base 71: mod_base = OTHER; note = 2'-O-Methyl-uridine
  modified_base 72: mod_base = OTHER; note = 2'-O-Methyl-uridine
  modified_base 74: mod_base = OTHER; note = 2'-O-Methyl-adenosine
  modified_base 75: mod_base = OTHER; note = 2'-O-Methyl-adenosine
  modified_base 76: mod_base = OTHER; note = 2'-O-Methyl-adenosine
  modified_base 77: mod_base = OTHER; note = 2'-O-Methyl-adenosine
  modified_base 78: mod_base = OTHER; note = 2'-O-Methyl-adenosine
  modified_base 79: mod_base = OTHER; note = 2'-O-Methyl-guanosine
  modified_base 80: mod_base = OTHER; note = 2'-O-Methyl-uridine
  modified_base 82: mod_base = OTHER; note = 2'-O-Methyl-guanosine
  modified_base 83: mod_base = OTHER; note = 2'-O-Methyl-cytidine
  modified_base 84: mod_base = OTHER; note = 2'-O-Methyl-adenosine
  modified_base 85: mod_base = OTHER; note = 2'-O-Methyl-cytidine
  modified_base 86: mod_base = OTHER; note = 2'-O-Methyl-cytidine
  modified_base 87: mod_base = OTHER; note = 2'-O-Methyl-guanosine
  modified_base 89: mod_base = OTHER; note = 2'-O-Methyl-guanosine
  modified_base 92: mod_base = OTHER; note = 2'-O-Methyl-guanosine
  modified_base 93: mod_base = OTHER; note = 2'-O-Methyl-guanosine
  modified_base 94: mod_base = OTHER; note = 2'-O-Methyl-uridine
  modified_base 95: mod_base = OTHER; note = 2'-O-Methyl-guanosine
  modified_base 96: mod_base = OTHER; note = 2'-O-Methyl-cytidine
  modified_base 97: mod_base = OTHER; note = 2'-O-Methyl-uridine
  modified_base 98: mod_base = OTHER; note = 2'-O-Methyl-uridine phosphorothioate
  modified_base 99: mod_base = OTHER; note = 2'-O-Methyl-uridine phosphorothioate
  modified_base 100: mod_base = OTHER; note = 2'-O-Methyl-uridine

SEQ ID NO: 2317 - RNA, 100 nt, synthetic construct; identical to SEQ ID NO: 55
  source 1..100: mol_type = other RNA
  modified_base 1: mod_base = OTHER; note = 2'-O-Methyl-cytidine phosphorothioate
  modified_base 2: mod_base = OTHER; note = 2'-O-Methyl-adenosine phosphorothioate
  modified_base 3: mod_base = OTHER; note = 2'-O-Methyl-guanosine phosphorothioate
  modified_base 21: mod_base = OTHER; note = 2'-O-Methyl-guanosine
  modified_base 25: mod_base = OTHER; note = uridine phosphorothioate
  modified_base 28: mod_base = OTHER; note = 2'-O-Methyl-adenosine
  modified_base 29: mod_base = OTHER; note = 2'-O-Methyl-guanosine
  modified_base 30: mod_base = OTHER; note = 2'-O-Methyl-cytidine
  modified_base 31: mod_base = OTHER; note = 2'-O-Methyl-uridine
  modified_base 32: mod_base = OTHER; note = 2'-O-Methyl-adenosine
  modified_base 34: mod_base = OTHER; note = 2'-O-Methyl-adenosine
  modified_base 35: mod_base = OTHER; note = 2'-O-Methyl-adenosine
  modified_base 36: mod_base = OTHER; note = 2'-O-Methyl-adenosine
  modified_base 37: mod_base = OTHER; note = 2'-O-Methyl-uridine
  modified_base 38: mod_base = OTHER; note = 2'-O-Methyl-adenosine
  modified_base 39: mod_base = OTHER; note = 2'-O-Methyl-guanosine
  modified_base 40: mod_base = OTHER; note = 2'-O-Methyl-cytidine
  modified_base 41: mod_base = OTHER; note = 2'-O-Methyl-adenosine
  modified_base 42: mod_base = OTHER; note = 2'-O-Methyl-adenosine
  modified_base 46: mod_base = OTHER; note = 2'-O-Methyl-adenosine
  modified_base 48: mod_base = OTHER; note = 2'-O-Methyl-adenosine
  modified_base 50: mod_base = OTHER; note = 2'-O-Methyl-uridine
  modified_base 52: mod_base = OTHER; note = 2'-O-Methyl-adenosine
  modified_base 53: mod_base = OTHER; note = 2'-O-Methyl-guanosine
  modified_base 54: mod_base = OTHER; note = 2'-O-Methyl-guanosine
  modified_base 57: mod_base = OTHER; note = 2'-O-Methyl-adenosine
  modified_base 61: mod_base = OTHER; note = 2'-O-Methyl-cytidine
  modified_base 66: mod_base = OTHER; note = 2'-O-Methyl-uridine
  modified_base 67: mod_base = OTHER; note = 2'-O-Methyl-cytidine
  modified_base 70: mod_base = OTHER; note = 2'-O-Methyl-cytidine
  modified_base 71: mod_base = OTHER; note = 2'-O-Methyl-uridine
  modified_base 72: mod_base = OTHER; note = 2'-O-Methyl-uridine
  modified_base 73: mod_base = OTHER; note = 2'-O-Methyl-guanosine
  modified_base 74: mod_base = OTHER; note = 2'-O-Methyl-adenosine
  modified_base 75: mod_base = OTHER; note = 2'-O-Methyl-adenosine
  modified_base 76: mod_base = OTHER; note = 2'-O-Methyl-adenosine
  modified_base 77: mod_base = OTHER; note = 2'-O-Methyl-adenosine
  modified_base 78: mod_base = OTHER; note = 2'-O-Methyl-adenosine
  modified_base 79: mod_base = OTHER; note = 2'-O-Methyl-guanosine
  modified_base 80: mod_base = OTHER; note = 2'-O-Methyl-uridine
  modified_base 82: mod_base = OTHER; note = 2'-O-Methyl-guanosine
  modified_base 83: mod_base = OTHER; note = 2'-O-Methyl-cytidine
  modified_base 84: mod_base = OTHER; note = 2'-O-Methyl-adenosine
  modified_base 85: mod_base = OTHER; note = 2'-O-Methyl-cytidine
  modified_base 86: mod_base = OTHER; note = 2'-O-Methyl-cytidine
  modified_base 87: mod_base = OTHER; note = 2'-O-Methyl-guanosine
  modified_base 89: mod_base = OTHER; note = 2'-O-Methyl-guanosine
  modified_base 91: mod_base = OTHER; note = 2'-O-Methyl-cytidine
  modified_base 92: mod_base = OTHER; note = 2'-O-Methyl-guanosine
  modified_base 93: mod_base = OTHER; note = 2'-O-Methyl-guanosine
  modified_base 94: mod_base = OTHER; note = 2'-O-Methyl-uridine
  modified_base 95: mod_base = OTHER; note = 2'-O-Methyl-guanosine
  modified_base 96: mod_base = OTHER; note = 2'-O-Methyl-cytidine
  modified_base 97: mod_base = OTHER; note = 2'-O-Methyl-uridine
  modified_base 98: mod_base = OTHER; note = 2'-O-Methyl-uridine phosphorothioate
  modified_base 99: mod_base = OTHER; note = 2'-O-Methyl-uridine phosphorothioate
  modified_base 100: mod_base = OTHER; note = 2'-O-Methyl-uridine

SEQ ID NO: 2318 - RNA, 100 nt, synthetic construct; identical to SEQ ID NO: 55
  source 1..100: mol_type = other RNA
  modified_base 1: mod_base = OTHER; note = 2'-O-Methyl-cytidine phosphorothioate
  modified_base 2: mod_base = OTHER; note = 2'-O-Methyl-adenosine phosphorothioate
  modified_base 3: mod_base = OTHER; note = 2'-O-Methyl-guanosine phosphorothioate
  modified_base 21: mod_base = OTHER; note = 2'-O-Methyl-guanosine
  modified_base 25: mod_base = OTHER; note = uridine phosphorothioate
  modified_base 28: mod_base = OTHER; note = 2'-O-Methyl-adenosine
  modified_base 29: mod_base = OTHER; note = 2'-O-Methyl-guanosine
  modified_base 30: mod_base = OTHER; note = 2'-O-Methyl-cytidine
  modified_base 31: mod_base = OTHER; note = 2'-O-Methyl-uridine
  modified_base 32: mod_base = OTHER; note = 2'-O-Methyl-adenosine
  modified_base 34: mod_base = OTHER; note = 2'-O-Methyl-adenosine
  modified_base 35: mod_base = OTHER; note = 2'-O-Methyl-adenosine
  modified_base 36: mod_base = OTHER; note = 2'-O-Methyl-adenosine
  modified_base 37: mod_base = OTHER; note = 2'-O-Methyl-uridine
  modified_base 38: mod_base = OTHER; note = 2'-O-Methyl-adenosine
  modified_base 39: mod_base = OTHER; note = 2'-O-Methyl-guanosine
  modified_base 40: mod_base = OTHER; note = 2'-O-Methyl-cytidine
  modified_base 41: mod_base = OTHER; note = 2'-O-Methyl-adenosine
  modified_base 42: mod_base = OTHER; note = 2'-O-Methyl-adenosine
  modified_base 46: mod_base = OTHER; note = 2'-O-Methyl-adenosine
  modified_base 48: mod_base = OTHER; note = 2'-O-Methyl-adenosine
  modified_base 50: mod_base = OTHER; note = 2'-O-Methyl-uridine
  modified_base 52: mod_base = OTHER; note = 2'-O-Methyl-adenosine
  modified_base 53: mod_base = OTHER; note = 2'-O-Methyl-guanosine
  modified_base 54: mod_base = OTHER; note = 2'-O-Methyl-guanosine
  modified_base 55: mod_base = OTHER; note = 2'-O-Methyl-cytidine
  modified_base 56: mod_base = OTHER; note = 2'-O-Methyl-uridine
  modified_base 57: mod_base = OTHER; note = 2'-O-Methyl-adenosine
  modified_base 60: mod_base = OTHER; note = 2'-O-Methyl-cytidine
  modified_base 61: mod_base = OTHER; note = 2'-O-Methyl-cytidine
  modified_base 66: mod_base = OTHER; note = 2'-O-Methyl-uridine
  modified_base 67: mod_base = OTHER; note = 2'-O-Methyl-cytidine
  modified_base 70: mod_base = OTHER; note = 2'-O-Methyl-cytidine
  modified_base 71: mod_base = OTHER; note = 2'-O-Methyl-uridine
  modified_base 72: mod_base = OTHER; note = 2'-O-Methyl-uridine
  modified_base 74: mod_base = OTHER; note = 2'-O-Methyl-adenosine
  modified_base 75: mod_base = OTHER; note = 2'-O-Methyl-adenosine
  modified_base 76: mod_base = OTHER; note = 2'-O-Methyl-adenosine
  modified_base 77: mod_base = OTHER; note = 2'-O-Methyl-adenosine
  modified_base 78: mod_base = OTHER; note = 2'-O-Methyl-adenosine
  modified_base 79: mod_base = OTHER; note = 2'-O-Methyl-guanosine
  modified_base 80: mod_base = OTHER; note = 2'-O-Methyl-uridine
  modified_base 82: mod_base = OTHER; note = 2'-O-Methyl-guanosine
  modified_base 83: mod_base = OTHER; note = 2'-O-Methyl-cytidine
  modified_base 84: mod_base = OTHER; note = 2'-O-Methyl-adenosine
  modified_base 85: mod_base = OTHER; note = 2'-O-Methyl-cytidine
  modified_base 86: mod_base = OTHER; note = 2'-O-Methyl-cytidine
  modified_base 87: mod_base = OTHER; note = 2'-O-Methyl-guanosine
  modified_base 89: mod_base = OTHER; note = 2'-O-Methyl-guanosine
  modified_base 92: mod_base = OTHER; note = 2'-O-Methyl-guanosine
  modified_base 93: mod_base = OTHER; note = 2'-O-Methyl-guanosine
  modified_base 94: mod_base = OTHER; note = 2'-O-Methyl-uridine
  modified_base 95: mod_base = OTHER; note = 2'-O-Methyl-guanosine
  modified_base 96: mod_base = OTHER; note = 2'-O-Methyl-cytidine
  modified_base 97: mod_base = OTHER; note = 2'-O-Methyl-uridine
  modified_base 98: mod_base = OTHER; note = 2'-O-Methyl-uridine phosphorothioate
  modified_base 99: mod_base = OTHER; note = 2'-O-Methyl-uridine phosphorothioate
  modified_base 100: mod_base = OTHER; note = 2'-O-Methyl-uridine

SEQ ID NO: 2319 - RNA, 100 nt, synthetic construct; identical to SEQ ID NO: 421
  source 1..100: mol_type = other RNA
  modified_base 1: mod_base = OTHER; note = 2'-O-Methyl-cytidine phosphorothioate
  modified_base 2: mod_base = OTHER; note = 2'-O-Methyl-cytidine phosphorothioate
  modified_base 3: mod_base = OTHER; note = 2'-O-Methyl-cytidine phosphorothioate
  modified_base 21: mod_base = OTHER; note = 2'-O-Methyl-guanosine
  modified_base 28: mod_base = OTHER; note = 2'-O-Methyl-adenosine
  modified_base 29: mod_base = OTHER; note = 2'-O-Methyl-guanosine
  modified_base 30: mod_base = OTHER; note = 2'-O-Methyl-cytidine
  modified_base 31: mod_base = OTHER; note = 2'-O-Methyl-uridine
  modified_base 32: mod_base = OTHER; note = 2'-O-Methyl-adenosine
  modified_base 33: mod_base = OTHER; note = 2'-O-Methyl-guanosine
  modified_base 34: mod_base = OTHER; note = 2'-O-Methyl-adenosine
  modified_base 35: mod_base = OTHER; note = 2'-O-Methyl-adenosine
  modified_base 36: mod_base = OTHER; note = 2'-O-Methyl-adenosine
  modified_base 37: mod_base = OTHER; note = 2'-O-Methyl-uridine
  modified_base 38: mod_base = OTHER; note = 2'-O-Methyl-adenosine
  modified_base 39: mod_base = OTHER; note = 2'-O-Methyl-guanosine
  modified_base 40: mod_base = OTHER; note = 2'-O-Methyl-cytidine
  modified_base 41: mod_base = OTHER; note = 2'-O-Methyl-adenosine
  modified_base 42: mod_base = OTHER; note = 2'-O-Methyl-adenosine
  modified_base 45: mod_base = OTHER; note = uridine phosphorothioate
  modified_base 46: mod_base = OTHER; note = 2'-O-Methyl-adenosine
  modified_base 48: mod_base = OTHER; note = 2'-O-Methyl-adenosine
  modified_base 50: mod_base = OTHER; note = 2'-O-Methyl-uridine
  modified_base 52: mod_base = OTHER; note = 2'-O-Methyl-adenosine
  modified_base 53: mod_base = OTHER; note = 2'-O-Methyl-guanosine
  modified_base 54: mod_base = OTHER; note = 2'-O-Methyl-guanosine
  modified_base 55: mod_base = OTHER; note = 2'-O-Methyl-cytidine
  modified_base 56: mod_base = OTHER; note = 2'-O-Methyl-uridine
  modified_base 57: mod_base = OTHER; note = 2'-O-Methyl-adenosine
  modified_base 60: mod_base = OTHER; note = 2'-O-Methyl-cytidine
  modified_base 61: mod_base = OTHER; note = 2'-O-Methyl-cytidine
  modified_base 64: mod_base = OTHER; note = uridine phosphorothioate
  modified_base 66: mod_base = OTHER; note = 2'-O-Methyl-uridine
  modified_base 67: mod_base = OTHER; note = 2'-O-Methyl-cytidine
  modified_base 70: mod_base = OTHER; note = 2'-O-Methyl-cytidine
  modified_base 71: mod_base = OTHER; note = 2'-O-Methyl-uridine
  modified_base 72: mod_base = OTHER; note = 2'-O-Methyl-uridine
  modified_base 73: mod_base = OTHER; note = 2'-O-Methyl-guanosine
  modified_base 74: mod_base = OTHER; note = 2'-O-Methyl-adenosine
  modified_base 75: mod_base = OTHER; note = 2'-O-Methyl-adenosine
  modified_base 76: mod_base = OTHER; note = 2'-O-Methyl-adenosine
  modified_base 77: mod_base = OTHER; note = 2'-O-Methyl-adenosine
  modified_base 78: mod_base = OTHER; note = 2'-O-Methyl-adenosine
  modified_base 79: mod_base = OTHER; note = 2'-O-Methyl-guanosine
  modified_base 80: mod_base = OTHER; note = 2'-O-Methyl-uridine
  modified_base 81: mod_base = OTHER; note = 2'-O-Methyl-guanosine
  modified_base 83: mod_base = OTHER; note = 2'-O-Methyl-cytidine
  modified_base 84: mod_base = OTHER; note = 2'-O-Methyl-adenosine
  modified_base 85: mod_base = OTHER; note = 2'-O-Methyl-cytidine
  modified_base 86: mod_base = OTHER; note = 2'-O-Methyl-cytidine
  modified_base 87: mod_base = OTHER; note = 2'-O-Methyl-guanosine
  modified_base 88: mod_base = OTHER; note = 2'-O-Methyl-adenosine
  modified_base 89: mod_base = OTHER; note = 2'-O-Methyl-guanosine
  modified_base 90: mod_base = OTHER; note = 2'-O-Methyl-uridine
  modified_base 91: mod_base = OTHER; note = 2'-O-Methyl-cytidine
  modified_base 92: mod_base = OTHER; note = 2'-O-Methyl-guanosine
  modified_base 93: mod_base = OTHER; note = 2'-O-Methyl-guanosine
  modified_base 94: mod_base = OTHER; note = 2'-O-Methyl-uridine
  modified_base 95: mod_base = OTHER; note = 2'-O-Methyl-guanosine
  modified_base 96: mod_base = OTHER; note = 2'-O-Methyl-cytidine
  modified_base 97: mod_base = OTHER; note = 2'-O-Methyl-uridine
  modified_base 98: mod_base = OTHER; note = 2'-O-Methyl-uridine phosphorothioate
  modified_base 99: mod_base = OTHER; note = 2'-O-Methyl-uridine phosphorothioate
  modified_base 100: mod_base = OTHER; note = 2'-O-Methyl-uridine

SEQ ID NO: 2320 - RNA, 100 nt, synthetic construct; identical to SEQ ID NO: 421
  source 1..100: mol_type = other RNA
  modified_base 1: mod_base = OTHER; note = 2'-O-Methyl-cytidine phosphorothioate
  modified_base 2: mod_base = OTHER; note = 2'-O-Methyl-cytidine phosphorothioate
  modified_base 3: mod_base = OTHER; note = 2'-O-Methyl-cytidine phosphorothioate
  modified_base 21: mod_base = OTHER; note = 2'-O-Methyl-guanosine
  modified_base 28: mod_base = OTHER; note = 2'-O-Methyl-adenosine
  modified_base 29: mod_base = OTHER; note = 2'-O-Methyl-guanosine
  modified_base 30: mod_base = OTHER; note = 2'-O-Methyl-cytidine
  modified_base 31: mod_base = OTHER; note = 2'-O-Methyl-uridine
  modified_base 32: mod_base = OTHER; note = 2'-O-Methyl-adenosine
  modified_base 34: mod_base = OTHER; note = 2'-O-Methyl-adenosine
  modified_base 35: mod_base = OTHER; note = 2'-O-Methyl-adenosine
  modified_base 36: mod_base = OTHER; note = 2'-O-Methyl-adenosine
  modified_base 37: mod_base = OTHER; note = 2'-O-Methyl-uridine
  modified_base 38: mod_base = OTHER; note = 2'-O-Methyl-adenosine
  modified_base 39: mod_base = OTHER; note = 2'-O-Methyl-guanosine
  modified_base 40: mod_base = OTHER; note = 2'-O-Methyl-cytidine
  modified_base 41: mod_base = OTHER; note = 2'-O-Methyl-adenosine
  modified_base 42: mod_base = OTHER; note = 2'-O-Methyl-adenosine
  modified_base 45: mod_base = OTHER; note = uridine phosphorothioate
  modified_base 46: mod_base = OTHER; note = 2'-O-Methyl-adenosine
  modified_base 48: mod_base = OTHER; note = 2'-O-Methyl-adenosine
  modified_base 50: mod_base = OTHER; note = 2'-O-Methyl-uridine
  modified_base 52: mod_base = OTHER; note = 2'-O-Methyl-adenosine
  modified_base 53: mod_base = OTHER; note = 2'-O-Methyl-guanosine
  modified_base 54: mod_base = OTHER; note = 2'-O-Methyl-guanosine
  modified_base 55: mod_base = OTHER; note = 2'-O-Methyl-cytidine
  modified_base 56: mod_base = OTHER; note = 2'-O-Methyl-uridine
  modified_base 57: mod_base = OTHER; note = 2'-O-Methyl-adenosine
  modified_base 60: mod_base = OTHER; note = 2'-O-Methyl-cytidine
  modified_base 61: mod_base = OTHER; note = 2'-O-Methyl-cytidine
  modified_base 64: mod_base = OTHER; note = uridine phosphorothioate
  modified_base 66: mod_base = OTHER; note = 2'-O-Methyl-uridine
  modified_base 67: mod_base = OTHER; note = 2'-O-Methyl-cytidine
  modified_base 70: mod_base = OTHER; note = 2'-O-Methyl-cytidine
  modified_base 71: mod_base = OTHER; note = 2'-O-Methyl-uridine
  modified_base 72: mod_base = OTHER; note = 2'-O-Methyl-uridine
  modified_base 74: mod_base = OTHER; note = 2'-O-Methyl-adenosine
  modified_base 75: mod_base = OTHER; note = 2'-O-Methyl-adenosine
  modified_base 76: mod_base = OTHER; note = 2'-O-Methyl-adenosine
  modified_base 77: mod_base = OTHER; note = 2'-O-Methyl-adenosine
  modified_base 78: mod_base = OTHER; note = 2'-O-Methyl-adenosine
  modified_base 79: mod_base = OTHER; note = 2'-O-Methyl-guanosine
  modified_base 80: mod_base = OTHER; note = 2'-O-Methyl-uridine
  modified_base 81: mod_base = OTHER; note = 2'-O-Methyl-guanosine
  modified_base 83: mod_base = OTHER; note = 2'-O-Methyl-cytidine
  modified_base 84: mod_base = OTHER; note = 2'-O-Methyl-adenosine
  modified_base 85: mod_base = OTHER; note = 2'-O-Methyl-cytidine
  modified_base 86: mod_base = OTHER; note = 2'-O-Methyl-cytidine
  modified_base 87: mod_base = OTHER; note = 2'-O-Methyl-guanosine
  modified_base 88: mod_base = OTHER; note = 2'-O-Methyl-adenosine
  modified_base 89: mod_base = OTHER; note = 2'-O-Methyl-guanosine
  modified_base 90: mod_base = OTHER; note = 2'-O-Methyl-uridine
  modified_base 91: mod_base = OTHER; note = 2'-O-Methyl-cytidine
  modified_base 92: mod_base = OTHER; note = 2'-O-Methyl-guanosine
  modified_base 93: mod_base = OTHER; note = 2'-O-Methyl-guanosine
  modified_base 94: mod_base = OTHER; note = 2'-O-Methyl-uridine
  modified_base 95: mod_base = OTHER; note = 2'-O-Methyl-guanosine
  modified_base 96: mod_base = OTHER; note = 2'-O-Methyl-cytidine
  modified_base 97: mod_base = OTHER; note = 2'-O-Methyl-uridine
  modified_base 98: mod_base = OTHER; note = 2'-O-Methyl-uridine phosphorothioate
  modified_base 99: mod_base = OTHER; note = 2'-O-Methyl-uridine phosphorothioate
  modified_base 100: mod_base = OTHER; note = 2'-O-Methyl-uridine

SEQ ID NO: 2321 - RNA, 100 nt, synthetic construct; identical to SEQ ID NO: 422
  source 1..100: mol_type = other RNA
  modified_base 1: mod_base = OTHER; note = 2'-O-Methyl-guanosine phosphorothioate
  modified_base 2: mod_base = OTHER; note = 2'-O-Methyl-adenosine phosphorothioate
  modified_base 3: mod_base = OTHER; note = 2'-O-Methyl-guanosine phosphorothioate
  modified_base 21: mod_base = OTHER; note = 2'-O-Methyl-guanosine
  modified_base 28: mod_base = OTHER; note = 2'-O-Methyl-adenosine
  modified_base 29: mod_base = OTHER; note = 2'-O-Methyl-guanosine
  modified_base 30: mod_base = OTHER; note = 2'-O-Methyl-cytidine
  modified_base 31: mod_base = OTHER; note = 2'-O-Methyl-uridine
  modified_base 32: mod_base = OTHER; note = 2'-O-Methyl-adenosine
  modified_base 33: mod_base = OTHER; note = 2'-O-Methyl-guanosine
  modified_base 34: mod_base = OTHER; note = 2'-O-Methyl-adenosine
  modified_base 35: mod_base = OTHER; note = 2'-O-Methyl-adenosine
  modified_base 36: mod_base = OTHER; note = 2'-O-Methyl-adenosine
  modified_base 37: mod_base = OTHER; note = 2'-O-Methyl-uridine
  modified_base 38: mod_base = OTHER; note = 2'-O-Methyl-adenosine
  modified_base 39: mod_base = OTHER; note = 2'-O-Methyl-guanosine
  modified_base 40: mod_base = OTHER; note = 2'-O-Methyl-cytidine
  modified_base 41: mod_base = OTHER; note = 2'-O-Methyl-adenosine
  modified_base 42: mod_base = OTHER; note = 2'-O-Methyl-adenosine
  modified_base 45: mod_base = OTHER; note = uridine phosphorothioate
  modified_base 46: mod_base = OTHER; note = 2'-O-Methyl-adenosine
  modified_base 48: mod_base = OTHER; note = 2'-O-Methyl-adenosine
  modified_base 50: mod_base = OTHER; note = 2'-O-Methyl-uridine
  modified_base 52: mod_base = OTHER; note = 2'-O-Methyl-adenosine
  modified_base 53: mod_base = OTHER; note = 2'-O-Methyl-guanosine
  modified_base 54: mod_base = OTHER; note = 2'-O-Methyl-guanosine
  modified_base 55: mod_base = OTHER; note = 2'-O-Methyl-cytidine
  modified_base 56: mod_base = OTHER; note = 2'-O-Methyl-uridine
  modified_base 57: mod_base = OTHER; note = 2'-O-Methyl-adenosine
  modified_base 60: mod_base = OTHER; note = 2'-O-Methyl-cytidine
  modified_base 61: mod_base = OTHER; note = 2'-O-Methyl-cytidine
  modified_base 64: mod_base = OTHER; note = uridine phosphorothioate
  modified_base 66: mod_base = OTHER; note = 2'-O-Methyl-uridine
  modified_base 67: mod_base = OTHER; note = 2'-O-Methyl-cytidine
  modified_base 70: mod_base = OTHER; note = 2'-O-Methyl-cytidine
  modified_base 71: mod_base = OTHER; note = 2'-O-Methyl-uridine
  modified_base 72: mod_base = OTHER; note = 2'-O-Methyl-uridine
  modified_base 73: mod_base = OTHER; note = 2'-O-Methyl-guanosine
  modified_base 74: mod_base = OTHER; note = 2'-O-Methyl-adenosine
  modified_base 75: mod_base = OTHER; note = 2'-O-Methyl-adenosine
  modified_base 76: mod_base = OTHER; note = 2'-O-Methyl-adenosine
  modified_base 77: mod_base = OTHER; note = 2'-O-Methyl-adenosine
  modified_base 78: mod_base = OTHER; note = 2'-O-Methyl-adenosine
  modified_base 79: mod_base = OTHER; note = 2'-O-Methyl-guanosine
  modified_base 80: mod_base = OTHER; note = 2'-O-Methyl-uridine
  modified_base 81: mod_base = OTHER; note = 2'-O-Methyl-guanosine
  modified_base 83: mod_base = OTHER; note = 2'-O-Methyl-cytidine
  modified_base 84: mod_base = OTHER; note = 2'-O-Methyl-adenosine
  modified_base 85: mod_base = OTHER; note = 2'-O-Methyl-cytidine
  modified_base 86: mod_base = OTHER; note = 2'-O-Methyl-cytidine
  modified_base 87: mod_base = OTHER; note = 2'-O-Methyl-guanosine
  modified_base 88: mod_base = OTHER; note = 2'-O-Methyl-adenosine
  modified_base 89: mod_base = OTHER; note = 2'-O-Methyl-guanosine
  modified_base 90: mod_base = OTHER; note = 2'-O-Methyl-uridine
  modified_base 91: mod_base = OTHER; note = 2'-O-Methyl-cytidine
  modified_base 92: mod_base = OTHER; note = 2'-O-Methyl-guanosine
  modified_base 93: mod_base = OTHER; note = 2'-O-Methyl-guanosine
  modified_base 94: mod_base = OTHER; note = 2'-O-Methyl-uridine
  modified_base 95: mod_base = OTHER; note = 2'-O-Methyl-guanosine
  modified_base 96: mod_base = OTHER; note = 2'-O-Methyl-cytidine
  modified_base 97: mod_base = OTHER; note = 2'-O-Methyl-uridine
  modified_base 98: mod_base = OTHER; note = 2'-O-Methyl-uridine phosphorothioate
  modified_base 99: mod_base = OTHER; note = 2'-O-Methyl-uridine phosphorothioate
  modified_base 100: mod_base = OTHER; note = 2'-O-Methyl-uridine

SEQ ID NO: 2322 - RNA, 100 nt, synthetic construct; identical to SEQ ID NO: 422
  source 1..100: mol_type = other RNA
  modified_base 1: mod_base = OTHER; note = 2'-O-Methyl-guanosine phosphorothioate
  modified_base 2: mod_base = OTHER; note = 2'-O-Methyl-adenosine phosphorothioate
  modified_base 3: mod_base = OTHER; note = 2'-O-Methyl-guanosine phosphorothioate
  modified_base 21: mod_base = OTHER; note = 2'-O-Methyl-guanosine
  modified_base 28: mod_base = OTHER; note = 2'-O-Methyl-adenosine
  modified_base 29: mod_base = OTHER; note = 2'-O-Methyl-guanosine
  modified_base 30: mod_base = OTHER; note = 2'-O-Methyl-cytidine
  modified_base 31: mod_base = OTHER; note = 2'-O-Methyl-uridine
  modified_base 32: mod_base = OTHER; note = 2'-O-Methyl-adenosine
  modified_base 34: mod_base = OTHER; note = 2'-O-Methyl-adenosine
  modified_base 35: mod_base = OTHER; note = 2'-O-Methyl-adenosine
  modified_base 36: mod_base = OTHER; note = 2'-O-Methyl-adenosine
  modified_base 37: mod_base = OTHER; note = 2'-O-Methyl-uridine
  modified_base 38: mod_base = OTHER; note = 2'-O-Methyl-adenosine
  modified_base 39: mod_base = OTHER; note = 2'-O-Methyl-guanosine
  modified_base 40: mod_base = OTHER; note = 2'-O-Methyl-cytidine
  modified_base 41: mod_base = OTHER; note = 2'-O-Methyl-adenosine
  modified_base 42: mod_base = OTHER; note = 2'-O-Methyl-adenosine
  modified_base 45: mod_base = OTHER; note = uridine phosphorothioate
  modified_base 46: mod_base = OTHER; note = 2'-O-Methyl-adenosine
  modified_base 48: mod_base = OTHER; note = 2'-O-Methyl-adenosine
  modified_base 50: mod_base = OTHER; note = 2'-O-Methyl-uridine
  modified_base 52: mod_base = OTHER; note = 2'-O-Methyl-adenosine
  modified_base 53: mod_base = OTHER; note = 2'-O-Methyl-guanosine
  modified_base 54: mod_base = OTHER; note = 2'-O-Methyl-guanosine
  modified_base 55: mod_base = OTHER; note = 2'-O-Methyl-cytidine
  modified_base 56: mod_base = OTHER; note = 2'-O-Methyl-uridine
  modified_base 57: mod_base = OTHER; note = 2'-O-Methyl-adenosine
  modified_base 60: mod_base = OTHER; note = 2'-O-Methyl-cytidine
  modified_base 61: mod_base = OTHER; note = 2'-O-Methyl-cytidine
  modified_base 64: mod_base = OTHER; note = uridine phosphorothioate
  modified_base 66: mod_base = OTHER; note = 2'-O-Methyl-uridine
  modified_base 67: mod_base = OTHER; note = 2'-O-Methyl-cytidine
  modified_base 70: mod_base = OTHER; note = 2'-O-Methyl-cytidine
  modified_base 71: mod_base = OTHER; note = 2'-O-Methyl-uridine
  modified_base 72: mod_base = OTHER; note = 2'-O-Methyl-uridine
  modified_base 74: mod_base = OTHER; note = 2'-O-Methyl-adenosine
  modified_base 75: mod_base = OTHER; note = 2'-O-Methyl-adenosine
  modified_base 76: mod_base = OTHER; note = 2'-O-Methyl-adenosine
  modified_base 77: mod_base = OTHER; note = 2'-O-Methyl-adenosine
  modified_base 78: mod_base = OTHER; note = 2'-O-Methyl-adenosine
  modified_base 79: mod_base = OTHER; note = 2'-O-Methyl-guanosine
  modified_base 80: mod_base = OTHER; note = 2'-O-Methyl-uridine
  modified_base 81: mod_base = OTHER; note = 2'-O-Methyl-guanosine
  modified_base 83: mod_base = OTHER; note = 2'-O-Methyl-cytidine
  modified_base 84: mod_base = OTHER; note = 2'-O-Methyl-adenosine
  modified_base 85: mod_base = OTHER; note = 2'-O-Methyl-cytidine
  modified_base 86: mod_base = OTHER; note = 2'-O-Methyl-cytidine
  modified_base 87: mod_base = OTHER; note = 2'-O-Methyl-guanosine
  modified_base 88: mod_base = OTHER; note = 2'-O-Methyl-adenosine
  modified_base 89: mod_base = OTHER; note = 2'-O-Methyl-guanosine
  modified_base 90: mod_base = OTHER; note = 2'-O-Methyl-uridine
  modified_base 91: mod_base = OTHER; note = 2'-O-Methyl-cytidine
  modified_base 92: mod_base = OTHER; note = 2'-O-Methyl-guanosine
  modified_base 93: mod_base = OTHER; note = 2'-O-Methyl-guanosine
  modified_base 94: mod_base = OTHER; note = 2'-O-Methyl-uridine
  modified_base 95: mod_base = OTHER; note = 2'-O-Methyl-guanosine
  modified_base 96: mod_base = OTHER; note = 2'-O-Methyl-cytidine
  modified_base 97: mod_base = OTHER; note = 2'-O-Methyl-uridine
  modified_base 98: mod_base = OTHER; note = 2'-O-Methyl-uridine phosphorothioate
  modified_base 99: mod_base = OTHER; note = 2'-O-Methyl-uridine phosphorothioate
  modified_base 100: mod_base = OTHER; note = 2'-O-Methyl-uridine

SEQ ID NO: 2323 - RNA, 100 nt, synthetic construct; identical to SEQ ID NO: 55
  source 1..100: mol_type = other RNA
  modified_base 1: mod_base = OTHER; note = 2'-O-Methyl-cytidine phosphorothioate
  modified_base 2: mod_base = OTHER; note = 2'-O-Methyl-adenosine phosphorothioate
  modified_base 3: mod_base = OTHER; note = 2'-O-Methyl-guanosine phosphorothioate
  modified_base 21: mod_base = OTHER; note = 2'-O-Methyl-guanosine
  modified_base 28: mod_base = OTHER; note = 2'-O-Methyl-adenosine
  modified_base 29: mod_base = OTHER; note = 2'-O-Methyl-guanosine
  modified_base 30: mod_base = OTHER; note = 2'-O-Methyl-cytidine
  modified_base 31: mod_base = OTHER; note = 2'-O-Methyl-uridine
  modified_base 32: mod_base = OTHER; note = 2'-O-Methyl-adenosine
  modified_base 33: mod_base = OTHER; note = 2'-O-Methyl-guanosine
  modified_base 34: mod_base = OTHER; note = 2'-O-Methyl-adenosine
  modified_base 35: mod_base = OTHER; note = 2'-O-Methyl-adenosine
  modified_base 36: mod_base = OTHER; note = 2'-O-Methyl-adenosine
  modified_base 37: mod_base = OTHER; note = 2'-O-Methyl-uridine
  modified_base 38: mod_base = OTHER; note = 2'-O-Methyl-adenosine
  modified_base 39: mod_base = OTHER; note = 2'-O-Methyl-guanosine
  modified_base 40: mod_base = OTHER; note = 2'-O-Methyl-cytidine
  modified_base 41: mod_base = OTHER; note = 2'-O-Methyl-adenosine
  modified_base 42: mod_base = OTHER; note = 2'-O-Methyl-adenosine
  modified_base 45: mod_base = OTHER; note = uridine phosphorothioate
  modified_base 46: mod_base = OTHER; note = 2'-O-Methyl-adenosine
  modified_base 48: mod_base = OTHER; note = 2'-O-Methyl-adenosine
  modified_base 50: mod_base = OTHER; note = 2'-O-Methyl-uridine
  modified_base 52: mod_base = OTHER; note = 2'-O-Methyl-adenosine
  modified_base 53: mod_base = OTHER; note = 2'-O-Methyl-guanosine
  modified_base 54: mod_base = OTHER; note = 2'-O-Methyl-guanosine
  modified_base 57: mod_base = OTHER; note = 2'-O-Methyl-adenosine
  modified_base 61: mod_base = OTHER; note = 2'-O-Methyl-cytidine
  modified_base 64: mod_base = OTHER; note = uridine phosphorothioate
  modified_base 66: mod_base = OTHER; note = 2'-O-Methyl-uridine
  modified_base 67: mod_base = OTHER; note = 2'-O-Methyl-cytidine
  modified_base 70: mod_base = OTHER; note = 2'-O-Methyl-cytidine
  modified_base 71: mod_base = OTHER; note = 2'-O-Methyl-uridine
  modified_base 72: mod_base = OTHER; note = 2'-O-Methyl-uridine
  modified_base 74: mod_base = OTHER; note = 2'-O-Methyl-adenosine
  modified_base 75: mod_base = OTHER; note = 2'-O-Methyl-adenosine
  modified_base 76: mod_base = OTHER; note = 2'-O-Methyl-adenosine
  modified_base 77: mod_base = OTHER; note = 2'-O-Methyl-adenosine
  modified_base 78: mod_base = OTHER; note = 2'-O-Methyl-adenosine
  modified_base 79: mod_base = OTHER; note = 2'-O-Methyl-guanosine
  modified_base 80: mod_base = OTHER; note = 2'-O-Methyl-uridine
  modified_base 82: mod_base = OTHER; note = 2'-O-Methyl-guanosine
  modified_base 83: mod_base = OTHER; note = 2'-O-Methyl-cytidine
  modified_base 84: mod_base = OTHER; note = 2'-O-Methyl-adenosine
  modified_base 85: mod_base = OTHER; note = 2'-O-Methyl-cytidine
  modified_base 86: mod_base = OTHER; note = 2'-O-Methyl-cytidine
  modified_base 87: mod_base = OTHER; note = 2'-O-Methyl-guanosine
  modified_base 89: mod_base = OTHER; note = 2'-O-Methyl-guanosine
  modified_base 92: mod_base = OTHER; note = 2'-O-Methyl-guanosine
  modified_base 93: mod_base = OTHER; note = 2'-O-Methyl-guanosine
  modified_base 94: mod_base = OTHER; note = 2'-O-Methyl-uridine
  modified_base 95: mod_base = OTHER; note = 2'-O-Methyl-guanosine
  modified_base 96: mod_base = OTHER; note = 2'-O-Methyl-cytidine
  modified_base 97: mod_base = OTHER; note = 2'-O-Methyl-uridine
  modified_base 98: mod_base = OTHER; note = 2'-O-Methyl-uridine phosphorothioate
  modified_base 99: mod_base = OTHER; note = 2'-O-Methyl-uridine phosphorothioate
  modified_base 100: mod_base = OTHER; note = 2'-O-Methyl-uridine

SEQ ID NO: 2324 - RNA, 100 nt, synthetic construct; identical to SEQ ID NO: 55
  source 1..100: mol_type = other RNA
  modified_base 1: mod_base = OTHER; note = 2'-O-Methyl-cytidine phosphorothioate
  modified_base 2: mod_base = OTHER; note = 2'-O-Methyl-adenosine phosphorothioate
  modified_base 3: mod_base = OTHER; note = 2'-O-Methyl-guanosine phosphorothioate
  modified_base 21: mod_base = OTHER; note = 2'-O-Methyl-guanosine
  modified_base 28: mod_base = OTHER; note = 2'-O-Methyl-adenosine
  modified_base 29: mod_base = OTHER; note = 2'-O-Methyl-guanosine
  modified_base 30: mod_base = OTHER; note = 2'-O-Methyl-cytidine
  modified_base 31: mod_base = OTHER; note = 2'-O-Methyl-uridine
  modified_base 32: mod_base = OTHER; note = 2'-O-Methyl-adenosine
  modified_base 33: mod_base = OTHER; note = 2'-O-Methyl-guanosine
  modified_base 34: mod_base = OTHER; note = 2'-O-Methyl-adenosine
  modified_base 35: mod_base = OTHER; note = 2'-O-Methyl-adenosine
  modified_base 36: mod_base = OTHER; note = 2'-O-Methyl-adenosine
  modified_base 37: mod_base = OTHER; note = 2'-O-Methyl-uridine
  modified_base 38: mod_base = OTHER; note = 2'-O-Methyl-adenosine
  modified_base 39: mod_base = OTHER; note = 2'-O-Methyl-guanosine
  modified_base 40: mod_base = OTHER; note = 2'-O-Methyl-cytidine
  modified_base 41: mod_base = OTHER; note = 2'-O-Methyl-adenosine
  modified_base 42: mod_base = OTHER; note = 2'-O-Methyl-adenosine
  modified_base 45: mod_base = OTHER; note = uridine phosphorothioate
  modified_base 46: mod_base = OTHER; note = 2'-O-Methyl-adenosine
  modified_base 48: mod_base = OTHER; note = 2'-O-Methyl-adenosine
  modified_base 50: mod_base = OTHER; note = 2'-O-Methyl-uridine
  modified_base 52: mod_base = OTHER; note = 2'-O-Methyl-adenosine
  modified_base 53: mod_base = OTHER; note = 2'-O-Methyl-guanosine
  modified_base 54: mod_base = OTHER; note = 2'-O-Methyl-guanosine
  modified_base 55: mod_base = OTHER; note = 2'-O-Methyl-cytidine
  modified_base 56: mod_base = OTHER; note = 2'-O-Methyl-uridine
  modified_base 57: mod_base = OTHER; note = 2'-O-Methyl-adenosine
  modified_base 60: mod_base = OTHER; note = 2'-O-Methyl-cytidine
  modified_base 61: mod_base = OTHER; note = 2'-O-Methyl-cytidine
  modified_base 64: mod_base = OTHER; note = uridine phosphorothioate
  modified_base 66: mod_base = OTHER; note = 2'-O-Methyl-uridine
  modified_base 67: mod_base = OTHER; note = 2'-O-Methyl-cytidine
  modified_base 70: mod_base = OTHER; note = 2'-O-Methyl-cytidine
  modified_base 71: mod_base = OTHER; note = 2'-O-Methyl-uridine
  modified_base 72: mod_base = OTHER; note = 2'-O-Methyl-uridine
  modified_base 74: mod_base = OTHER; note = 2'-O-Methyl-adenosine
  modified_base 75: mod_base = OTHER; note = 2'-O-Methyl-adenosine
  modified_base 76: mod_base = OTHER; note = 2'-O-Methyl-adenosine
  modified_base 77: mod_base = OTHER; note = 2'-O-Methyl-adenosine
  modified_base 78: mod_base = OTHER; note = 2'-O-Methyl-adenosine
  modified_base 79: mod_base = OTHER; note = 2'-O-Methyl-guanosine
  modified_base 80: mod_base = OTHER; note = 2'-O-Methyl-uridine
  modified_base 82: mod_base = OTHER; note = 2'-O-Methyl-guanosine
  modified_base 83: mod_base = OTHER; note = 2'-O-Methyl-cytidine
  modified_base 84: mod_base = OTHER; note = 2'-O-Methyl-adenosine
  modified_base 85: mod_base = OTHER; note = 2'-O-Methyl-cytidine
  modified_base 86: mod_base = OTHER; note = 2'-O-Methyl-cytidine
  modified_base 87: mod_base = OTHER; note = 2'-O-Methyl-guanosine
  modified_base 89: mod_base = OTHER; note = 2'-O-Methyl-guanosine
  modified_base 92: mod_base = OTHER; note = 2'-O-Methyl-guanosine
  modified_base 93: mod_base = OTHER; note = 2'-O-Methyl-guanosine
  modified_base 94: mod_base = OTHER; note = 2'-O-Methyl-uridine
  modified_base 95: mod_base = OTHER; note = 2'-O-Methyl-guanosine
  modified_base 96: mod_base = OTHER; note = 2'-O-Methyl-cytidine
  modified_base 97: mod_base = OTHER; note = 2'-O-Methyl-uridine
  modified_base 98: mod_base = OTHER; note = 2'-O-Methyl-uridine phosphorothioate
  modified_base 99: mod_base = OTHER; note = 2'-O-Methyl-uridine phosphorothioate
  modified_base 100: mod_base = OTHER; note = 2'-O-Methyl-uridine

SEQ ID NO: 2325 - RNA, 100 nt, synthetic construct; identical to SEQ ID NO: 55
  source 1..100: mol_type = other RNA
  modified_base 1: mod_base = OTHER; note = 2'-O-Methyl-cytidine phosphorothioate
  modified_base 2: mod_base = OTHER; note = 2'-O-Methyl-adenosine phosphorothioate
  modified_base 3: mod_base = OTHER; note = 2'-O-Methyl-guanosine phosphorothioate
  modified_base 21: mod_base = OTHER; note = 2'-O-Methyl-guanosine
  modified_base 28: mod_base = OTHER; note = 2'-O-Methyl-adenosine
  modified_base 29: mod_base = OTHER; note = 2'-O-Methyl-guanosine
  modified_base 30: mod_base = OTHER; note = 2'-O-Methyl-cytidine
  modified_base 31: mod_base = OTHER; note = 2'-O-Methyl-uridine
  modified_base 32: mod_base = OTHER; note = 2'-O-Methyl-adenosine
  modified_base 33: mod_base = OTHER; note = 2'-O-Methyl-guanosine
  modified_base 34: mod_base = OTHER; note = 2'-O-Methyl-adenosine
  modified_base 35: mod_base = OTHER; note = 2'-O-Methyl-adenosine
  modified_base 36: mod_base = OTHER; note = 2'-O-Methyl-adenosine
  modified_base 37: mod_base = OTHER; note = 2'-O-Methyl-uridine
  modified_base 38: mod_base = OTHER; note = 2'-O-Methyl-adenosine
  modified_base 39: mod_base = OTHER; note = 2'-O-Methyl-guanosine
  modified_base 40: mod_base = OTHER; note = 2'-O-Methyl-cytidine
  modified_base 41: mod_base = OTHER; note = 2'-O-Methyl-adenosine
  modified_base 42: mod_base = OTHER; note = 2'-O-Methyl-adenosine
  modified_base 45: mod_base = OTHER; note = uridine phosphorothioate
  modified_base 46: mod_base = OTHER; note = 2'-O-Methyl-adenosine
  modified_base 48: mod_base = OTHER; note = 2'-O-Methyl-adenosine
  modified_base 50: mod_base = OTHER; note = 2'-O-Methyl-uridine
  modified_base 52: mod_base = OTHER; note = 2'-O-Methyl-adenosine
  modified_base 53: mod_base = OTHER; note = 2'-O-Methyl-guanosine
  modified_base 54: mod_base = OTHER; note = 2'-O-Methyl-guanosine
  modified_base 57: mod_base = OTHER; note = 2'-O-Methyl-adenosine
  modified_base 61: mod_base = OTHER; note = 2'-O-Methyl-cytidine
  modified_base 64: mod_base = OTHER; note = uridine phosphorothioate
  modified_base 66: mod_base = OTHER; note = 2'-O-Methyl-uridine
  modified_base 67: mod_base = OTHER; note = 2'-O-Methyl-cytidine
  modified_base 70: mod_base = OTHER; note = 2'-O-Methyl-cytidine
  modified_base 71: mod_base = OTHER; note = 2'-O-Methyl-uridine
  modified_base 72: mod_base = OTHER; note = 2'-O-Methyl-uridine
  modified_base 73: mod_base = OTHER; note = 2'-O-Methyl-guanosine
  modified_base 74: mod_base = OTHER; note = 2'-O-Methyl-adenosine
  modified_base 75: mod_base = OTHER; note = 2'-O-Methyl-adenosine
  modified_base 76: mod_base = OTHER; note = 2'-O-Methyl-adenosine
  modified_base 77: mod_base = OTHER; note = 2'-O-Methyl-adenosine
  modified_base 78: mod_base = OTHER; note = 2'-O-Methyl-adenosine
  modified_base 79: mod_base = OTHER; note = 2'-O-Methyl-guanosine
  modified_base 80: mod_base = OTHER; note = 2'-O-Methyl-uridine
  modified_base 82: mod_base = OTHER; note = 2'-O-Methyl-guanosine
  modified_base 83: mod_base = OTHER; note = 2'-O-Methyl-cytidine
  modified_base 84: mod_base = OTHER; note = 2'-O-Methyl-adenosine
  modified_base 85: mod_base = OTHER; note = 2'-O-Methyl-cytidine
  modified_base 86: mod_base = OTHER; note = 2'-O-Methyl-cytidine
  modified_base 87: mod_base = OTHER; note = 2'-O-Methyl-guanosine
  modified_base 89: mod_base = OTHER; note = 2'-O-Methyl-guanosine
  modified_base 92: mod_base = OTHER; note = 2'-O-Methyl-guanosine
  modified_base 93: mod_base = OTHER; note = 2'-O-Methyl-guanosine
  modified_base 94: mod_base = OTHER; note = 2'-O-Methyl-uridine
  modified_base 95: mod_base = OTHER; note = 2'-O-Methyl-guanosine
  modified_base 96: mod_base = OTHER; note = 2'-O-Methyl-cytidine
  modified_base 97: mod_base = OTHER; note = 2'-O-Methyl-uridine
  modified_base 98: mod_base = OTHER; note = 2'-O-Methyl-uridine phosphorothioate
  modified_base 99: mod_base = OTHER; note = 2'-O-Methyl-uridine phosphorothioate
  modified_base 100: mod_base = OTHER; note = 2'-O-Methyl-uridine

SEQ ID NO: 2326 - RNA, 100 nt, synthetic construct; identical to SEQ ID NO: 55
  source 1..100: mol_type = other RNA
  modified_base 1: mod_base = OTHER; note = 2'-O-Methyl-cytidine phosphorothioate
  modified_base 2: mod_base = OTHER; note = 2'-O-Methyl-adenosine phosphorothioate
  modified_base 3: mod_base = OTHER; note = 2'-O-Methyl-guanosine phosphorothioate
  modified_base 21: mod_base = OTHER; note = 2'-O-Methyl-guanosine
  modified_base 28: mod_base = OTHER; note = 2'-O-Methyl-adenosine
  modified_base 29: mod_base = OTHER; note = 2'-O-Methyl-guanosine
  modified_base 30: mod_base = OTHER; note = 2'-O-Methyl-cytidine
  modified_base 31: mod_base = OTHER; note = 2'-O-Methyl-uridine
  modified_base 32: mod_base = OTHER; note = 2'-O-Methyl-adenosine
  modified_base 34: mod_base = OTHER; note = 2'-O-Methyl-adenosine
  modified_base 35: mod_base = OTHER; note = 2'-O-Methyl-adenosine
  modified_base 36: mod_base = OTHER; note = 2'-O-Methyl-adenosine
  modified_base 37: mod_base = OTHER; note = 2'-O-Methyl-uridine
  modified_base 38: mod_base = OTHER; note = 2'-O-Methyl-adenosine
  modified_base 39: mod_base = OTHER; note = 2'-O-Methyl-guanosine
  modified_base 40: mod_base = OTHER; note = 2'-O-Methyl-cytidine
  modified_base 41: mod_base = OTHER; note = 2'-O-Methyl-adenosine
  modified_base 42: mod_base = OTHER; note = 2'-O-Methyl-adenosine
  modified_base 45: mod_base = OTHER; note = uridine phosphorothioate
  modified_base 46: mod_base = OTHER; note = 2'-O-Methyl-adenosine
  modified_base 48: mod_base = OTHER; note = 2'-O-Methyl-adenosine
  modified_base 50: mod_base = OTHER; note = 2'-O-Methyl-uridine
  modified_base 52: mod_base = OTHER; note = 2'-O-Methyl-adenosine
  modified_base 53: mod_base = OTHER; note = 2'-O-Methyl-guanosine
  modified_base 54: mod_base = OTHER; note = 2'-O-Methyl-guanosine
  modified_base 57: mod_base = OTHER; note = 2'-O-Methyl-adenosine
  modified_base 61: mod_base = OTHER; note = 2'-O-Methyl-cytidine
  modified_base 64: mod_base = OTHER; note = uridine phosphorothioate
  modified_base 66: mod_base = OTHER; note = 2'-O-Methyl-uridine
  modified_base 67: mod_base = OTHER; note = 2'-O-Methyl-cytidine
  modified_base 70: mod_base = OTHER; note = 2'-O-Methyl-cytidine
  modified_base 71: mod_base = OTHER; note = 2'-O-Methyl-uridine
  modified_base 72: mod_base = OTHER; note = 2'-O-Methyl-uridine
  modified_base 73: mod_base = OTHER; note = 2'-O-Methyl-guanosine
  modified_base 74: mod_base = OTHER; note = 2'-O-Methyl-adenosine
  modified_base 75: mod_base = OTHER; note = 2'-O-Methyl-adenosine
  modified_base 76: mod_base = OTHER; note = 2'-O-Methyl-adenosine
  modified_base 77: mod_base = OTHER; note = 2'-O-Methyl-adenosine
  modified_base 78: mod_base = OTHER; note = 2'-O-Methyl-adenosine
  modified_base 79: mod_base = OTHER; note = 2'-O-Methyl-guanosine
  modified_base 80: mod_base = OTHER; note = 2'-O-Methyl-uridine
  modified_base 82: mod_base = OTHER; note = 2'-O-Methyl-guanosine
  modified_base 83: mod_base = OTHER; note = 2'-O-Methyl-cytidine
  modified_base 84: mod_base = OTHER; note = 2'-O-Methyl-adenosine
  modified_base 85: mod_base = OTHER; note = 2'-O-Methyl-cytidine
  modified_base 86: mod_base = OTHER; note = 2'-O-Methyl-cytidine
  modified_base 87: mod_base = OTHER; note = 2'-O-Methyl-guanosine
  modified_base 89: mod_base = OTHER; note = 2'-O-Methyl-guanosine
  modified_base 92: mod_base = OTHER; note = 2'-O-Methyl-guanosine
  modified_base 93: mod_base = OTHER; note = 2'-O-Methyl-guanosine
  modified_base 94: mod_base = OTHER; note = 2'-O-Methyl-uridine
  modified_base 95: mod_base = OTHER; note = 2'-O-Methyl-guanosine
  modified_base 96: mod_base = OTHER; note = 2'-O-Methyl-cytidine
  modified_base 97: mod_base = OTHER; note = 2'-O-Methyl-uridine
  modified_base 98: mod_base = OTHER; note = 2'-O-Methyl-uridine phosphorothioate
  modified_base 99: mod_base = OTHER; note = 2'-O-Methyl-uridine phosphorothioate
  modified_base 100: mod_base = OTHER; note = 2'-O-Methyl-uridine

SEQ ID NO: 2327 - RNA, 100 nt, synthetic construct; identical to SEQ ID NO: 55
  source 1..100: mol_type = other RNA
  modified_base 1: mod_base = OTHER; note = 2'-O-Methyl-cytidine phosphorothioate
  modified_base 2: mod_base = OTHER; note = 2'-O-Methyl-adenosine phosphorothioate
  modified_base 3: mod_base = OTHER; note = 2'-O-Methyl-guanosine phosphorothioate
  modified_base 21: mod_base = OTHER; note = 2'-O-Methyl-guanosine
  modified_base 28: mod_base = OTHER; note = 2'-O-Methyl-adenosine
  modified_base 29: mod_base = OTHER; note = 2'-O-Methyl-guanosine
  modified_base 30: mod_base = OTHER; note = 2'-O-Methyl-cytidine
  modified_base 31: mod_base = OTHER; note = 2'-O-Methyl-uridine
  modified_base 32: mod_base = OTHER; note = 2'-O-Methyl-adenosine
  modified_base 34: mod_base = OTHER; note = 2'-O-Methyl-adenosine
  modified_base 35: mod_base = OTHER; note = 2'-O-Methyl-adenosine
  modified_base 36: mod_base = OTHER; note = 2'-O-Methyl-adenosine
  modified_base 37: mod_base = OTHER; note = 2'-O-Methyl-uridine
  modified_base 38: mod_base = OTHER; note = 2'-O-Methyl-adenosine
  modified_base 39: mod_base = OTHER; note = 2'-O-Methyl-guanosine
  modified_base 40: mod_base = OTHER; note = 2'-O-Methyl-cytidine
  modified_base 41: mod_base = OTHER; note = 2'-O-Methyl-adenosine
  modified_base 42: mod_base = OTHER; note = 2'-O-Methyl-adenosine
  modified_base 45: mod_base = OTHER; note = uridine phosphorothioate
  modified_base 46: mod_base = OTHER; note = 2'-O-Methyl-adenosine
  modified_base 48: mod_base = OTHER; note = 2'-O-Methyl-adenosine
  modified_base 50: mod_base = OTHER; note = 2'-O-Methyl-uridine
  modified_base 52: mod_base = OTHER; note = 2'-O-Methyl-adenosine
  modified_base 53: mod_base = OTHER; note = 2'-O-Methyl-guanosine
  modified_base 54: mod_base = OTHER; note = 2'-O-Methyl-guanosine
  modified_base 57: mod_base = OTHER; note = 2'-O-Methyl-adenosine
  modified_base 61: mod_base = OTHER; note = 2'-O-Methyl-cytidine
  modified_base 64: mod_base = OTHER; note = uridine phosphorothioate
  modified_base 66: mod_base = OTHER; note = 2'-O-Methyl-uridine
  modified_base 67: mod_base = OTHER; note = 2'-O-Methyl-cytidine
  modified_base 70: mod_base = OTHER; note = 2'-O-Methyl-cytidine
  modified_base 71: mod_base = OTHER; note = 2'-O-Methyl-uridine
  modified_base 72: mod_base = OTHER; note = 2'-O-Methyl-uridine
  modified_base 73: mod_base = OTHER; note = 2'-O-Methyl-guanosine
  modified_base 74: mod_base = OTHER; note = 2'-O-Methyl-adenosine
  modified_base 75: mod_base = OTHER; note = 2'-O-Methyl-adenosine
  modified_base 76: mod_base = OTHER; note = 2'-O-Methyl-adenosine
  modified_base 77: mod_base = OTHER; note = 2'-O-Methyl-adenosine
  modified_base 78: mod_base = OTHER; note = 2'-O-Methyl-adenosine
  modified_base 79: mod_base = OTHER; note = 2'-O-Methyl-guanosine
  modified_base 80: mod_base = OTHER; note = 2'-O-Methyl-uridine
  modified_base 82: mod_base = OTHER; note = 2'-O-Methyl-guanosine
  modified_base 83: mod_base = OTHER; note = 2'-O-Methyl-cytidine
  modified_base 84: mod_base = OTHER; note = 2'-O-Methyl-adenosine
  modified_base 85: mod_base = OTHER; note = 2'-O-Methyl-cytidine
  modified_base 86: mod_base = OTHER; note = 2'-O-Methyl-cytidine
  modified_base 87: mod_base = OTHER; note = 2'-O-Methyl-guanosine
  modified_base 89: mod_base = OTHER; note = 2'-O-Methyl-guanosine
  modified_base 91: mod_base = OTHER; note = 2'-O-Methyl-cytidine
  modified_base 92: mod_base = OTHER; note = 2'-O-Methyl-guanosine
  modified_base 93: mod_base = OTHER; note = 2'-O-Methyl-guanosine
  modified_base 94: mod_base = OTHER; note = 2'-O-Methyl-uridine
  modified_base 95: mod_base = OTHER; note = 2'-O-Methyl-guanosine
  modified_base 96: mod_base = OTHER; note = 2'-O-Methyl-cytidine
  modified_base 97: mod_base = OTHER; note = 2'-O-Methyl-uridine
  modified_base 98: mod_base = OTHER; note = 2'-O-Methyl-uridine phosphorothioate
  modified_base 99: mod_base = OTHER; note = 2'-O-Methyl-uridine phosphorothioate
  modified_base 100: mod_base = OTHER; note = 2'-O-Methyl-uridine

SEQ ID NO: 2328 - RNA, 100 nt, synthetic construct; identical to SEQ ID NO: 55
  source 1..100: mol_type = other RNA
  modified_base 1: mod_base = OTHER; note = 2'-O-Methyl-cytidine phosphorothioate
  modified_base 2: mod_base = OTHER; note = 2'-O-Methyl-adenosine phosphorothioate
  modified_base 3: mod_base = OTHER; note = 2'-O-Methyl-guanosine phosphorothioate
  modified_base 21: mod_base = OTHER; note = 2'-O-Methyl-guanosine
  modified_base 28: mod_base = OTHER; note = 2'-O-Methyl-adenosine
  modified_base 29: mod_base = OTHER; note = 2'-O-Methyl-guanosine
  modified_base 30: mod_base = OTHER; note = 2'-O-Methyl-cytidine
  modified_base 31: mod_base = OTHER; note = 2'-O-Methyl-uridine
  modified_base 32: mod_base = OTHER; note = 2'-O-Methyl-adenosine
  modified_base 34: mod_base = OTHER; note = 2'-O-Methyl-adenosine
  modified_base 35: mod_base = OTHER; note = 2'-O-Methyl-adenosine
  modified_base 36: mod_base = OTHER; note = 2'-O-Methyl-adenosine
  modified_base 37: mod_base = OTHER; note = 2'-O-Methyl-uridine
  modified_base 38: mod_base = OTHER; note = 2'-O-Methyl-adenosine
  modified_base 39: mod_base = OTHER; note = 2'-O-Methyl-guanosine
  modified_base 40: mod_base = OTHER; note = 2'-O-Methyl-cytidine
  modified_base 41: mod_base = OTHER; note = 2'-O-Methyl-adenosine
  modified_base 42: mod_base = OTHER; note = 2'-O-Methyl-adenosine
  modified_base 45: mod_base = OTHER; note = uridine phosphorothioate
  modified_base 46: mod_base = OTHER; note = 2'-O-Methyl-adenosine
  modified_base 48: mod_base = OTHER; note = 2'-O-Methyl-adenosine
  modified_base 50: mod_base = OTHER; note = 2'-O-Methyl-uridine
  modified_base 52: mod_base = OTHER; note = 2'-O-Methyl-adenosine
  modified_base 53: mod_base = OTHER; note = 2'-O-Methyl-guanosine
  modified_base 54: mod_base = OTHER; note = 2'-O-Methyl-guanosine
  modified_base 55: mod_base = OTHER; note = 2'-O-Methyl-cytidine
  modified_base 56: mod_base = OTHER; note = 2'-O-Methyl-uridine
  modified_base 57: mod_base = OTHER; note = 2'-O-Methyl-adenosine
  modified_base 60: mod_base = OTHER; note = 2'-O-Methyl-cytidine
  modified_base 61: mod_base = OTHER; note = 2'-O-Methyl-cytidine
  modified_base 64: mod_base = OTHER; note = uridine phosphorothioate
  modified_base 66: mod_base = OTHER; note = 2'-O-Methyl-uridine
  modified_base 67: mod_base = OTHER; note = 2'-O-Methyl-cytidine
  modified_base 70: mod_base = OTHER; note = 2'-O-Methyl-cytidine
  modified_base 71: mod_base = OTHER; note = 2'-O-Methyl-uridine
  modified_base 72: mod_base = OTHER; note = 2'-O-Methyl-uridine
  modified_base 74: mod_base = OTHER; note = 2'-O-Methyl-adenosine
  modified_base 75: mod_base = OTHER; note = 2'-O-Methyl-adenosine
  modified_base 76: mod_base = OTHER; note = 2'-O-Methyl-adenosine
  modified_base 77: mod_base = OTHER; note = 2'-O-Methyl-adenosine
  modified_base 78: mod_base = OTHER; note = 2'-O-Methyl-adenosine
  modified_base 79: mod_base = OTHER; note = 2'-O-Methyl-guanosine
  modified_base 80: mod_base = OTHER; note = 2'-O-Methyl-uridine
  modified_base 82: mod_base = OTHER; note = 2'-O-Methyl-guanosine
  modified_base 83: mod_base = OTHER; note = 2'-O-Methyl-cytidine
  modified_base 84: mod_base = OTHER; note = 2'-O-Methyl-adenosine
  modified_base 85: mod_base = OTHER; note = 2'-O-Methyl-cytidine
  modified_base 86: mod_base = OTHER; note = 2'-O-Methyl-cytidine
  modified_base 87: mod_base = OTHER; note = 2'-O-Methyl-guanosine
  modified_base 89: mod_base = OTHER; note = 2'-O-Methyl-guanosine
  modified_base 92: mod_base = OTHER; note = 2'-O-Methyl-guanosine
  modified_base 93: mod_base = OTHER; note = 2'-O-Methyl-guanosine
  modified_base 94: mod_base = OTHER; note = 2'-O-Methyl-uridine
  modified_base 95: mod_base = OTHER; note = 2'-O-Methyl-guanosine
  modified_base 96: mod_base = OTHER; note = 2'-O-Methyl-cytidine
  modified_base 97: mod_base = OTHER; note = 2'-O-Methyl-uridine
  modified_base 98: mod_base = OTHER; note = 2'-O-Methyl-uridine phosphorothioate
  modified_base 99: mod_base = OTHER; note = 2'-O-Methyl-uridine phosphorothioate
  modified_base 100: mod_base = OTHER; note = 2'-O-Methyl-uridine

SEQ ID NO: 2329 - RNA, 100 nt, synthetic construct; identical to SEQ ID NO: 421
  source 1..100: mol_type = other RNA
  modified_base 1: mod_base = OTHER; note = 2'-O-Methyl-cytidine phosphorothioate
  modified_base 2: mod_base = OTHER; note = 2'-O-Methyl-cytidine phosphorothioate
  modified_base 3: mod_base = OTHER; note = 2'-O-Methyl-cytidine phosphorothioate
  modified_base 21: mod_base = OTHER; note = 2'-O-Methyl-guanosine
  modified_base 25: mod_base = OTHER; note = uridine phosphorothioate
  modified_base 28: mod_base = OTHER; note = 2'-O-Methyl-adenosine
  modified_base 29: mod_base = OTHER; note = 2'-O-Methyl-guanosine
  modified_base 30: mod_base = OTHER; note = 2'-O-Methyl-cytidine
  modified_base 31: mod_base = OTHER; note = 2'-O-Methyl-uridine
  modified_base 32: mod_base = OTHER; note = 2'-O-Methyl-adenosine
  modified_base 33: mod_base = OTHER; note = 2'-O-Methyl-guanosine
  modified_base 34: mod_base = OTHER; note = 2'-O-Methyl-adenosine
  modified_base 35: mod_base = OTHER; note = 2'-O-Methyl-adenosine
  modified_base 36: mod_base = OTHER; note = 2'-O-Methyl-adenosine
  modified_base 37: mod_base = OTHER; note = 2'-O-Methyl-uridine
  modified_base 38: mod_base = OTHER; note = 2'-O-Methyl-adenosine
  modified_base 39: mod_base = OTHER; note = 2'-O-Methyl-guanosine
  modified_base 40: mod_base = OTHER; note = 2'-O-Methyl-cytidine
  modified_base 41: mod_base = OTHER; note = 2'-O-Methyl-adenosine
  modified_base 42: mod_base = OTHER; note = 2'-O-Methyl-adenosine
  modified_base 45: mod_base = OTHER; note = uridine phosphorothioate
  modified_base 46: mod_base = OTHER; note = 2'-O-Methyl-adenosine
  modified_base 48: mod_base = OTHER; note = 2'-O-Methyl-adenosine
  modified_base 50: mod_base = OTHER; note = 2'-O-Methyl-uridine
  modified_base 52: mod_base = OTHER; note = 2'-O-Methyl-adenosine
  modified_base 53: mod_base = OTHER; note = 2'-O-Methyl-guanosine
  modified_base 54: mod_base = OTHER; note = 2'-O-Methyl-guanosine
  modified_base 55: mod_base = OTHER; note = 2'-O-Methyl-cytidine
  modified_base 56: mod_base = OTHER; note = 2'-O-Methyl-uridine
  modified_base 57: mod_base = OTHER; note = 2'-O-Methyl-adenosine
  modified_base 60: mod_base = OTHER; note = 2'-O-Methyl-cytidine
  modified_base 61: mod_base = OTHER; note = 2'-O-Methyl-cytidine
  modified_base 66: mod_base = OTHER; note = 2'-O-Methyl-uridine
  modified_base 67: mod_base = OTHER; note = 2'-O-Methyl-cytidine
  modified_base 70: mod_base = OTHER; note = 2'-O-Methyl-cytidine
  modified_base 71: mod_base = OTHER; note = 2'-O-Methyl-uridine
  modified_base 72: mod_base = OTHER; note = 2'-O-Methyl-uridine
  modified_base 73: mod_base = OTHER; note = 2'-O-Methyl-guanosine
  modified_base 74: mod_base = OTHER; note = 2'-O-Methyl-adenosine
  modified_base 75: mod_base = OTHER; note = 2'-O-Methyl-adenosine
  modified_base 76: mod_base = OTHER; note = 2'-O-Methyl-adenosine
  modified_base 77: mod_base = OTHER; note = 2'-O-Methyl-adenosine
  modified_base 78: mod_base = OTHER; note = 2'-O-Methyl-adenosine
  modified_base 79: mod_base = OTHER; note = 2'-O-Methyl-guanosine
  modified_base 80: mod_base = OTHER; note = 2'-O-Methyl-uridine
  modified_base 81: mod_base = OTHER; note = 2'-O-Methyl-guanosine
  modified_base 83: mod_base = OTHER; note = 2'-O-Methyl-cytidine
  modified_base 84: mod_base = OTHER; note = 2'-O-Methyl-adenosine
  modified_base 85: mod_base = OTHER; note = 2'-O-Methyl-cytidine
  modified_base 86: mod_base = OTHER; note = 2'-O-Methyl-cytidine
  modified_base 87: mod_base = OTHER; note = 2'-O-Methyl-guanosine
  modified_base 88: mod_base = OTHER; note = 2'-O-Methyl-adenosine
  modified_base 89: mod_base = OTHER; note = 2'-O-Methyl-guanosine
  modified_base 90: mod_base = OTHER; note = 2'-O-Methyl-uridine
  modified_base 91: mod_base = OTHER; note = 2'-O-Methyl-cytidine
  modified_base 92: mod_base = OTHER; note = 2'-O-Methyl-guanosine
  modified_base 93: mod_base = OTHER; note = 2'-O-Methyl-guanosine
  modified_base 94: mod_base = OTHER; note = 2'-O-Methyl-uridine
  modified_base 95: mod_base = OTHER; note = 2'-O-Methyl-guanosine
  modified_base 96: mod_base = OTHER; note = 2'-O-Methyl-cytidine
  modified_base 97: mod_base = OTHER; note = 2'-O-Methyl-uridine
  modified_base 98: mod_base = OTHER; note = 2'-O-Methyl-uridine phosphorothioate
  modified_base 99: mod_base = OTHER; note = 2'-O-Methyl-uridine phosphorothioate
  modified_base 100: mod_base = OTHER; note = 2'-O-Methyl-uridine

SEQ ID NO: 2330 - RNA, 100 nt, synthetic construct; identical to SEQ ID NO: 421
  source 1..100: mol_type = other RNA
  modified_base 1: mod_base = OTHER; note = 2'-O-Methyl-cytidine phosphorothioate
  modified_base 2: mod_base = OTHER; note = 2'-O-Methyl-cytidine phosphorothioate
  modified_base 3: mod_base = OTHER; note = 2'-O-Methyl-cytidine phosphorothioate
  modified_base 21: mod_base = OTHER; note = 2'-O-Methyl-guanosine
  modified_base 25: mod_base = OTHER; note = uridine phosphorothioate
  modified_base 28: mod_base = OTHER; note = 2'-O-Methyl-adenosine
  modified_base 29: mod_base = OTHER; note = 2'-O-Methyl-guanosine
  modified_base 30: mod_base = OTHER; note = 2'-O-Methyl-cytidine
  modified_base 31: mod_base = OTHER; note = 2'-O-Methyl-uridine
  modified_base 32: mod_base = OTHER; note = 2'-O-Methyl-adenosine
  modified_base 34: mod_base = OTHER; note = 2'-O-Methyl-adenosine
  modified_base 35: mod_base = OTHER; note = 2'-O-Methyl-adenosine
  modified_base 36: mod_base = OTHER; note = 2'-O-Methyl-adenosine
  modified_base 37: mod_base = OTHER; note = 2'-O-Methyl-uridine
  modified_base 38: mod_base = OTHER; note = 2'-O-Methyl-adenosine
  modified_base 39: mod_base = OTHER; note = 2'-O-Methyl-guanosine
  modified_base 40: mod_base = OTHER; note = 2'-O-Methyl-cytidine
  modified_base 41: mod_base = OTHER; note = 2'-O-Methyl-adenosine
  modified_base 42: mod_base = OTHER; note = 2'-O-Methyl-adenosine
  modified_base 45: mod_base = OTHER; note = uridine phosphorothioate
  modified_base 46: mod_base = OTHER; note = 2'-O-Methyl-adenosine
  modified_base 48: mod_base = OTHER; note = 2'-O-Methyl-adenosine
  modified_base 50: mod_base = OTHER; note = 2'-O-Methyl-uridine
  modified_base 52: mod_base = OTHER; note = 2'-O-Methyl-adenosine
  modified_base 53: mod_base = OTHER; note = 2'-O-Methyl-guanosine
  modified_base 54: mod_base = OTHER; note = 2'-O-Methyl-guanosine
  modified_base 55: mod_base = OTHER; note = 2'-O-Methyl-cytidine
  modified_base 56: mod_base = OTHER; note = 2'-O-Methyl-uridine
  modified_base 57: mod_base = OTHER; note = 2'-O-Methyl-adenosine
  modified_base 60: mod_base = OTHER; note = 2'-O-Methyl-cytidine
  modified_base 61: mod_base = OTHER; note = 2'-O-Methyl-cytidine
  modified_base 66: mod_base = OTHER; note = 2'-O-Methyl-uridine
  modified_base 67: mod_base = OTHER; note = 2'-O-Methyl-cytidine
  modified_base 70: mod_base = OTHER; note = 2'-O-Methyl-cytidine
  modified_base 71: mod_base = OTHER; note = 2'-O-Methyl-uridine
  modified_base 72: mod_base = OTHER; note = 2'-O-Methyl-uridine
  modified_base 74: mod_base = OTHER; note = 2'-O-Methyl-adenosine
  modified_base 75: mod_base = OTHER; note = 2'-O-Methyl-adenosine
  modified_base 76: mod_base = OTHER; note = 2'-O-Methyl-adenosine
  modified_base 77: mod_base = OTHER; note = 2'-O-Methyl-adenosine
  modified_base 78: mod_base = OTHER; note = 2'-O-Methyl-adenosine
  modified_base 79: mod_base = OTHER; note = 2'-O-Methyl-guanosine
  modified_base 80: mod_base = OTHER; note = 2'-O-Methyl-uridine
  modified_base 81: mod_base = OTHER; note = 2'-O-Methyl-guanosine
  modified_base 83: mod_base = OTHER; note = 2'-O-Methyl-cytidine
  modified_base 84: mod_base = OTHER; note = 2'-O-Methyl-adenosine
  modified_base 85: mod_base = OTHER; note = 2'-O-Methyl-cytidine
  modified_base 86: mod_base = OTHER; note = 2'-O-Methyl-cytidine
  modified_base 87: mod_base = OTHER; note = 2'-O-Methyl-guanosine
  modified_base 88: mod_base = OTHER; note = 2'-O-Methyl-adenosine
  modified_base 89: mod_base = OTHER; note = 2'-O-Methyl-guanosine
  modified_base 90: mod_base = OTHER; note = 2'-O-Methyl-uridine
  modified_base 91: mod_base = OTHER; note = 2'-O-Methyl-cytidine
  modified_base 92: mod_base = OTHER; note = 2'-O-Methyl-guanosine
  modified_base 93: mod_base = OTHER; note = 2'-O-Methyl-guanosine
  modified_base 94: mod_base = OTHER; note = 2'-O-Methyl-uridine
  modified_base 95: mod_base = OTHER; note = 2'-O-Methyl-guanosine
  modified_base 96: mod_base = OTHER; note = 2'-O-Methyl-cytidine
  modified_base 97: mod_base = OTHER; note = 2'-O-Methyl-uridine
  modified_base 98: mod_base = OTHER; note = 2'-O-Methyl-uridine phosphorothioate
  modified_base 99: mod_base = OTHER; note = 2'-O-Methyl-uridine phosphorothioate
  modified_base 100: mod_base = OTHER; note = 2'-O-Methyl-uridine

SEQ ID NO: 2331 - RNA, 100 nt, synthetic construct; identical to SEQ ID NO: 422
  source 1..100: mol_type = other RNA
  modified_base 1: mod_base = OTHER; note = 2'-O-Methyl-guanosine phosphorothioate
  modified_base 2: mod_base = OTHER; note = 2'-O-Methyl-adenosine phosphorothioate
  modified_base 3: mod_base = OTHER; note = 2'-O-Methyl-guanosine phosphorothioate
  modified_base 21: mod_base = OTHER; note = 2'-O-Methyl-guanosine
  modified_base 25: mod_base = OTHER; note = uridine phosphorothioate
  modified_base 28: mod_base = OTHER; note = 2'-O-Methyl-adenosine
  modified_base 29: mod_base = OTHER; note = 2'-O-Methyl-guanosine
  modified_base 30: mod_base = OTHER; note = 2'-O-Methyl-cytidine
  modified_base 31: mod_base = OTHER; note = 2'-O-Methyl-uridine
  modified_base 32: mod_base = OTHER; note = 2'-O-Methyl-adenosine
  modified_base 33: mod_base = OTHER; note = 2'-O-Methyl-guanosine
  modified_base 34: mod_base = OTHER; note = 2'-O-Methyl-adenosine
  modified_base 35: mod_base = OTHER; note = 2'-O-Methyl-adenosine
  modified_base 36: mod_base = OTHER; note = 2'-O-Methyl-adenosine
  modified_base 37: mod_base = OTHER; note = 2'-O-Methyl-uridine
  modified_base 38: mod_base = OTHER; note = 2'-O-Methyl-adenosine
  modified_base 39: mod_base = OTHER; note = 2'-O-Methyl-guanosine
  modified_base 40: mod_base = OTHER; note = 2'-O-Methyl-cytidine
  modified_base 41: mod_base = OTHER; note = 2'-O-Methyl-adenosine
  modified_base 42: mod_base = OTHER; note = 2'-O-Methyl-adenosine
  modified_base 45: mod_base = OTHER; note = uridine phosphorothioate
  modified_base 46: mod_base = OTHER; note = 2'-O-Methyl-adenosine
  modified_base 48: mod_base = OTHER; note = 2'-O-Methyl-adenosine
  modified_base 50: mod_base = OTHER; note = 2'-O-Methyl-uridine
  modified_base 52: mod_base = OTHER; note = 2'-O-Methyl-adenosine
  modified_base 53: mod_base = OTHER; note = 2'-O-Methyl-guanosine
  modified_base 54: mod_base = OTHER; note = 2'-O-Methyl-guanosine
  modified_base 55: mod_base = OTHER; note = 2'-O-Methyl-cytidine
  modified_base 56: mod_base = OTHER; note = 2'-O-Methyl-uridine
  modified_base 57: mod_base = OTHER; note = 2'-O-Methyl-adenosine
  modified_base 60: mod_base = OTHER; note = 2'-O-Methyl-cytidine
  modified_base 61: mod_base = OTHER; note = 2'-O-Methyl-cytidine
  modified_base 66: mod_base = OTHER; note = 2'-O-Methyl-uridine
  modified_base 67: mod_base = OTHER; note = 2'-O-Methyl-cytidine
  modified_base 70: mod_base = OTHER; note = 2'-O-Methyl-cytidine
  modified_base 71: mod_base = OTHER; note = 2'-O-Methyl-uridine
  modified_base 72: mod_base = OTHER; note = 2'-O-Methyl-uridine
  modified_base 73: mod_base = OTHER; note = 2'-O-Methyl-guanosine
  modified_base 74: mod_base = OTHER; note = 2'-O-Methyl-adenosine
  modified_base 75: mod_base = OTHER; note = 2'-O-Methyl-adenosine
  modified_base 76: mod_base = OTHER; note = 2'-O-Methyl-adenosine
  modified_base 77: mod_base = OTHER; note = 2'-O-Methyl-adenosine
  modified_base 78: mod_base = OTHER; note = 2'-O-Methyl-adenosine
  modified_base 79: mod_base = OTHER; note = 2'-O-Methyl-guanosine
  modified_base 80: mod_base = OTHER; note = 2'-O-Methyl-uridine
  modified_base 81: mod_base = OTHER; note = 2'-O-Methyl-guanosine
  modified_base 83: mod_base = OTHER; note = 2'-O-Methyl-cytidine
  modified_base 84: mod_base = OTHER; note = 2'-O-Methyl-adenosine
  modified_base 85: mod_base = OTHER; note = 2'-O-Methyl-cytidine
  modified_base 86: mod_base = OTHER; note = 2'-O-Methyl-cytidine
  modified_base 87: mod_base = OTHER; note = 2'-O-Methyl-guanosine
  modified_base 88: mod_base = OTHER; note = 2'-O-Methyl-adenosine
  modified_base 89: mod_base = OTHER; note = 2'-O-Methyl-guanosine
  modified_base 90: mod_base = OTHER; note = 2'-O-Methyl-uridine
  modified_base 91: mod_base = OTHER; note = 2'-O-Methyl-cytidine
  modified_base 92: mod_base = OTHER; note = 2'-O-Methyl-guanosine
  modified_base 93: mod_base = OTHER; note = 2'-O-Methyl-guanosine
  modified_base 94: mod_base = OTHER; note = 2'-O-Methyl-uridine
  modified_base 95: mod_base = OTHER; note = 2'-O-Methyl-guanosine
  modified_base 96: mod_base = OTHER; note = 2'-O-Methyl-cytidine
  modified_base 97: mod_base = OTHER; note = 2'-O-Methyl-uridine
  modified_base 98: mod_base = OTHER; note = 2'-O-Methyl-uridine phosphorothioate
  modified_base 99: mod_base = OTHER; note = 2'-O-Methyl-uridine phosphorothioate
  modified_base 100: mod_base = OTHER; note = 2'-O-Methyl-uridine

SEQ ID NO: 2332 - RNA, 100 nt, synthetic construct; identical to SEQ ID NO: 422
  source 1..100: mol_type = other RNA
  modified_base 1: mod_base = OTHER; note = 2'-O-Methyl-guanosine phosphorothioate
  modified_base 2: mod_base = OTHER; note = 2'-O-Methyl-adenosine phosphorothioate
  modified_base 3: mod_base = OTHER; note = 2'-O-Methyl-guanosine phosphorothioate
  modified_base 21: mod_base = OTHER; note = 2'-O-Methyl-guanosine
  modified_base 25: mod_base = OTHER; note = uridine phosphorothioate
  modified_base 28: mod_base = OTHER; note = 2'-O-Methyl-adenosine
  modified_base 29: mod_base = OTHER; note = 2'-O-Methyl-guanosine
  modified_base 30: mod_base = OTHER; note = 2'-O-Methyl-cytidine
  modified_base 31: mod_base = OTHER; note = 2'-O-Methyl-uridine
  modified_base 32: mod_base = OTHER; note = 2'-O-Methyl-adenosine
  modified_base 34: mod_base = OTHER; note = 2'-O-Methyl-adenosine
  modified_base 35: mod_base = OTHER; note = 2'-O-Methyl-adenosine
  modified_base 36: mod_base = OTHER; note = 2'-O-Methyl-adenosine
  modified_base 37: mod_base = OTHER; note = 2'-O-Methyl-uridine
  modified_base 38: mod_base = OTHER; note = 2'-O-Methyl-adenosine
  modified_base 39: mod_base = OTHER; note = 2'-O-Methyl-guanosine
  modified_base 40: mod_base = OTHER; note = 2'-O-Methyl-cytidine
  modified_base 41: mod_base = OTHER; note = 2'-O-Methyl-adenosine
  modified_base 42: mod_base = OTHER; note = 2'-O-Methyl-adenosine
  modified_base 45: mod_base = OTHER; note = uridine phosphorothioate
  modified_base 46: mod_base = OTHER; note = 2'-O-Methyl-adenosine
  modified_base 48: mod_base = OTHER; note = 2'-O-Methyl-adenosine
  modified_base 50: mod_base = OTHER; note = 2'-O-Methyl-uridine
  modified_base 52: mod_base = OTHER; note = 2'-O-Methyl-adenosine
  modified_base 53: mod_base = OTHER; note = 2'-O-Methyl-guanosine
  modified_base 54: mod_base = OTHER; note = 2'-O-Methyl-guanosine
  modified_base 55: mod_base = OTHER; note = 2'-O-Methyl-cytidine
  modified_base 56: mod_base = OTHER; note = 2'-O-Methyl-uridine
  modified_base 57: mod_base = OTHER; note = 2'-O-Methyl-adenosine
  modified_base 60: mod_base = OTHER; note = 2'-O-Methyl-cytidine
  modified_base 61: mod_base = OTHER; note = 2'-O-Methyl-cytidine
  modified_base 66: mod_base = OTHER; note = 2'-O-Methyl-uridine
  modified_base 67: mod_base = OTHER; note = 2'-O-Methyl-cytidine
  modified_base 70: mod_base = OTHER; note = 2'-O-Methyl-cytidine
  modified_base 71: mod_base = OTHER; note = 2'-O-Methyl-uridine
  modified_base 72: mod_base = OTHER; note = 2'-O-Methyl-uridine
  modified_base 74: mod_base = OTHER; note = 2'-O-Methyl-adenosine
  modified_base 75: mod_base = OTHER; note = 2'-O-Methyl-adenosine
  modified_base 76: mod_base = OTHER; note = 2'-O-Methyl-adenosine
  modified_base 77: mod_base = OTHER; note = 2'-O-Methyl-adenosine
  modified_base 78: mod_base = OTHER; note = 2'-O-Methyl-adenosine
  modified_base 79: mod_base = OTHER; note = 2'-O-Methyl-guanosine
  modified_base 80: mod_base = OTHER; note = 2'-O-Methyl-uridine
  modified_base 81: mod_base = OTHER; note = 2'-O-Methyl-guanosine
  modified_base 83: mod_base = OTHER; note = 2'-O-Methyl-cytidine
  modified_base 84: mod_base = OTHER; note = 2'-O-Methyl-adenosine
  modified_base 85: mod_base = OTHER; note = 2'-O-Methyl-cytidine
  modified_base 86: mod_base = OTHER; note = 2'-O-Methyl-cytidine
  modified_base 87: mod_base = OTHER; note = 2'-O-Methyl-guanosine
  modified_base 88: mod_base = OTHER; note = 2'-O-Methyl-adenosine
  modified_base 89: mod_base = OTHER; note = 2'-O-Methyl-guanosine
  modified_base 90: mod_base = OTHER; note = 2'-O-Methyl-uridine
  modified_base 91: mod_base = OTHER; note = 2'-O-Methyl-cytidine
  modified_base 92: mod_base = OTHER; note = 2'-O-Methyl-guanosine
  modified_base 93: mod_base = OTHER; note = 2'-O-Methyl-guanosine
  modified_base 94: mod_base = OTHER; note = 2'-O-Methyl-uridine
  modified_base 95: mod_base = OTHER; note = 2'-O-Methyl-guanosine
  modified_base 96: mod_base = OTHER; note = 2'-O-Methyl-cytidine
  modified_base 97: mod_base = OTHER; note = 2'-O-Methyl-uridine
  modified_base 98: mod_base = OTHER; note = 2'-O-Methyl-uridine phosphorothioate
  modified_base 99: mod_base = OTHER; note = 2'-O-Methyl-uridine phosphorothioate
  modified_base 100: mod_base = OTHER; note = 2'-O-Methyl-uridine

SEQ ID NO: 2333 - RNA, 100 nt, synthetic construct; identical to SEQ ID NO: 55
  source 1..100: mol_type = other RNA
  modified_base 1: mod_base = OTHER; note = 2'-O-Methyl-cytidine phosphorothioate
  modified_base 2: mod_base = OTHER; note = 2'-O-Methyl-adenosine phosphorothioate
  modified_base 3: mod_base = OTHER; note = 2'-O-Methyl-guanosine phosphorothioate
  modified_base 21: mod_base = OTHER; note = 2'-O-Methyl-guanosine
  modified_base 25: mod_base = OTHER; note = uridine phosphorothioate
  modified_base 28: mod_base = OTHER; note = 2'-O-Methyl-adenosine
  modified_base 29: mod_base = OTHER; note = 2'-O-Methyl-guanosine
  modified_base 30: mod_base = OTHER; note = 2'-O-Methyl-cytidine
  modified_base 31: mod_base = OTHER; note = 2'-O-Methyl-uridine
  modified_base 32: mod_base = OTHER; note = 2'-O-Methyl-adenosine
  modified_base 33: mod_base = OTHER; note = 2'-O-Methyl-guanosine
  modified_base 34: mod_base = OTHER; note = 2'-O-Methyl-adenosine
  modified_base 35: mod_base = OTHER; note = 2'-O-Methyl-adenosine
  modified_base 36: mod_base = OTHER; note = 2'-O-Methyl-adenosine
  modified_base 37: mod_base = OTHER; note = 2'-O-Methyl-uridine
  modified_base 38: mod_base = OTHER; note = 2'-O-Methyl-adenosine
  modified_base 39: mod_base = OTHER; note = 2'-O-Methyl-guanosine
  modified_base 40: mod_base = OTHER; note = 2'-O-Methyl-cytidine
  modified_base 41: mod_base = OTHER; note = 2'-O-Methyl-adenosine
  modified_base 42: mod_base = OTHER; note = 2'-O-Methyl-adenosine
  modified_base 45: mod_base = OTHER; note = uridine phosphorothioate
  modified_base 46: mod_base = OTHER; note = 2'-O-Methyl-adenosine
  modified_base 48: mod_base = OTHER; note = 2'-O-Methyl-adenosine
  modified_base 50: mod_base = OTHER; note = 2'-O-Methyl-uridine
  modified_base 52: mod_base = OTHER; note = 2'-O-Methyl-adenosine
  modified_base 53: mod_base = OTHER; note = 2'-O-Methyl-guanosine
  modified_base 54: mod_base = OTHER; note = 2'-O-Methyl-guanosine
  modified_base 57: mod_base = OTHER; note = 2'-O-Methyl-adenosine
  modified_base 61: mod_base = OTHER; note = 2'-O-Methyl-cytidine
  modified_base 66: mod_base = OTHER; note = 2'-O-Methyl-uridine
  modified_base 67: mod_base = OTHER; note = 2'-O-Methyl-cytidine
  modified_base 70: mod_base = OTHER; note = 2'-O-Methyl-cytidine
  modified_base 71: mod_base = OTHER; note = 2'-O-Methyl-uridine
  modified_base 72: mod_base = OTHER; note = 2'-O-Methyl-uridine
  modified_base 74: mod_base = OTHER; note = 2'-O-Methyl-adenosine
  modified_base 75: mod_base = OTHER; note = 2'-O-Methyl-adenosine
  modified_base 76: mod_base = OTHER; note = 2'-O-Methyl-adenosine
  modified_base 77: mod_base = OTHER; note = 2'-O-Methyl-adenosine
  modified_base 78: mod_base = OTHER; note = 2'-O-Methyl-adenosine
  modified_base 79: mod_base = OTHER; note = 2'-O-Methyl-guanosine
  modified_base 80: mod_base = OTHER; note = 2'-O-Methyl-uridine
  modified_base 82: mod_base = OTHER; note = 2'-O-Methyl-guanosine
  modified_base 83: mod_base = OTHER; note = 2'-O-Methyl-cytidine
  modified_base 84: mod_base = OTHER; note = 2'-O-Methyl-adenosine
  modified_base 85: mod_base = OTHER; note = 2'-O-Methyl-cytidine
  modified_base 86: mod_base = OTHER; note = 2'-O-Methyl-cytidine
  modified_base 87: mod_base = OTHER; note = 2'-O-Methyl-guanosine
  modified_base 89: mod_base = OTHER; note = 2'-O-Methyl-guanosine
  modified_base 92: mod_base = OTHER; note = 2'-O-Methyl-guanosine
  modified_base 93: mod_base = OTHER; note = 2'-O-Methyl-guanosine
  modified_base 94: mod_base = OTHER; note = 2'-O-Methyl-uridine
  modified_base 95: mod_base = OTHER; note = 2'-O-Methyl-guanosine
  modified_base 96: mod_base = OTHER; note = 2'-O-Methyl-cytidine
  modified_base 97: mod_base = OTHER; note = 2'-O-Methyl-uridine
  modified_base 98: mod_base = OTHER; note = 2'-O-Methyl-uridine phosphorothioate
  modified_base 99: mod_base = OTHER; note = 2'-O-Methyl-uridine phosphorothioate
  modified_base 100: mod_base = OTHER; note = 2'-O-Methyl-uridine

SEQ ID NO: 2334 - RNA, 100 nt, synthetic construct; identical to SEQ ID NO: 55
  source 1..100: mol_type = other RNA
  modified_base 1: mod_base = OTHER; note = 2'-O-Methyl-cytidine phosphorothioate
  modified_base 2: mod_base = OTHER; note = 2'-O-Methyl-adenosine phosphorothioate
  modified_base 3: mod_base = OTHER; note = 2'-O-Methyl-guanosine phosphorothioate
  modified_base 21: mod_base = OTHER; note = 2'-O-Methyl-guanosine
  modified_base 25: mod_base = OTHER; note = uridine phosphorothioate
  modified_base 28: mod_base = OTHER; note = 2'-O-Methyl-adenosine
  modified_base 29: mod_base = OTHER; note = 2'-O-Methyl-guanosine
  modified_base 30: mod_base = OTHER; note = 2'-O-Methyl-cytidine
  modified_base 31: mod_base = OTHER; note = 2'-O-Methyl-uridine
  modified_base 32: mod_base = OTHER; note = 2'-O-Methyl-adenosine
  modified_base 33: mod_base = OTHER; note = 2'-O-Methyl-guanosine
  modified_base 34: mod_base = OTHER; note = 2'-O-Methyl-adenosine
  modified_base 35: mod_base = OTHER; note = 2'-O-Methyl-adenosine
  modified_base 36: mod_base = OTHER; note = 2'-O-Methyl-adenosine
  modified_base 37: mod_base = OTHER; note = 2'-O-Methyl-uridine
  modified_base 38: mod_base = OTHER; note = 2'-O-Methyl-adenosine
  modified_base 39: mod_base = OTHER; note = 2'-O-Methyl-guanosine
  modified_base 40: mod_base = OTHER; note = 2'-O-Methyl-cytidine
  modified_base 41: mod_base = OTHER; note = 2'-O-Methyl-adenosine
  modified_base 42: mod_base = OTHER; note = 2'-O-Methyl-adenosine
  modified_base 45: mod_base = OTHER; note = uridine phosphorothioate
  modified_base 46: mod_base = OTHER; note = 2'-O-Methyl-adenosine
  modified_base 48: mod_base = OTHER; note = 2'-O-Methyl-adenosine
  modified_base 50: mod_base = OTHER; note = 2'-O-Methyl-uridine
  modified_base 52: mod_base = OTHER; note = 2'-O-Methyl-adenosine
  modified_base 53: mod_base = OTHER; note = 2'-O-Methyl-guanosine
  modified_base 54: mod_base = OTHER; note = 2'-O-Methyl-guanosine
  modified_base 55: mod_base = OTHER; note = 2'-O-Methyl-cytidine
  modified_base 56: mod_base = OTHER; note = 2'-O-Methyl-uridine
  modified_base 57: mod_base = OTHER; note = 2'-O-Methyl-adenosine
  modified_base 60: mod_base = OTHER; note = 2'-O-Methyl-cytidine
  modified_base 61: mod_base = OTHER; note = 2'-O-Methyl-cytidine
  modified_base 66: mod_base = OTHER; note = 2'-O-Methyl-uridine
  modified_base 67: mod_base = OTHER; note = 2'-O-Methyl-cytidine
  modified_base 70: mod_base = OTHER; note = 2'-O-Methyl-cytidine
  modified_base 71: mod_base = OTHER; note = 2'-O-Methyl-uridine
  modified_base 72: mod_base = OTHER; note = 2'-O-Methyl-uridine
  modified_base 74: mod_base = OTHER; note = 2'-O-Methyl-adenosine
  modified_base 75: mod_base = OTHER; note = 2'-O-Methyl-adenosine
  modified_base 76: mod_base = OTHER; note = 2'-O-Methyl-adenosine
  modified_base 77: mod_base = OTHER; note = 2'-O-Methyl-adenosine
  modified_base 78: mod_base = OTHER; note = 2'-O-Methyl-adenosine
  modified_base 79: mod_base = OTHER; note = 2'-O-Methyl-guanosine
  modified_base 80: mod_base = OTHER; note = 2'-O-Methyl-uridine
  modified_base 82: mod_base = OTHER; note = 2'-O-Methyl-guanosine
  modified_base 83: mod_base = OTHER; note = 2'-O-Methyl-cytidine
  modified_base 84: mod_base = OTHER; note = 2'-O-Methyl-adenosine
  modified_base 85: mod_base = OTHER; note = 2'-O-Methyl-cytidine
  modified_base 86: mod_base = OTHER; note = 2'-O-Methyl-cytidine
  modified_base 87: mod_base = OTHER; note = 2'-O-Methyl-guanosine
  modified_base 89: mod_base = OTHER; note = 2'-O-Methyl-guanosine
  modified_base 92: mod_base = OTHER; note = 2'-O-Methyl-guanosine
  modified_base 93: mod_base = OTHER; note = 2'-O-Methyl-guanosine
  modified_base 94: mod_base = OTHER; note = 2'-O-Methyl-uridine
  modified_base 95: mod_base = OTHER; note = 2'-O-Methyl-guanosine
  modified_base 96: mod_base = OTHER; note = 2'-O-Methyl-cytidine
  modified_base 97: mod_base = OTHER; note = 2'-O-Methyl-uridine
  modified_base 98: mod_base = OTHER; note = 2'-O-Methyl-uridine phosphorothioate
  modified_base 99: mod_base = OTHER; note = 2'-O-Methyl-uridine phosphorothioate
  modified_base 100: mod_base = OTHER; note = 2'-O-Methyl-uridine

SEQ ID NO: 2335 - RNA, 100 nt, synthetic construct; identical to SEQ ID NO: 55
  source 1..100: mol_type = other RNA
  modified_base 1: mod_base = OTHER; note = 2'-O-Methyl-cytidine phosphorothioate
  modified_base 2: mod_base = OTHER; note = 2'-O-Methyl-adenosine phosphorothioate
  modified_base 3: mod_base = OTHER; note = 2'-O-Methyl-guanosine phosphorothioate
  modified_base 21: mod_base = OTHER; note = 2'-O-Methyl-guanosine
  modified_base 25: mod_base = OTHER; note = uridine phosphorothioate
  modified_base 28: mod_base = OTHER; note = 2'-O-Methyl-adenosine
  modified_base 29: mod_base = OTHER; note = 2'-O-Methyl-guanosine
  modified_base 30: mod_base = OTHER; note = 2'-O-Methyl-cytidine
  modified_base 31: mod_base = OTHER; note = 2'-O-Methyl-uridine
  modified_base 32: mod_base = OTHER; note = 2'-O-Methyl-adenosine
  modified_base 33: mod_base = OTHER; note = 2'-O-Methyl-guanosine
  modified_base 34: mod_base = OTHER; note = 2'-O-Methyl-adenosine
  modified_base 35: mod_base = OTHER; note = 2'-O-Methyl-adenosine
  modified_base 36: mod_base = OTHER; note = 2'-O-Methyl-adenosine
  modified_base 37: mod_base = OTHER; note = 2'-O-Methyl-uridine
  modified_base 38: mod_base = OTHER; note = 2'-O-Methyl-adenosine
  modified_base 39: mod_base = OTHER; note = 2'-O-Methyl-guanosine
  modified_base 40: mod_base = OTHER; note = 2'-O-Methyl-cytidine
  modified_base 41: mod_base = OTHER; note = 2'-O-Methyl-adenosine
  modified_base 42: mod_base = OTHER; note = 2'-O-Methyl-adenosine
  modified_base 45: mod_base = OTHER; note = uridine phosphorothioate
  modified_base 46: mod_base = OTHER; note = 2'-O-Methyl-adenosine
  modified_base 48: mod_base = OTHER; note = 2'-O-Methyl-adenosine
  modified_base 50: mod_base = OTHER; note = 2'-O-Methyl-uridine
  modified_base 52: mod_base = OTHER; note = 2'-O-Methyl-adenosine
  modified_base 53: mod_base = OTHER; note = 2'-O-Methyl-guanosine
  modified_base 54: mod_base = OTHER; note = 2'-O-Methyl-guanosine
  modified_base 57: mod_base = OTHER; note = 2'-O-Methyl-adenosine
  modified_base 61: mod_base = OTHER; note = 2'-O-Methyl-cytidine
  modified_base 66: mod_base = OTHER; note = 2'-O-Methyl-uridine
  modified_base 67: mod_base = OTHER; note = 2'-O-Methyl-cytidine
  modified_base 70: mod_base = OTHER; note = 2'-O-Methyl-cytidine
  modified_base 71: mod_base = OTHER; note = 2'-O-Methyl-uridine
  modified_base 72: mod_base = OTHER; note = 2'-O-Methyl-uridine
  modified_base 73: mod_base = OTHER; note = 2'-O-Methyl-guanosine
  modified_base 74: mod_base = OTHER; note = 2'-O-Methyl-adenosine
  modified_base 75: mod_base = OTHER; note = 2'-O-Methyl-adenosine
  modified_base 76: mod_base = OTHER; note = 2'-O-Methyl-adenosine
  modified_base 77: mod_base = OTHER; note = 2'-O-Methyl-adenosine
  modified_base 78: mod_base = OTHER; note = 2'-O-Methyl-adenosine
  modified_base 79: mod_base = OTHER; note = 2'-O-Methyl-guanosine
  modified_base 80: mod_base = OTHER; note = 2'-O-Methyl-uridine
  modified_base 82: mod_base = OTHER; note = 2'-O-Methyl-guanosine
  modified_base 83: mod_base = OTHER; note = 2'-O-Methyl-cytidine
  modified_base 84: mod_base = OTHER; note = 2'-O-Methyl-adenosine
  modified_base 85: mod_base = OTHER; note = 2'-O-Methyl-cytidine
  modified_base 86: mod_base = OTHER; note = 2'-O-Methyl-cytidine
  modified_base 87: mod_base = OTHER; note = 2'-O-Methyl-guanosine
  modified_base 89: mod_base = OTHER; note = 2'-O-Methyl-guanosine
  modified_base 92: mod_base = OTHER; note = 2'-O-Methyl-guanosine
  modified_base 93: mod_base = OTHER; note = 2'-O-Methyl-guanosine
  modified_base 94: mod_base = OTHER; note = 2'-O-Methyl-uridine
  modified_base 95: mod_base = OTHER; note = 2'-O-Methyl-guanosine
  modified_base 96: mod_base = OTHER; note = 2'-O-Methyl-cytidine
  modified_base 97: mod_base = OTHER; note = 2'-O-Methyl-uridine
  modified_base 98: mod_base = OTHER; note = 2'-O-Methyl-uridine phosphorothioate
  modified_base 99: mod_base = OTHER; note = 2'-O-Methyl-uridine phosphorothioate
  modified_base 100: mod_base = OTHER; note = 2'-O-Methyl-uridine

SEQ ID NO: 2336 - RNA, 100 nt, synthetic construct; identical to SEQ ID NO: 55
  source 1..100: mol_type = other RNA
  modified_base 1: mod_base = OTHER; note = 2'-O-Methyl-cytidine phosphorothioate
  modified_base 2: mod_base = OTHER; note = 2'-O-Methyl-adenosine phosphorothioate
  modified_base 3: mod_base = OTHER; note = 2'-O-Methyl-guanosine phosphorothioate
  modified_base 21: mod_base = OTHER; note = 2'-O-Methyl-guanosine
  modified_base 25: mod_base = OTHER; note = uridine phosphorothioate
  modified_base 28: mod_base = OTHER; note = 2'-O-Methyl-adenosine
  modified_base 29: mod_base = OTHER; note = 2'-O-Methyl-guanosine
  modified_base 30: mod_base = OTHER; note = 2'-O-Methyl-cytidine
  modified_base 31: mod_base = OTHER; note = 2'-O-Methyl-uridine
  modified_base 32: mod_base = OTHER; note = 2'-O-Methyl-adenosine
  modified_base 33: mod_base = OTHER; note = 2'-O-Methyl-guanosine
  modified_base 34: mod_base = OTHER; note = 2'-O-Methyl-adenosine
  modified_base 35: mod_base = OTHER; note = 2'-O-Methyl-adenosine
  modified_base 36: mod_base = OTHER; note = 2'-O-Methyl-adenosine
  modified_base 37: mod_base = OTHER; note = 2'-O-Methyl-uridine
  modified_base 38: mod_base = OTHER; note = 2'-O-Methyl-adenosine
  modified_base 39: mod_base = OTHER; note = 2'-O-Methyl-guanosine
  modified_base 40: mod_base = OTHER; note = 2'-O-Methyl-cytidine
  modified_base 41: mod_base = OTHER; note = 2'-O-Methyl-adenosine
  modified_base 42: mod_base = OTHER; note = 2'-O-Methyl-adenosine
  modified_base 45: mod_base = OTHER; note = uridine phosphorothioate
  modified_base 46: mod_base = OTHER; note = 2'-O-Methyl-adenosine
  modified_base 48: mod_base = OTHER; note = 2'-O-Methyl-adenosine
  modified_base 50: mod_base = OTHER; note = 2'-O-Methyl-uridine
  modified_base 52: mod_base = OTHER; note = 2'-O-Methyl-adenosine
  modified_base 53: mod_base = OTHER; note = 2'-O-Methyl-guanosine
  modified_base 54: mod_base = OTHER; note = 2'-O-Methyl-guanosine
  modified_base 57: mod_base = OTHER; note = 2'-O-Methyl-adenosine
  modified_base 61: mod_base = OTHER; note = 2'-O-Methyl-cytidine
  modified_base 66: mod_base = OTHER; note = 2'-O-Methyl-uridine
  modified_base 67: mod_base = OTHER; note = 2'-O-Methyl-cytidine
  modified_base 70: mod_base = OTHER; note = 2'-O-Methyl-cytidine
  modified_base 71: mod_base = OTHER; note = 2'-O-Methyl-uridine
  modified_base 72: mod_base = OTHER; note = 2'-O-Methyl-uridine
  modified_base 73: mod_base = OTHER; note = 2'-O-Methyl-guanosine
  modified_base 74: mod_base = OTHER; note = 2'-O-Methyl-adenosine
  modified_base 75: mod_base = OTHER; note = 2'-O-Methyl-adenosine
  modified_base 76: mod_base = OTHER; note = 2'-O-Methyl-adenosine
  modified_base 77: mod_base = OTHER; note = 2'-O-Methyl-adenosine
  modified_base 78: mod_base = OTHER; note = 2'-O-Methyl-adenosine
  modified_base 79: mod_base = OTHER; note = 2'-O-Methyl-guanosine
  modified_base 80: mod_base = OTHER; note = 2'-O-Methyl-uridine
  modified_base 82: mod_base = OTHER; note = 2'-O-Methyl-guanosine
  modified_base 83: mod_base = OTHER; note = 2'-O-Methyl-cytidine
  modified_base 84: mod_base = OTHER; note = 2'-O-Methyl-adenosine
  modified_base 85: mod_base = OTHER; note = 2'-O-Methyl-cytidine
  modified_base 86: mod_base = OTHER; note = 2'-O-Methyl-cytidine
  modified_base 87: mod_base = OTHER; note = 2'-O-Methyl-guanosine
  modified_base 89: mod_base = OTHER; note = 2'-O-Methyl-guanosine
  modified_base 91: mod_base = OTHER; note = 2'-O-Methyl-cytidine
  modified_base 92: mod_base = OTHER; note = 2'-O-Methyl-guanosine
  modified_base 93: mod_base = OTHER; note = 2'-O-Methyl-guanosine
  modified_base 94: mod_base = OTHER; note = 2'-O-Methyl-uridine
  modified_base 95: mod_base = OTHER; note = 2'-O-Methyl-guanosine
  modified_base 96: mod_base = OTHER; note = 2'-O-Methyl-cytidine
  modified_base 97: mod_base = OTHER; note = 2'-O-Methyl-uridine
  modified_base 98: mod_base = OTHER; note = 2'-O-Methyl-uridine phosphorothioate
  modified_base 99: mod_base = OTHER; note = 2'-O-Methyl-uridine phosphorothioate
  modified_base 100: mod_base = OTHER; note = 2'-O-Methyl-uridine

SEQ ID NO: 2337 - RNA, 100 nt, synthetic construct; identical to SEQ ID NO: 55
  source 1..100: mol_type = other RNA
  modified_base 1: mod_base = OTHER; note = 2'-O-Methyl-cytidine phosphorothioate
  modified_base 2: mod_base = OTHER; note = 2'-O-Methyl-adenosine phosphorothioate
  modified_base 3: mod_base = OTHER; note = 2'-O-Methyl-guanosine phosphorothioate
  modified_base 21: mod_base = OTHER; note = 2'-O-Methyl-guanosine
  modified_base 25: mod_base = OTHER; note = uridine phosphorothioate
  modified_base 28: mod_base = OTHER; note = 2'-O-Methyl-adenosine
  modified_base 29: mod_base = OTHER; note = 2'-O-Methyl-guanosine
  modified_base 30: mod_base = OTHER; note = 2'-O-Methyl-cytidine
  modified_base 31: mod_base = OTHER; note = 2'-O-Methyl-uridine
  modified_base 32: mod_base = OTHER; note = 2'-O-Methyl-adenosine
  modified_base 34: mod_base = OTHER; note = 2'-O-Methyl-adenosine
  modified_base 35: mod_base = OTHER; note = 2'-O-Methyl-adenosine
  modified_base 36: mod_base = OTHER; note = 2'-O-Methyl-adenosine
  modified_base 37: mod_base = OTHER; note = 2'-O-Methyl-uridine
  modified_base 38: mod_base = OTHER; note = 2'-O-Methyl-adenosine
  modified_base 39: mod_base = OTHER; note = 2'-O-Methyl-guanosine
  modified_base 40: mod_base = OTHER; note = 2'-O-Methyl-cytidine
  modified_base 41: mod_base = OTHER; note = 2'-O-Methyl-adenosine
  modified_base 42: mod_base = OTHER; note = 2'-O-Methyl-adenosine
  modified_base 45: mod_base = OTHER; note = uridine phosphorothioate
  modified_base 46: mod_base = OTHER; note = 2'-O-Methyl-adenosine
  modified_base 48: mod_base = OTHER; note = 2'-O-Methyl-adenosine
  modified_base 50: mod_base = OTHER; note = 2'-O-Methyl-uridine
  modified_base 52: mod_base = OTHER; note = 2'-O-Methyl-adenosine
  modified_base 53: mod_base = OTHER; note = 2'-O-Methyl-guanosine
  modified_base 54: mod_base = OTHER; note = 2'-O-Methyl-guanosine
  modified_base 57: mod_base = OTHER; note = 2'-O-Methyl-adenosine
  modified_base 61: mod_base = OTHER; note = 2'-O-Methyl-cytidine
  modified_base 66: mod_base = OTHER; note = 2'-O-Methyl-uridine
  modified_base 67: mod_base = OTHER; note = 2'-O-Methyl-cytidine
  modified_base 70: mod_base = OTHER; note = 2'-O-Methyl-cytidine
  modified_base 71: mod_base = OTHER; note = 2'-O-Methyl-uridine
  modified_base 72: mod_base = OTHER; note = 2'-O-Methyl-uridine
  modified_base 73: mod_base = OTHER; note = 2'-O-Methyl-guanosine
  modified_base 74: mod_base = OTHER; note = 2'-O-Methyl-adenosine
  modified_base 75: mod_base = OTHER; note = 2'-O-Methyl-adenosine
  modified_base 76: mod_base = OTHER; note = 2'-O-Methyl-adenosine
  modified_base 77: mod_base = OTHER; note = 2'-O-Methyl-adenosine
  modified_base 78: mod_base = OTHER; note = 2'-O-Methyl-adenosine
  modified_base 79: mod_base = OTHER; note = 2'-O-Methyl-guanosine
  modified_base 80: mod_base = OTHER; note = 2'-O-Methyl-uridine
  modified_base 82: mod_base = OTHER; note = 2'-O-Methyl-guanosine
  modified_base 83: mod_base = OTHER; note = 2'-O-Methyl-cytidine
  modified_base 84: mod_base = OTHER; note = 2'-O-Methyl-adenosine
  modified_base 85: mod_base = OTHER; note = 2'-O-Methyl-cytidine
  modified_base 86: mod_base = OTHER; note = 2'-O-Methyl-cytidine
  modified_base 87: mod_base = OTHER; note = 2'-O-Methyl-guanosine
  modified_base 89: mod_base = OTHER; note = 2'-O-Methyl-guanosine
  modified_base 92: mod_base = OTHER; note = 2'-O-Methyl-guanosine
  modified_base 93: mod_base = OTHER; note = 2'-O-Methyl-guanosine
  modified_base 94: mod_base = OTHER; note = 2'-O-Methyl-uridine
  modified_base 95: mod_base = OTHER; note = 2'-O-Methyl-guanosine
  modified_base 96: mod_base = OTHER; note = 2'-O-Methyl-cytidine
  modified_base 97: mod_base = OTHER; note = 2'-O-Methyl-uridine
  modified_base 98: mod_base = OTHER; note = 2'-O-Methyl-uridine phosphorothioate
  modified_base 99: mod_base = OTHER; note = 2'-O-Methyl-uridine phosphorothioate
  modified_base 100: mod_base = OTHER; note = 2'-O-Methyl-uridine

SEQ ID NO: 2338 - RNA, 100 nt, synthetic construct; identical to SEQ ID NO: 55
  source 1..100: mol_type = other RNA
  modified_base 1: mod_base = OTHER; note = 2'-O-Methyl-cytidine phosphorothioate
  modified_base 2: mod_base = OTHER; note = 2'-O-Methyl-adenosine phosphorothioate
  modified_base 3: mod_base = OTHER; note = 2'-O-Methyl-guanosine phosphorothioate
  modified_base 21: mod_base = OTHER; note = 2'-O-Methyl-guanosine
  modified_base 25: mod_base = OTHER; note = uridine phosphorothioate
  modified_base 28: mod_base = OTHER; note = 2'-O-Methyl-adenosine
  modified_base 29: mod_base = OTHER; note = 2'-O-Methyl-guanosine
  modified_base 30: mod_base = OTHER; note = 2'-O-Methyl-cytidine
  modified_base 31: mod_base = OTHER; note = 2'-O-Methyl-uridine
  modified_base 32: mod_base = OTHER; note = 2'-O-Methyl-adenosine
  modified_base 34: mod_base = OTHER; note = 2'-O-Methyl-adenosine
  modified_base 35: mod_base = OTHER; note = 2'-O-Methyl-adenosine
  modified_base 36: mod_base = OTHER; note = 2'-O-Methyl-adenosine
  modified_base 37: mod_base = OTHER; note = 2'-O-Methyl-uridine
  modified_base 38: mod_base = OTHER; note = 2'-O-Methyl-adenosine
  modified_base 39: mod_base = OTHER; note = 2'-O-Methyl-guanosine
  modified_base 40: mod_base = OTHER; note = 2'-O-Methyl-cytidine
  modified_base 41: mod_base = OTHER; note = 2'-O-Methyl-adenosine
  modified_base 42: mod_base = OTHER; note = 2'-O-Methyl-adenosine
  modified_base 45: mod_base = OTHER; note = uridine phosphorothioate
  modified_base 46: mod_base = OTHER; note = 2'-O-Methyl-adenosine
  modified_base 48: mod_base = OTHER; note = 2'-O-Methyl-adenosine
  modified_base 50: mod_base = OTHER; note = 2'-O-Methyl-uridine
  modified_base 52: mod_base = OTHER; note = 2'-O-Methyl-adenosine
  modified_base 53: mod_base = OTHER; note = 2'-O-Methyl-guanosine
  modified_base 54: mod_base = OTHER; note = 2'-O-Methyl-guanosine
  modified_base 57: mod_base = OTHER; note = 2'-O-Methyl-adenosine
  modified_base 61: mod_base = OTHER; note = 2'-O-Methyl-cytidine
  modified_base 66: mod_base = OTHER; note = 2'-O-Methyl-uridine
  modified_base 67: mod_base = OTHER; note = 2'-O-Methyl-cytidine
  modified_base 70: mod_base = OTHER; note = 2'-O-Methyl-cytidine
  modified_base 71: mod_base = OTHER; note = 2'-O-Methyl-uridine
  modified_base 72: mod_base = OTHER; note = 2'-O-Methyl-uridine
  modified_base 73: mod_base = OTHER; note = 2'-O-Methyl-guanosine
  modified_base 74: mod_base = OTHER; note = 2'-O-Methyl-adenosine
  modified_base 75: mod_base = OTHER; note = 2'-O-Methyl-adenosine
  modified_base 76: mod_base = OTHER; note = 2'-O-Methyl-adenosine
  modified_base 77: mod_base = OTHER; note = 2'-O-Methyl-adenosine
  modified_base 78: mod_base = OTHER; note = 2'-O-Methyl-adenosine
  modified_base 79: mod_base = OTHER; note = 2'-O-Methyl-guanosine
  modified_base 80: mod_base = OTHER; note = 2'-O-Methyl-uridine
  modified_base 82: mod_base = OTHER; note = 2'-O-Methyl-guanosine
  modified_base 83: mod_base = OTHER; note = 2'-O-Methyl-cytidine
  modified_base 84: mod_base = OTHER; note = 2'-O-Methyl-adenosine
  modified_base 85: mod_base = OTHER; note = 2'-O-Methyl-cytidine
  modified_base 86: mod_base = OTHER; note = 2'-O-Methyl-cytidine
  modified_base 87: mod_base = OTHER; note = 2'-O-Methyl-guanosine
  modified_base 89: mod_base = OTHER; note = 2'-O-Methyl-guanosine
  modified_base 91: mod_base = OTHER; note = 2'-O-Methyl-cytidine
  modified_base 92: mod_base = OTHER; note = 2'-O-Methyl-guanosine
  modified_base 93: mod_base = OTHER; note = 2'-O-Methyl-guanosine
  modified_base 94: mod_base = OTHER; note = 2'-O-Methyl-uridine
  modified_base 95: mod_base = OTHER; note = 2'-O-Methyl-guanosine
  modified_base 96: mod_base = OTHER; note = 2'-O-Methyl-cytidine
  modified_base 97: mod_base = OTHER; note = 2'-O-Methyl-uridine
  modified_base 98: mod_base = OTHER; note = 2'-O-Methyl-uridine phosphorothioate
  modified_base 99: mod_base = OTHER; note = 2'-O-Methyl-uridine phosphorothioate
  modified_base 100: mod_base = OTHER; note = 2'-O-Methyl-uridine

SEQ ID NO: 2339 - RNA, 100 nt, synthetic construct; identical to SEQ ID NO: 55
  source 1..100: mol_type = other RNA
  modified_base 1: mod_base = OTHER; note = 2'-O-Methyl-cytidine phosphorothioate
  modified_base 2: mod_base = OTHER; note = 2'-O-Methyl-adenosine phosphorothioate
  modified_base 3: mod_base = OTHER; note = 2'-O-Methyl-guanosine phosphorothioate
  modified_base 21: mod_base = OTHER; note = 2'-O-Methyl-guanosine
  modified_base 25: mod_base = OTHER; note = uridine phosphorothioate
  modified_base 28: mod_base = OTHER; note = 2'-O-Methyl-adenosine
  modified_base 29: mod_base = OTHER; note = 2'-O-Methyl-guanosine
  modified_base 30: mod_base = OTHER; note = 2'-O-Methyl-cytidine
  modified_base 31: mod_base = OTHER; note = 2'-O-Methyl-uridine
  modified_base 32: mod_base = OTHER; note = 2'-O-Methyl-adenosine
  modified_base 34: mod_base = OTHER; note = 2'-O-Methyl-adenosine
  modified_base 35: mod_base = OTHER; note = 2'-O-Methyl-adenosine
  modified_base 36: mod_base = OTHER; note = 2'-O-Methyl-adenosine
  modified_base 37: mod_base = OTHER; note = 2'-O-Methyl-uridine
  modified_base 38: mod_base = OTHER; note = 2'-O-Methyl-adenosine
  modified_base 39: mod_base = OTHER; note = 2'-O-Methyl-guanosine
  modified_base 40: mod_base = OTHER; note = 2'-O-Methyl-cytidine
  modified_base 41: mod_base = OTHER; note = 2'-O-Methyl-adenosine
  modified_base 42: mod_base = OTHER; note = 2'-O-Methyl-adenosine
  modified_base 45: mod_base = OTHER; note = uridine phosphorothioate
  modified_base 46: mod_base = OTHER; note = 2'-O-Methyl-adenosine
  modified_base 48: mod_base = OTHER; note = 2'-O-Methyl-adenosine
  modified_base 50: mod_base = OTHER; note = 2'-O-Methyl-uridine
  modified_base 52: mod_base = OTHER; note = 2'-O-Methyl-adenosine
  modified_base 53: mod_base = OTHER; note = 2'-O-Methyl-guanosine
  modified_base 54: mod_base = OTHER; note = 2'-O-Methyl-guanosine
  modified_base 55: mod_base = OTHER; note = 2'-O-Methyl-cytidine
  modified_base 56: mod_base = OTHER; note = 2'-O-Methyl-uridine
  modified_base 57: mod_base = OTHER; note = 2'-O-Methyl-adenosine
  modified_base 60: mod_base = OTHER; note = 2'-O-Methyl-cytidine
  modified_base 61: mod_base = OTHER; note = 2'-O-Methyl-cytidine
  modified_base 66: mod_base = OTHER; note = 2'-O-Methyl-uridine
  modified_base 67: mod_base = OTHER; note = 2'-O-Methyl-cytidine
  modified_base 70: mod_base = OTHER; note = 2'-O-Methyl-cytidine
  modified_base 71: mod_base = OTHER; note = 2'-O-Methyl-uridine
  modified_base 72: mod_base = OTHER; note = 2'-O-Methyl-uridine
  modified_base 74: mod_base = OTHER; note = 2'-O-Methyl-adenosine
  modified_base 75: mod_base = OTHER; note = 2'-O-Methyl-adenosine
  modified_base 76: mod_base = OTHER; note = 2'-O-Methyl-adenosine
  modified_base 77: mod_base = OTHER; note = 2'-O-Methyl-adenosine
  modified_base 78: mod_base = OTHER; note = 2'-O-Methyl-adenosine
  modified_base 79: mod_base = OTHER; note = 2'-O-Methyl-guanosine
  modified_base 80: mod_base = OTHER; note = 2'-O-Methyl-uridine
  modified_base 82: mod_base = OTHER; note = 2'-O-Methyl-guanosine
  modified_base 83: mod_base = OTHER; note = 2'-O-Methyl-cytidine
  modified_base 84: mod_base = OTHER; note = 2'-O-Methyl-adenosine
  modified_base 85: mod_base = OTHER; note = 2'-O-Methyl-cytidine
  modified_base 86: mod_base = OTHER; note = 2'-O-Methyl-cytidine
  modified_base 87: mod_base = OTHER; note = 2'-O-Methyl-guanosine
  modified_base 89: mod_base = OTHER; note = 2'-O-Methyl-guanosine
  modified_base 92: mod_base = OTHER; note = 2'-O-Methyl-guanosine
  modified_base 93: mod_base = OTHER; note = 2'-O-Methyl-guanosine
  modified_base 94: mod_base = OTHER; note = 2'-O-Methyl-uridine
  modified_base 95: mod_base = OTHER; note = 2'-O-Methyl-guanosine
  modified_base 96: mod_base = OTHER; note = 2'-O-Methyl-cytidine
  modified_base 97: mod_base = OTHER; note = 2'-O-Methyl-uridine
  modified_base 98: mod_base = OTHER; note = 2'-O-Methyl-uridine phosphorothioate
  modified_base 99: mod_base = OTHER; note = 2'-O-Methyl-uridine phosphorothioate
  modified_base 100: mod_base = OTHER; note = 2'-O-Methyl-uridine

SEQ ID NO: 2340 - RNA, 100 nt, synthetic construct; identical to SEQ ID NO: 421
  source 1..100: mol_type = other RNA
  modified_base 1: mod_base = OTHER; note = 2'-O-Methyl-cytidine phosphorothioate
  modified_base 2: mod_base = OTHER; note = 2'-O-Methyl-cytidine phosphorothioate
  modified_base 3: mod_base = OTHER; note = 2'-O-Methyl-cytidine phosphorothioate
  modified_base 21: mod_base = OTHER; note = 2'-O-Methyl-guanosine
  modified_base 25: mod_base = OTHER; note = uridine phosphorothioate
  modified_base 28: mod_base = OTHER; note = 2'-O-Methyl-adenosine
  modified_base 29: mod_base = OTHER; note = 2'-O-Methyl-guanosine
  modified_base 30: mod_base = OTHER; note = 2'-O-Methyl-cytidine
  modified_base 31: mod_base = OTHER; note = 2'-O-Methyl-uridine
  modified_base 32: mod_base = OTHER; note = 2'-O-Methyl-adenosine
  modified_base 33: mod_base = OTHER; note = 2'-O-Methyl-guanosine
  modified_base 34: mod_base = OTHER; note = 2'-O-Methyl-adenosine
  modified_base 35: mod_base = OTHER; note = 2'-O-Methyl-adenosine
  modified_base 36: mod_base = OTHER; note = 2'-O-Methyl-adenosine
  modified_base 37: mod_base = OTHER; note = 2'-O-Methyl-uridine
  modified_base 38: mod_base = OTHER; note = 2'-O-Methyl-adenosine
  modified_base 39: mod_base = OTHER; note = 2'-O-Methyl-guanosine
  modified_base 40: mod_base = OTHER; note = 2'-O-Methyl-cytidine
  modified_base 41: mod_base = OTHER; note = 2'-O-Methyl-adenosine
  modified_base 42: mod_base = OTHER; note = 2'-O-Methyl-adenosine
  modified_base 46: mod_base = OTHER; note = 2'-O-Methyl-adenosine
  modified_base 48: mod_base = OTHER; note = 2'-O-Methyl-adenosine
  modified_base 50: mod_base = OTHER; note = 2'-O-Methyl-uridine
  modified_base 52: mod_base = OTHER; note = 2'-O-Methyl-adenosine
  modified_base 53: mod_base = OTHER; note = 2'-O-Methyl-guanosine
  modified_base 54: mod_base = OTHER; note = 2'-O-Methyl-guanosine
  modified_base 55: mod_base = OTHER; note = 2'-O-Methyl-cytidine
  modified_base 56: mod_base = OTHER; note = 2'-O-Methyl-uridine
  modified_base 57: mod_base = OTHER; note = 2'-O-Methyl-adenosine
  modified_base 60: mod_base = OTHER; note = 2'-O-Methyl-cytidine
  modified_base 61: mod_base = OTHER; note = 2'-O-Methyl-cytidine
  modified_base 64: mod_base = OTHER; note = uridine phosphorothioate
  modified_base 66: mod_base = OTHER; note = 2'-O-Methyl-uridine
  modified_base 67: mod_base = OTHER; note = 2'-O-Methyl-cytidine
  modified_base 70: mod_base = OTHER; note = 2'-O-Methyl-cytidine
  modified_base 71: mod_base = OTHER; note = 2'-O-Methyl-uridine
  modified_base 72: mod_base = OTHER; note = 2'-O-Methyl-uridine
  modified_base 73: mod_base = OTHER; note = 2'-O-Methyl-guanosine
  modified_base 74: mod_base = OTHER; note = 2'-O-Methyl-adenosine
  modified_base 75: mod_base = OTHER; note = 2'-O-Methyl-adenosine
  modified_base 76: mod_base = OTHER; note = 2'-O-Methyl-adenosine
  modified_base 77: mod_base = OTHER; note = 2'-O-Methyl-adenosine
  modified_base 78: mod_base = OTHER; note = 2'-O-Methyl-adenosine
  modified_base 79: mod_base = OTHER; note = 2'-O-Methyl-guanosine
  modified_base 80: mod_base = OTHER; note = 2'-O-Methyl-uridine
  modified_base 81: mod_base = OTHER; note = 2'-O-Methyl-guanosine
  modified_base 83: mod_base = OTHER; note = 2'-O-Methyl-cytidine
  modified_base 84: mod_base = OTHER; note = 2'-O-Methyl-adenosine
  modified_base 85: mod_base = OTHER; note = 2'-O-Methyl-cytidine
  modified_base 86: mod_base = OTHER; note = 2'-O-Methyl-cytidine
  modified_base 87: mod_base = OTHER; note = 2'-O-Methyl-guanosine
  modified_base 88: mod_base = OTHER; note = 2'-O-Methyl-adenosine
  modified_base 89: mod_base = OTHER; note = 2'-O-Methyl-guanosine
  modified_base 90: mod_base = OTHER; note = 2'-O-Methyl-uridine
  modified_base 91: mod_base = OTHER; note = 2'-O-Methyl-cytidine
  modified_base 92: mod_base = OTHER; note = 2'-O-Methyl-guanosine
  modified_base 93: mod_base = OTHER; note = 2'-O-Methyl-guanosine
  modified_base 94: mod_base = OTHER; note = 2'-O-Methyl-uridine
  modified_base 95: mod_base = OTHER; note = 2'-O-Methyl-guanosine
  modified_base 96: mod_base = OTHER; note = 2'-O-Methyl-cytidine
  modified_base 97: mod_base = OTHER; note = 2'-O-Methyl-uridine
  modified_base 98: mod_base = OTHER; note = 2'-O-Methyl-uridine phosphorothioate
  modified_base 99: mod_base = OTHER; note = 2'-O-Methyl-uridine phosphorothioate
  modified_base 100: mod_base = OTHER; note = 2'-O-Methyl-uridine

SEQ ID NO: 2341 - RNA, 100 nt, synthetic construct; identical to SEQ ID NO: 421
  source 1..100: mol_type = other RNA
  modified_base 1: mod_base = OTHER; note = 2'-O-Methyl-cytidine phosphorothioate
  modified_base 2: mod_base = OTHER; note = 2'-O-Methyl-cytidine phosphorothioate
  modified_base 3: mod_base = OTHER; note = 2'-O-Methyl-cytidine phosphorothioate
  modified_base 21: mod_base = OTHER; note = 2'-O-Methyl-guanosine
  modified_base 25: mod_base = OTHER; note = uridine phosphorothioate
  modified_base 28: mod_base = OTHER; note = 2'-O-Methyl-adenosine
  modified_base 29: mod_base = OTHER; note = 2'-O-Methyl-guanosine
  modified_base 30: mod_base = OTHER; note = 2'-O-Methyl-cytidine
  modified_base 31: mod_base = OTHER; note = 2'-O-Methyl-uridine
  modified_base 32: mod_base = OTHER; note = 2'-O-Methyl-adenosine
  modified_base 34: mod_base = OTHER; note = 2'-O-Methyl-adenosine
  modified_base 35: mod_base = OTHER; note = 2'-O-Methyl-adenosine
  modified_base 36: mod_base = OTHER; note = 2'-O-Methyl-adenosine
  modified_base 37: mod_base = OTHER; note = 2'-O-Methyl-uridine
  modified_base 38: mod_base = OTHER; note = 2'-O-Methyl-adenosine
  modified_base 39: mod_base = OTHER; note = 2'-O-Methyl-guanosine
  modified_base 40: mod_base = OTHER; note = 2'-O-Methyl-cytidine
  modified_base 41: mod_base = OTHER; note = 2'-O-Methyl-adenosine
  modified_base 42: mod_base = OTHER; note = 2'-O-Methyl-adenosine
  modified_base 46: mod_base = OTHER; note = 2'-O-Methyl-adenosine
  modified_base 48: mod_base = OTHER; note = 2'-O-Methyl-adenosine
  modified_base 50: mod_base = OTHER; note = 2'-O-Methyl-uridine
  modified_base 52: mod_base = OTHER; note = 2'-O-Methyl-adenosine
  modified_base 53: mod_base = OTHER; note = 2'-O-Methyl-guanosine
  modified_base 54: mod_base = OTHER; note = 2'-O-Methyl-guanosine
  modified_base 55: mod_base = OTHER; note = 2'-O-Methyl-cytidine
  modified_base 56: mod_base = OTHER; note = 2'-O-Methyl-uridine
  modified_base 57: mod_base = OTHER; note = 2'-O-Methyl-adenosine
  modified_base 60: mod_base = OTHER; note = 2'-O-Methyl-cytidine
  modified_base 61: mod_base = OTHER; note = 2'-O-Methyl-cytidine
  modified_base 64: mod_base = OTHER; note = uridine phosphorothioate
  modified_base 66: mod_base = OTHER; note = 2'-O-Methyl-uridine
  modified_base 67: mod_base = OTHER; note = 2'-O-Methyl-cytidine
  modified_base 70: mod_base = OTHER; note = 2'-O-Methyl-cytidine
  modified_base 71: mod_base = OTHER; note = 2'-O-Methyl-uridine
  modified_base 72: mod_base = OTHER; note = 2'-O-Methyl-uridine
  modified_base 74: mod_base = OTHER; note = 2'-O-Methyl-adenosine
  modified_base 75: mod_base = OTHER; note = 2'-O-Methyl-adenosine
  modified_base 76: mod_base = OTHER; note = 2'-O-Methyl-adenosine
  modified_base 77: mod_base = OTHER; note = 2'-O-Methyl-adenosine
  modified_base 78: mod_base = OTHER; note = 2'-O-Methyl-adenosine
  modified_base 79: mod_base = OTHER; note = 2'-O-Methyl-guanosine
  modified_base 80: mod_base = OTHER; note = 2'-O-Methyl-uridine
  modified_base 81: mod_base = OTHER; note = 2'-O-Methyl-guanosine
  modified_base 83: mod_base = OTHER; note = 2'-O-Methyl-cytidine
  modified_base 84: mod_base = OTHER; note = 2'-O-Methyl-adenosine
  modified_base 85: mod_base = OTHER; note = 2'-O-Methyl-cytidine
  modified_base 86: mod_base = OTHER; note = 2'-O-Methyl-cytidine
  modified_base 87: mod_base = OTHER; note = 2'-O-Methyl-guanosine
  modified_base 88: mod_base = OTHER; note = 2'-O-Methyl-adenosine
  modified_base 89: mod_base = OTHER; note = 2'-O-Methyl-guanosine
  modified_base 90: mod_base = OTHER; note = 2'-O-Methyl-uridine
  modified_base 91: mod_base = OTHER; note = 2'-O-Methyl-cytidine
  modified_base 92: mod_base = OTHER; note = 2'-O-Methyl-guanosine
  modified_base 93: mod_base = OTHER; note = 2'-O-Methyl-guanosine
  modified_base 94: mod_base = OTHER; note = 2'-O-Methyl-uridine
  modified_base 95: mod_base = OTHER; note = 2'-O-Methyl-guanosine
  modified_base 96: mod_base = OTHER; note = 2'-O-Methyl-cytidine
  modified_base 97: mod_base = OTHER; note = 2'-O-Methyl-uridine
  modified_base 98: mod_base = OTHER; note = 2'-O-Methyl-uridine phosphorothioate
  modified_base 99: mod_base = OTHER; note = 2'-O-Methyl-uridine phosphorothioate
  modified_base 100: mod_base = OTHER; note = 2'-O-Methyl-uridine

SEQ ID NO: 2342 - RNA, 100 nt, synthetic construct; identical to SEQ ID NO: 422
  source 1..100: mol_type = other RNA
  modified_base 1: mod_base = OTHER; note = 2'-O-Methyl-guanosine phosphorothioate
  modified_base 2: mod_base = OTHER; note = 2'-O-Methyl-adenosine phosphorothioate
  modified_base 3: mod_base = OTHER; note = 2'-O-Methyl-guanosine phosphorothioate
  modified_base 21: mod_base = OTHER; note = 2'-O-Methyl-guanosine
  modified_base 25: mod_base = OTHER; note = uridine phosphorothioate
  modified_base 28: mod_base = OTHER; note = 2'-O-Methyl-adenosine
  modified_base 29: mod_base = OTHER; note = 2'-O-Methyl-guanosine
  modified_base 30: mod_base = OTHER; note = 2'-O-Methyl-cytidine
  modified_base 31: mod_base = OTHER; note = 2'-O-Methyl-uridine
  modified_base 32: mod_base = OTHER; note = 2'-O-Methyl-adenosine
  modified_base 33: mod_base = OTHER; note = 2'-O-Methyl-guanosine
  modified_base 34: mod_base = OTHER; note = 2'-O-Methyl-adenosine
  modified_base 35: mod_base = OTHER; note = 2'-O-Methyl-adenosine
  modified_base 36: mod_base = OTHER; note = 2'-O-Methyl-adenosine
  modified_base 37: mod_base = OTHER; note = 2'-O-Methyl-uridine
  modified_base 38: mod_base = OTHER; note = 2'-O-Methyl-adenosine
  modified_base 39: mod_base = OTHER; note = 2'-O-Methyl-guanosine
  modified_base 40: mod_base = OTHER; note = 2'-O-Methyl-cytidine
  modified_base 41: mod_base = OTHER; note = 2'-O-Methyl-adenosine
  modified_base 42: mod_base = OTHER; note = 2'-O-Methyl-adenosine
  modified_base 46: mod_base = OTHER; note = 2'-O-Methyl-adenosine
  modified_base 48: mod_base = OTHER; note = 2'-O-Methyl-adenosine
  modified_base 50: mod_base = OTHER; note = 2'-O-Methyl-uridine
  modified_base 52: mod_base = OTHER; note = 2'-O-Methyl-adenosine
  modified_base 53: mod_base = OTHER; note = 2'-O-Methyl-guanosine
  modified_base 54: mod_base = OTHER; note = 2'-O-Methyl-guanosine
  modified_base 55: mod_base = OTHER; note = 2'-O-Methyl-cytidine
  modified_base 56: mod_base = OTHER; note = 2'-O-Methyl-uridine
  modified_base 57: mod_base = OTHER; note = 2'-O-Methyl-adenosine
  modified_base 60: mod_base = OTHER; note = 2'-O-Methyl-cytidine
  modified_base 61: mod_base = OTHER; note = 2'-O-Methyl-cytidine
  modified_base 64: mod_base = OTHER; note = uridine phosphorothioate
  modified_base 66: mod_base = OTHER; note = 2'-O-Methyl-uridine
  modified_base 67: mod_base = OTHER; note = 2'-O-Methyl-cytidine
  modified_base 70: mod_base = OTHER; note = 2'-O-Methyl-cytidine
  modified_base 71: mod_base = OTHER; note = 2'-O-Methyl-uridine
  modified_base 72: mod_base = OTHER; note = 2'-O-Methyl-uridine
  modified_base 73: mod_base = OTHER; note = 2'-O-Methyl-guanosine
  modified_base 74: mod_base = OTHER; note = 2'-O-Methyl-adenosine
  modified_base 75: mod_base = OTHER; note = 2'-O-Methyl-adenosine
  modified_base 76: mod_base = OTHER; note = 2'-O-Methyl-adenosine
  modified_base 77: mod_base = OTHER; note = 2'-O-Methyl-adenosine
  modified_base 78: mod_base = OTHER; note = 2'-O-Methyl-adenosine
  modified_base 79: mod_base = OTHER; note = 2'-O-Methyl-guanosine
  modified_base 80: mod_base = OTHER; note = 2'-O-Methyl-uridine
  modified_base 81: mod_base = OTHER; note = 2'-O-Methyl-guanosine
  modified_base 83: mod_base = OTHER; note = 2'-O-Methyl-cytidine
  modified_base 84: mod_base = OTHER; note = 2'-O-Methyl-adenosine
  modified_base 85: mod_base = OTHER; note = 2'-O-Methyl-cytidine
  modified_base 86: mod_base = OTHER; note = 2'-O-Methyl-cytidine
  modified_base 87: mod_base = OTHER; note = 2'-O-Methyl-guanosine
  modified_base 88: mod_base = OTHER; note = 2'-O-Methyl-adenosine
  modified_base 89: mod_base = OTHER; note = 2'-O-Methyl-guanosine
  modified_base 90: mod_base = OTHER; note = 2'-O-Methyl-uridine
  modified_base 91: mod_base = OTHER; note = 2'-O-Methyl-cytidine
  modified_base 92: mod_base = OTHER; note = 2'-O-Methyl-guanosine
  modified_base 93: mod_base = OTHER; note = 2'-O-Methyl-guanosine
  modified_base 94: mod_base = OTHER; note = 2'-O-Methyl-uridine
  modified_base 95: mod_base = OTHER; note = 2'-O-Methyl-guanosine
  modified_base 96: mod_base = OTHER; note = 2'-O-Methyl-cytidine
  modified_base 97: mod_base = OTHER; note = 2'-O-Methyl-uridine
  modified_base 98: mod_base = OTHER; note = 2'-O-Methyl-uridine phosphorothioate
  modified_base 99: mod_base = OTHER; note = 2'-O-Methyl-uridine phosphorothioate
  modified_base 100: mod_base = OTHER; note = 2'-O-Methyl-uridine

SEQ ID NO: 2343 - RNA, 100 nt, synthetic construct; identical to SEQ ID NO: 422
  source 1..100: mol_type = other RNA
  modified_base 1: mod_base = OTHER; note = 2'-O-Methyl-guanosine phosphorothioate
  modified_base 2: mod_base = OTHER; note = 2'-O-Methyl-adenosine phosphorothioate
  modified_base 3: mod_base = OTHER; note = 2'-O-Methyl-guanosine phosphorothioate
  modified_base 21: mod_base = OTHER; note = 2'-O-Methyl-guanosine
  modified_base 25: mod_base = OTHER; note = uridine phosphorothioate
  modified_base 28: mod_base = OTHER; note = 2'-O-Methyl-adenosine
  modified_base 29: mod_base = OTHER; note = 2'-O-Methyl-guanosine
  modified_base 30: mod_base = OTHER; note = 2'-O-Methyl-cytidine
  modified_base 31: mod_base = OTHER; note = 2'-O-Methyl-uridine
  modified_base 32: mod_base = OTHER; note = 2'-O-Methyl-adenosine
  modified_base 34: mod_base = OTHER; note = 2'-O-Methyl-adenosine
  modified_base 35: mod_base = OTHER; note = 2'-O-Methyl-adenosine
  modified_base 36: mod_base = OTHER; note = 2'-O-Methyl-adenosine
  modified_base 37: mod_base = OTHER; note = 2'-O-Methyl-uridine
  modified_base 38: mod_base = OTHER; note = 2'-O-Methyl-adenosine
  modified_base 39: mod_base = OTHER; note = 2'-O-Methyl-guanosine
  modified_base 40: mod_base = OTHER; note = 2'-O-Methyl-cytidine
  modified_base 41: mod_base = OTHER; note = 2'-O-Methyl-adenosine
  modified_base 42: mod_base = OTHER; note = 2'-O-Methyl-adenosine
  modified_base 46: mod_base = OTHER; note = 2'-O-Methyl-adenosine
  modified_base 48: mod_base = OTHER; note = 2'-O-Methyl-adenosine
  modified_base 50: mod_base = OTHER; note = 2'-O-Methyl-uridine
  modified_base 52: mod_base = OTHER; note = 2'-O-Methyl-adenosine
  modified_base 53: mod_base = OTHER; note = 2'-O-Methyl-guanosine
  modified_base 54: mod_base = OTHER; note = 2'-O-Methyl-guanosine
  modified_base 55: mod_base = OTHER; note = 2'-O-Methyl-cytidine
  modified_base 56: mod_base = OTHER; note = 2'-O-Methyl-uridine
  modified_base 57: mod_base = OTHER; note = 2'-O-Methyl-adenosine
  modified_base 60: mod_base = OTHER; note = 2'-O-Methyl-cytidine
  modified_base 61: mod_base = OTHER; note = 2'-O-Methyl-cytidine
  modified_base 64: mod_base = OTHER; note = uridine phosphorothioate
  modified_base 66: mod_base = OTHER; note = 2'-O-Methyl-uridine
  modified_base 67: mod_base = OTHER; note = 2'-O-Methyl-cytidine
  modified_base 70: mod_base = OTHER; note = 2'-O-Methyl-cytidine
  modified_base 71: mod_base = OTHER; note = 2'-O-Methyl-uridine
  modified_base 72: mod_base = OTHER; note = 2'-O-Methyl-uridine
  modified_base 74: mod_base = OTHER; note = 2'-O-Methyl-adenosine
  modified_base 75: mod_base = OTHER; note = 2'-O-Methyl-adenosine
  modified_base 76: mod_base = OTHER; note = 2'-O-Methyl-adenosine
  modified_base 77: mod_base = OTHER; note = 2'-O-Methyl-adenosine
  modified_base 78: mod_base = OTHER; note = 2'-O-Methyl-adenosine
  modified_base 79: mod_base = OTHER; note = 2'-O-Methyl-guanosine
  modified_base 80: mod_base = OTHER; note = 2'-O-Methyl-uridine
  modified_base 81: mod_base = OTHER; note = 2'-O-Methyl-guanosine
  modified_base 83: mod_base = OTHER; note = 2'-O-Methyl-cytidine
  modified_base 84: mod_base = OTHER; note = 2'-O-Methyl-adenosine
  modified_base 85: mod_base = OTHER; note = 2'-O-Methyl-cytidine
  modified_base 86: mod_base = OTHER; note = 2'-O-Methyl-cytidine
  modified_base 87: mod_base = OTHER; note = 2'-O-Methyl-guanosine
  modified_base 88: mod_base = OTHER; note = 2'-O-Methyl-adenosine
  modified_base 89: mod_base = OTHER; note = 2'-O-Methyl-guanosine
  modified_base 90: mod_base = OTHER; note = 2'-O-Methyl-uridine
  modified_base 91: mod_base = OTHER; note = 2'-O-Methyl-cytidine
  modified_base 92: mod_base = OTHER; note = 2'-O-Methyl-guanosine
  modified_base 93: mod_base = OTHER; note = 2'-O-Methyl-guanosine
  modified_base 94: mod_base = OTHER; note = 2'-O-Methyl-uridine
  modified_base 95: mod_base = OTHER; note = 2'-O-Methyl-guanosine
  modified_base 96: mod_base = OTHER; note = 2'-O-Methyl-cytidine
  modified_base 97: mod_base = OTHER; note = 2'-O-Methyl-uridine
  modified_base 98: mod_base = OTHER; note = 2'-O-Methyl-uridine phosphorothioate
  modified_base 99: mod_base = OTHER; note = 2'-O-Methyl-uridine phosphorothioate
  modified_base 100: mod_base = OTHER; note = 2'-O-Methyl-uridine

SEQ ID NO: 2344 - RNA, 100 nt, synthetic construct; identical to SEQ ID NO: 55
  source 1..100: mol_type = other RNA
  modified_base 1: mod_base = OTHER; note = 2'-O-Methyl-cytidine phosphorothioate
  modified_base 2: mod_base = OTHER; note = 2'-O-Methyl-adenosine phosphorothioate
  modified_base 3: mod_base = OTHER; note = 2'-O-Methyl-guanosine phosphorothioate
  modified_base 21: mod_base = OTHER; note = 2'-O-Methyl-guanosine
  modified_base 25: mod_base = OTHER; note = uridine phosphorothioate
  modified_base 28: mod_base = OTHER; note = 2'-O-Methyl-adenosine
  modified_base 29: mod_base = OTHER; note = 2'-O-Methyl-guanosine
  modified_base 30: mod_base = OTHER; note = 2'-O-Methyl-cytidine
  modified_base 31: mod_base = OTHER; note = 2'-O-Methyl-uridine
  modified_base 32: mod_base = OTHER; note = 2'-O-Methyl-adenosine
  modified_base 33: mod_base = OTHER; note = 2'-O-Methyl-guanosine
  modified_base 34: mod_base = OTHER; note = 2'-O-Methyl-adenosine
  modified_base 35: mod_base = OTHER; note = 2'-O-Methyl-adenosine
  modified_base 36: mod_base = OTHER; note = 2'-O-Methyl-adenosine
  modified_base 37: mod_base = OTHER; note = 2'-O-Methyl-uridine
  modified_base 38: mod_base = OTHER; note = 2'-O-Methyl-adenosine
  modified_base 39: mod_base = OTHER; note = 2'-O-Methyl-guanosine
  modified_base 40: mod_base = OTHER; note = 2'-O-Methyl-cytidine
  modified_base 41: mod_base = OTHER; note = 2'-O-Methyl-adenosine
  modified_base 42: mod_base = OTHER; note = 2'-O-Methyl-adenosine
  modified_base 46: mod_base = OTHER; note = 2'-O-Methyl-adenosine
  modified_base 48: mod_base = OTHER; note = 2'-O-Methyl-adenosine
  modified_base 50: mod_base = OTHER; note = 2'-O-Methyl-uridine
  modified_base 52: mod_base = OTHER; note = 2'-O-Methyl-adenosine
  modified_base 53: mod_base = OTHER; note = 2'-O-Methyl-guanosine
  modified_base 54: mod_base = OTHER; note = 2'-O-Methyl-guanosine
  modified_base 57: mod_base = OTHER; note = 2'-O-Methyl-adenosine
  modified_base 61: mod_base = OTHER; note = 2'-O-Methyl-cytidine
  modified_base 64: mod_base = OTHER; note = uridine phosphorothioate
  modified_base 66: mod_base = OTHER; note = 2'-O-Methyl-uridine
  modified_base 67: mod_base = OTHER; note = 2'-O-Methyl-cytidine
  modified_base 70: mod_base = OTHER; note = 2'-O-Methyl-cytidine
  modified_base 71: mod_base = OTHER; note = 2'-O-Methyl-uridine
  modified_base 72: mod_base = OTHER; note = 2'-O-Methyl-uridine
  modified_base 74: mod_base = OTHER; note = 2'-O-Methyl-adenosine
  modified_base 75: mod_base = OTHER; note = 2'-O-Methyl-adenosine
  modified_base 76: mod_base = OTHER; note = 2'-O-Methyl-adenosine
  modified_base 77: mod_base = OTHER; note = 2'-O-Methyl-adenosine
  modified_base 78: mod_base = OTHER; note = 2'-O-Methyl-adenosine
  modified_base 79: mod_base = OTHER; note = 2'-O-Methyl-guanosine
  modified_base 80: mod_base = OTHER; note = 2'-O-Methyl-uridine
  modified_base 82: mod_base = OTHER; note = 2'-O-Methyl-guanosine
  modified_base 83: mod_base = OTHER; note = 2'-O-Methyl-cytidine
  modified_base 84: mod_base = OTHER; note = 2'-O-Methyl-adenosine
  modified_base 85: mod_base = OTHER; note = 2'-O-Methyl-cytidine
  modified_base 86: mod_base = OTHER; note = 2'-O-Methyl-cytidine
  modified_base 87: mod_base = OTHER; note = 2'-O-Methyl-guanosine
  modified_base 89: mod_base = OTHER; note = 2'-O-Methyl-guanosine
  modified_base 92: mod_base = OTHER; note = 2'-O-Methyl-guanosine
  modified_base 93: mod_base = OTHER; note = 2'-O-Methyl-guanosine
  modified_base 94: mod_base = OTHER; note = 2'-O-Methyl-uridine
  modified_base 95: mod_base = OTHER; note = 2'-O-Methyl-guanosine
  modified_base 96: mod_base = OTHER; note = 2'-O-Methyl-cytidine
  modified_base 97: mod_base = OTHER; note = 2'-O-Methyl-uridine
  modified_base 98: mod_base = OTHER; note = 2'-O-Methyl-uridine phosphorothioate
  modified_base 99: mod_base = OTHER; note = 2'-O-Methyl-uridine phosphorothioate
  modified_base 100: mod_base = OTHER; note = 2'-O-Methyl-uridine

SEQ ID NO: 2345 - RNA, 100 nt, synthetic construct; identical to SEQ ID NO: 55
  source 1..100: mol_type = other RNA
  modified_base 1: mod_base = OTHER; note = 2'-O-Methyl-cytidine phosphorothioate
  modified_base 2: mod_base = OTHER; note = 2'-O-Methyl-adenosine phosphorothioate
  modified_base 3: mod_base = OTHER; note = 2'-O-Methyl-guanosine phosphorothioate
  modified_base 21: mod_base = OTHER; note = 2'-O-Methyl-guanosine
  modified_base 25: mod_base = OTHER; note = uridine phosphorothioate
  modified_base 28: mod_base = OTHER; note = 2'-O-Methyl-adenosine
  modified_base 29: mod_base = OTHER; note = 2'-O-Methyl-guanosine
  modified_base 30: mod_base = OTHER; note = 2'-O-Methyl-cytidine
  modified_base 31: mod_base = OTHER; note = 2'-O-Methyl-uridine
  modified_base 32: mod_base = OTHER; note = 2'-O-Methyl-adenosine
  modified_base 33: mod_base = OTHER; note = 2'-O-Methyl-guanosine
  modified_base 34: mod_base = OTHER; note = 2'-O-Methyl-adenosine
  modified_base 35: mod_base = OTHER; note = 2'-O-Methyl-adenosine
  modified_base 36: mod_base = OTHER; note = 2'-O-Methyl-adenosine
  modified_base 37: mod_base = OTHER; note = 2'-O-Methyl-uridine
  modified_base 38: mod_base = OTHER; note = 2'-O-Methyl-adenosine
  modified_base 39: mod_base = OTHER; note = 2'-O-Methyl-guanosine
  modified_base 40: mod_base = OTHER; note = 2'-O-Methyl-cytidine
  modified_base 41: mod_base = OTHER; note = 2'-O-Methyl-adenosine
  modified_base 42: mod_base = OTHER; note = 2'-O-Methyl-adenosine
  modified_base 46: mod_base = OTHER; note = 2'-O-Methyl-adenosine
  modified_base 48: mod_base = OTHER; note = 2'-O-Methyl-adenosine
  modified_base 50: mod_base = OTHER; note = 2'-O-Methyl-uridine
  modified_base 52: mod_base = OTHER; note = 2'-O-Methyl-adenosine
  modified_base 53: mod_base = OTHER; note = 2'-O-Methyl-guanosine
  modified_base 54: mod_base = OTHER; note = 2'-O-Methyl-guanosine
  modified_base 55: mod_base = OTHER; note = 2'-O-Methyl-cytidine
  modified_base 56: mod_base = OTHER; note = 2'-O-Methyl-uridine
  modified_base 57: mod_base = OTHER; note = 2'-O-Methyl-adenosine
  modified_base 60: mod_base = OTHER; note = 2'-O-Methyl-cytidine
  modified_base 61: mod_base = OTHER; note = 2'-O-Methyl-cytidine
  modified_base 64: mod_base = OTHER; note = uridine phosphorothioate
  modified_base 66: mod_base = OTHER; note = 2'-O-Methyl-uridine
  modified_base 67: mod_base = OTHER; note = 2'-O-Methyl-cytidine
  modified_base 70: mod_base = OTHER; note = 2'-O-Methyl-cytidine
  modified_base 71: mod_base = OTHER; note = 2'-O-Methyl-uridine
  modified_base 72: mod_base = OTHER; note = 2'-O-Methyl-uridine
  modified_base 74: mod_base = OTHER; note = 2'-O-Methyl-adenosine
  modified_base 75: mod_base = OTHER; note = 2'-O-Methyl-adenosine
  modified_base 76: mod_base = OTHER; note = 2'-O-Methyl-adenosine
  modified_base 77: mod_base = OTHER; note = 2'-O-Methyl-adenosine
  modified_base 78: mod_base = OTHER; note = 2'-O-Methyl-adenosine
  modified_base 79: mod_base = OTHER; note = 2'-O-Methyl-guanosine
  modified_base 80: mod_base = OTHER; note = 2'-O-Methyl-uridine
  modified_base 82: mod_base = OTHER; note = 2'-O-Methyl-guanosine
  modified_base 83: mod_base = OTHER; note = 2'-O-Methyl-cytidine
  modified_base 84: mod_base = OTHER; note = 2'-O-Methyl-adenosine
  modified_base 85: mod_base = OTHER; note = 2'-O-Methyl-cytidine
  modified_base 86: mod_base = OTHER; note = 2'-O-Methyl-cytidine
  modified_base 87: mod_base = OTHER; note = 2'-O-Methyl-guanosine
  modified_base 89: mod_base = OTHER; note = 2'-O-Methyl-guanosine
  modified_base 92: mod_base = OTHER; note = 2'-O-Methyl-guanosine
  modified_base 93: mod_base = OTHER; note = 2'-O-Methyl-guanosine
  modified_base 94: mod_base = OTHER; note = 2'-O-Methyl-uridine
  modified_base 95: mod_base = OTHER; note = 2'-O-Methyl-guanosine
  modified_base 96: mod_base = OTHER; note = 2'-O-Methyl-cytidine
  modified_base 97: mod_base = OTHER; note = 2'-O-Methyl-uridine
  modified_base 98: mod_base = OTHER; note = 2'-O-Methyl-uridine phosphorothioate
  modified_base 99: mod_base = OTHER; note = 2'-O-Methyl-uridine phosphorothioate
  modified_base 100: mod_base = OTHER; note = 2'-O-Methyl-uridine

SEQ ID NO: 2346 - RNA, 100 nt, synthetic construct; identical to SEQ ID NO: 55
  source 1..100: mol_type = other RNA
  modified_base 1: mod_base = OTHER; note = 2'-O-Methyl-cytidine phosphorothioate
  modified_base 2: mod_base = OTHER; note = 2'-O-Methyl-adenosine phosphorothioate
  modified_base 3: mod_base = OTHER; note = 2'-O-Methyl-guanosine phosphorothioate
  modified_base 21: mod_base = OTHER; note = 2'-O-Methyl-guanosine
  modified_base 25: mod_base = OTHER; note = uridine phosphorothioate
  modified_base 28: mod_base = OTHER; note = 2'-O-Methyl-adenosine
  modified_base 29: mod_base = OTHER; note = 2'-O-Methyl-guanosine
  modified_base 30: mod_base = OTHER; note = 2'-O-Methyl-cytidine
  modified_base 31: mod_base = OTHER; note = 2'-O-Methyl-uridine
  modified_base 32: mod_base = OTHER; note = 2'-O-Methyl-adenosine
  modified_base 33: mod_base = OTHER; note = 2'-O-Methyl-guanosine
  modified_base 34: mod_base = OTHER; note = 2'-O-Methyl-adenosine
  modified_base 35: mod_base = OTHER; note = 2'-O-Methyl-adenosine
  modified_base 36: mod_base = OTHER; note = 2'-O-Methyl-adenosine
  modified_base 37: mod_base = OTHER; note = 2'-O-Methyl-uridine
  modified_base 38: mod_base = OTHER; note = 2'-O-Methyl-adenosine
  modified_base 39: mod_base = OTHER; note = 2'-O-Methyl-guanosine
  modified_base 40: mod_base = OTHER; note = 2'-O-Methyl-cytidine
  modified_base 41: mod_base = OTHER; note = 2'-O-Methyl-adenosine
  modified_base 42: mod_base = OTHER; note = 2'-O-Methyl-adenosine
  modified_base 46: mod_base = OTHER; note = 2'-O-Methyl-adenosine
  modified_base 48: mod_base = OTHER; note = 2'-O-Methyl-adenosine
  modified_base 50: mod_base = OTHER; note = 2'-O-Methyl-uridine
  modified_base 52: mod_base = OTHER; note = 2'-O-Methyl-adenosine
  modified_base 53: mod_base = OTHER; note = 2'-O-Methyl-guanosine
  modified_base 54: mod_base = OTHER; note = 2'-O-Methyl-guanosine
  modified_base 57: mod_base = OTHER; note = 2'-O-Methyl-adenosine
  modified_base 61: mod_base = OTHER; note = 2'-O-Methyl-cytidine
  modified_base 64: mod_base = OTHER; note = uridine phosphorothioate
  modified_base 66: mod_base = OTHER; note = 2'-O-Methyl-uridine
  modified_base 67: mod_base = OTHER; note = 2'-O-Methyl-cytidine
  modified_base 70: mod_base = OTHER; note = 2'-O-Methyl-cytidine
  modified_base 71: mod_base = OTHER; note = 2'-O-Methyl-uridine
  modified_base 72: mod_base = OTHER; note = 2'-O-Methyl-uridine
  modified_base 73: mod_base = OTHER; note = 2'-O-Methyl-guanosine
  modified_base 74: mod_base = OTHER; note = 2'-O-Methyl-adenosine
  modified_base 75: mod_base = OTHER; note = 2'-O-Methyl-adenosine
  modified_base 76: mod_base = OTHER; note = 2'-O-Methyl-adenosine
  modified_base 77: mod_base = OTHER; note = 2'-O-Methyl-adenosine
  modified_base 78: mod_base = OTHER; note = 2'-O-Methyl-adenosine
  modified_base 79: mod_base = OTHER; note = 2'-O-Methyl-guanosine
  modified_base 80: mod_base = OTHER; note = 2'-O-Methyl-uridine
  modified_base 82: mod_base = OTHER; note = 2'-O-Methyl-guanosine
  modified_base 83: mod_base = OTHER; note = 2'-O-Methyl-cytidine
  modified_base 84: mod_base = OTHER; note = 2'-O-Methyl-adenosine
  modified_base 85: mod_base = OTHER; note = 2'-O-Methyl-cytidine
  modified_base 86: mod_base = OTHER; note = 2'-O-Methyl-cytidine
  modified_base 87: mod_base = OTHER; note = 2'-O-Methyl-guanosine
  modified_base 89: mod_base = OTHER; note = 2'-O-Methyl-guanosine
  modified_base 92: mod_base = OTHER; note = 2'-O-Methyl-guanosine
  modified_base 93: mod_base = OTHER; note = 2'-O-Methyl-guanosine
  modified_base 94: mod_base = OTHER; note = 2'-O-Methyl-uridine
  modified_base 95: mod_base = OTHER; note = 2'-O-Methyl-guanosine
  modified_base 96: mod_base = OTHER; note = 2'-O-Methyl-cytidine
  modified_base 97: mod_base = OTHER; note = 2'-O-Methyl-uridine
  modified_base 98: mod_base = OTHER; note = 2'-O-Methyl-uridine phosphorothioate
  modified_base 99: mod_base = OTHER; note = 2'-O-Methyl-uridine phosphorothioate
  modified_base 100: mod_base = OTHER; note = 2'-O-Methyl-uridine

SEQ ID NO: 2347 - RNA, 100 nt, synthetic construct; identical to SEQ ID NO: 55
  source 1..100: mol_type = other RNA
  modified_base 1: mod_base = OTHER; note = 2'-O-Methyl-cytidine phosphorothioate
  modified_base 2: mod_base = OTHER; note = 2'-O-Methyl-adenosine phosphorothioate
  modified_base 3: mod_base = OTHER; note = 2'-O-Methyl-guanosine phosphorothioate
  modified_base 21: mod_base = OTHER; note = 2'-O-Methyl-guanosine
  modified_base 25: mod_base = OTHER; note = uridine phosphorothioate
  modified_base 28: mod_base = OTHER; note = 2'-O-Methyl-adenosine
  modified_base 29: mod_base = OTHER; note = 2'-O-Methyl-guanosine
  modified_base 30: mod_base = OTHER; note = 2'-O-Methyl-cytidine
  modified_base 31: mod_base = OTHER; note = 2'-O-Methyl-uridine
  modified_base 32: mod_base = OTHER; note = 2'-O-Methyl-adenosine
  modified_base 34: mod_base = OTHER; note = 2'-O-Methyl-adenosine
  modified_base 35: mod_base = OTHER; note = 2'-O-Methyl-adenosine
  modified_base 36: mod_base = OTHER; note = 2'-O-Methyl-adenosine
  modified_base 37: mod_base = OTHER; note = 2'-O-Methyl-uridine
  modified_base 38: mod_base = OTHER; note = 2'-O-Methyl-adenosine
  modified_base 39: mod_base = OTHER; note = 2'-O-Methyl-guanosine
  modified_base 40: mod_base = OTHER; note = 2'-O-Methyl-cytidine
  modified_base 41: mod_base = OTHER; note = 2'-O-Methyl-adenosine
  modified_base 42: mod_base = OTHER; note = 2'-O-Methyl-adenosine
  modified_base 46: mod_base = OTHER; note = 2'-O-Methyl-adenosine
  modified_base 48: mod_base = OTHER; note = 2'-O-Methyl-adenosine
  modified_base 50: mod_base = OTHER; note = 2'-O-Methyl-uridine
  modified_base 52: mod_base = OTHER; note = 2'-O-Methyl-adenosine
  modified_base 53: mod_base = OTHER; note = 2'-O-Methyl-guanosine
  modified_base 54: mod_base = OTHER; note = 2'-O-Methyl-guanosine
  modified_base 55: mod_base = OTHER; note = 2'-O-Methyl-cytidine
  modified_base 56: mod_base = OTHER; note = 2'-O-Methyl-uridine
  modified_base 57: mod_base = OTHER; note = 2'-O-Methyl-adenosine
  modified_base 60: mod_base = OTHER; note = 2'-O-Methyl-cytidine
  modified_base 61: mod_base = OTHER; note = 2'-O-Methyl-cytidine
  modified_base 64: mod_base = OTHER; note = uridine phosphorothioate
  modified_base 66: mod_base = OTHER; note = 2'-O-Methyl-uridine
  modified_base 67: mod_base = OTHER; note = 2'-O-Methyl-cytidine
  modified_base 70: mod_base = OTHER; note = 2'-O-Methyl-cytidine
  modified_base 71: mod_base = OTHER; note = 2'-O-Methyl-uridine
  modified_base 72: mod_base = OTHER; note = 2'-O-Methyl-uridine
  modified_base 74: mod_base = OTHER; note = 2'-O-Methyl-adenosine
  modified_base 75: mod_base = OTHER; note = 2'-O-Methyl-adenosine
  modified_base 76: mod_base = OTHER; note = 2'-O-Methyl-adenosine
  modified_base 77: mod_base = OTHER; note = 2'-O-Methyl-adenosine
  modified_base 78: mod_base = OTHER; note = 2'-O-Methyl-adenosine
  modified_base 79: mod_base = OTHER; note = 2'-O-Methyl-guanosine
  modified_base 80: mod_base = OTHER; note = 2'-O-Methyl-uridine
  modified_base 82: mod_base = OTHER; note = 2'-O-Methyl-guanosine
  modified_base 83: mod_base = OTHER; note = 2'-O-Methyl-cytidine
  modified_base 84: mod_base = OTHER; note = 2'-O-Methyl-adenosine
  modified_base 85: mod_base = OTHER; note = 2'-O-Methyl-cytidine
  modified_base 86: mod_base = OTHER; note = 2'-O-Methyl-cytidine
  modified_base 87: mod_base = OTHER; note = 2'-O-Methyl-guanosine
  modified_base 89: mod_base = OTHER; note = 2'-O-Methyl-guanosine
  modified_base 92: mod_base = OTHER; note = 2'-O-Methyl-guanosine
  modified_base 93: mod_base = OTHER; note = 2'-O-Methyl-guanosine
  modified_base 94: mod_base = OTHER; note = 2'-O-Methyl-uridine
  modified_base 95: mod_base = OTHER; note = 2'-O-Methyl-guanosine
  modified_base 96: mod_base = OTHER; note = 2'-O-Methyl-cytidine
  modified_base 97: mod_base = OTHER; note = 2'-O-Methyl-uridine
  modified_base 98: mod_base = OTHER; note = 2'-O-Methyl-uridine phosphorothioate
  modified_base 99: mod_base = OTHER; note = 2'-O-Methyl-uridine phosphorothioate
  modified_base 100: mod_base = OTHER; note = 2'-O-Methyl-uridine

SEQ ID NO: 2348 - RNA, 100 nt, synthetic construct; identical to SEQ ID NO: 421
  source 1..100: mol_type = other RNA
  modified_base 1: mod_base = OTHER; note = 2'-O-Methyl-cytidine phosphorothioate
  modified_base 2: mod_base = OTHER; note = 2'-O-Methyl-cytidine phosphorothioate
  modified_base 3: mod_base = OTHER; note = 2'-O-Methyl-cytidine phosphorothioate
  modified_base 21: mod_base = OTHER; note = 2'-O-Methyl-guanosine
  modified_base 25: mod_base = OTHER; note = uridine phosphorothioate
  modified_base 28: mod_base = OTHER; note = 2'-O-Methyl-adenosine
  modified_base 29: mod_base = OTHER; note = 2'-O-Methyl-guanosine
  modified_base 30: mod_base = OTHER; note = 2'-O-Methyl-cytidine
  modified_base 31: mod_base = OTHER; note = 2'-O-Methyl-uridine
  modified_base 32: mod_base = OTHER; note = 2'-O-Methyl-adenosine
  modified_base 33: mod_base = OTHER; note = 2'-O-Methyl-guanosine
  modified_base 34: mod_base = OTHER; note = 2'-O-Methyl-adenosine
  modified_base 35: mod_base = OTHER; note = 2'-O-Methyl-adenosine
  modified_base 36: mod_base = OTHER; note = 2'-O-Methyl-adenosine
  modified_base 37: mod_base = OTHER; note = 2'-O-Methyl-uridine
  modified_base 38: mod_base = OTHER; note = 2'-O-Methyl-adenosine
  modified_base 39: mod_base = OTHER; note = 2'-O-Methyl-guanosine
  modified_base 40: mod_base = OTHER; note = 2'-O-Methyl-cytidine
  modified_base 41: mod_base = OTHER; note = 2'-O-Methyl-adenosine
  modified_base 42: mod_base = OTHER; note = 2'-O-Methyl-adenosine
  modified_base 45: mod_base = OTHER; note = uridine phosphorothioate
  modified_base 46: mod_base = OTHER; note = 2'-O-Methyl-adenosine
  modified_base 48: mod_base = OTHER; note = 2'-O-Methyl-adenosine
  modified_base 50: mod_base = OTHER; note = 2'-O-Methyl-uridine
  modified_base 52: mod_base = OTHER; note = 2'-O-Methyl-adenosine
  modified_base 53: mod_base = OTHER; note = 2'-O-Methyl-guanosine
  modified_base 54: mod_base = OTHER; note = 2'-O-Methyl-guanosine
  modified_base 55: mod_base = OTHER; note = 2'-O-Methyl-cytidine
  modified_base 56: mod_base = OTHER; note = 2'-O-Methyl-uridine
  modified_base 57: mod_base = OTHER; note = 2'-O-Methyl-adenosine
  modified_base 60: mod_base = OTHER; note = 2'-O-Methyl-cytidine
  modified_base 61: mod_base = OTHER; note = 2'-O-Methyl-cytidine
  modified_base 64: mod_base = OTHER; note = uridine phosphorothioate
  modified_base 66: mod_base = OTHER; note = 2'-O-Methyl-uridine
  modified_base 67: mod_base = OTHER; note = 2'-O-Methyl-cytidine
  modified_base 70: mod_base = OTHER; note = 2'-O-Methyl-cytidine
  modified_base 71: mod_base = OTHER; note = 2'-O-Methyl-uridine
  modified_base 72: mod_base = OTHER; note = 2'-O-Methyl-uridine
  modified_base 73: mod_base = OTHER; note = 2'-O-Methyl-guanosine
  modified_base 74: mod_base = OTHER; note = 2'-O-Methyl-adenosine
  modified_base 75: mod_base = OTHER; note = 2'-O-Methyl-adenosine
  modified_base 76: mod_base = OTHER; note = 2'-O-Methyl-adenosine
  modified_base 77: mod_base = OTHER; note = 2'-O-Methyl-adenosine
  modified_base 78: mod_base = OTHER; note = 2'-O-Methyl-adenosine
  modified_base 79: mod_base = OTHER; note = 2'-O-Methyl-guanosine
  modified_base 80: mod_base = OTHER; note = 2'-O-Methyl-uridine
  modified_base 81: mod_base = OTHER; note = 2'-O-Methyl-guanosine
  modified_base 83: mod_base = OTHER; note = 2'-O-Methyl-cytidine
  modified_base 84: mod_base = OTHER; note = 2'-O-Methyl-adenosine
  modified_base 85: mod_base = OTHER; note = 2'-O-Methyl-cytidine
  modified_base 86: mod_base = OTHER; note = 2'-O-Methyl-cytidine
  modified_base 87: mod_base = OTHER; note = 2'-O-Methyl-guanosine
  modified_base 88: mod_base = OTHER; note = 2'-O-Methyl-adenosine
  modified_base 89: mod_base = OTHER; note = 2'-O-Methyl-guanosine
  modified_base 90: mod_base = OTHER; note = 2'-O-Methyl-uridine
  modified_base 91: mod_base = OTHER; note = 2'-O-Methyl-cytidine
  modified_base 92: mod_base = OTHER; note = 2'-O-Methyl-guanosine
  modified_base 93: mod_base = OTHER; note = 2'-O-Methyl-guanosine
  modified_base 94: mod_base = OTHER; note = 2'-O-Methyl-uridine
  modified_base 95: mod_base = OTHER; note = 2'-O-Methyl-guanosine
  modified_base 96: mod_base = OTHER; note = 2'-O-Methyl-cytidine
  modified_base 97: mod_base = OTHER; note = 2'-O-Methyl-uridine
  modified_base 98: mod_base = OTHER; note = 2'-O-Methyl-uridine phosphorothioate
  modified_base 99: mod_base = OTHER; note = 2'-O-Methyl-uridine phosphorothioate
  modified_base 100: mod_base = OTHER; note = 2'-O-Methyl-uridine

SEQ ID NO: 2349 - RNA, 100 nt, synthetic construct; identical to SEQ ID NO: 421
  source 1..100: mol_type = other RNA
  modified_base 1: mod_base = OTHER; note = 2'-O-Methyl-cytidine phosphorothioate
  modified_base 2: mod_base = OTHER; note = 2'-O-Methyl-cytidine phosphorothioate
  modified_base 3: mod_base = OTHER; note = 2'-O-Methyl-cytidine phosphorothioate
  modified_base 21: mod_base = OTHER; note = 2'-O-Methyl-guanosine
  modified_base 25: mod_base = OTHER; note = uridine phosphorothioate
  modified_base 28: mod_base = OTHER; note = 2'-O-Methyl-adenosine
  modified_base 29: mod_base = OTHER; note = 2'-O-Methyl-guanosine
  modified_base 30: mod_base = OTHER; note = 2'-O-Methyl-cytidine
  modified_base 31: mod_base = OTHER; note = 2'-O-Methyl-uridine
  modified_base 32: mod_base = OTHER; note = 2'-O-Methyl-adenosine
  modified_base 34: mod_base = OTHER; note = 2'-O-Methyl-adenosine
  modified_base 35: mod_base = OTHER; note = 2'-O-Methyl-adenosine
  modified_base 36: mod_base = OTHER; note = 2'-O-Methyl-adenosine
  modified_base 37: mod_base = OTHER; note = 2'-O-Methyl-uridine
  modified_base 38: mod_base = OTHER; note = 2'-O-Methyl-adenosine
  modified_base 39: mod_base = OTHER; note = 2'-O-Methyl-guanosine
  modified_base 40: mod_base = OTHER; note = 2'-O-Methyl-cytidine
  modified_base 41: mod_base = OTHER; note = 2'-O-Methyl-adenosine
  modified_base 42: mod_base = OTHER; note = 2'-O-Methyl-adenosine
  modified_base 45: mod_base = OTHER; note = uridine phosphorothioate
  modified_base 46: mod_base = OTHER; note = 2'-O-Methyl-adenosine
  modified_base 48: mod_base = OTHER; note = 2'-O-Methyl-adenosine
  modified_base 50: mod_base = OTHER; note = 2'-O-Methyl-uridine
  modified_base 52: mod_base = OTHER; note = 2'-O-Methyl-adenosine
  modified_base 53: mod_base = OTHER; note = 2'-O-Methyl-guanosine
  modified_base 54: mod_base = OTHER; note = 2'-O-Methyl-guanosine
  modified_base 55: mod_base = OTHER; note = 2'-O-Methyl-cytidine
  modified_base 56: mod_base = OTHER; note = 2'-O-Methyl-uridine
  modified_base 57: mod_base = OTHER; note = 2'-O-Methyl-adenosine
  modified_base 60: mod_base = OTHER; note = 2'-O-Methyl-cytidine
  modified_base 61: mod_base = OTHER; note = 2'-O-Methyl-cytidine
  modified_base 64: mod_base = OTHER; note = uridine phosphorothioate
  modified_base 66: mod_base = OTHER; note = 2'-O-Methyl-uridine
  modified_base 67: mod_base = OTHER; note = 2'-O-Methyl-cytidine
  modified_base 70: mod_base = OTHER; note = 2'-O-Methyl-cytidine
  modified_base 71: mod_base = OTHER; note = 2'-O-Methyl-uridine
  modified_base 72: mod_base = OTHER; note = 2'-O-Methyl-uridine
  modified_base 74: mod_base = OTHER; note = 2'-O-Methyl-adenosine
  modified_base 75: mod_base = OTHER; note = 2'-O-Methyl-adenosine
  modified_base 76: mod_base = OTHER; note = 2'-O-Methyl-adenosine
  modified_base 77: mod_base = OTHER; note = 2'-O-Methyl-adenosine
  modified_base 78: mod_base = OTHER; note = 2'-O-Methyl-adenosine
  modified_base 79: mod_base = OTHER; note = 2'-O-Methyl-guanosine
  modified_base 80: mod_base = OTHER; note = 2'-O-Methyl-uridine
  modified_base 81: mod_base = OTHER; note = 2'-O-Methyl-guanosine
  modified_base 83: mod_base = OTHER; note = 2'-O-Methyl-cytidine
  modified_base 84: mod_base = OTHER; note = 2'-O-Methyl-adenosine
  modified_base 85: mod_base = OTHER; note = 2'-O-Methyl-cytidine
  modified_base 86: mod_base = OTHER; note = 2'-O-Methyl-cytidine
  modified_base 87: mod_base = OTHER; note = 2'-O-Methyl-guanosine
  modified_base 88: mod_base = OTHER; note = 2'-O-Methyl-adenosine
  modified_base 89: mod_base = OTHER; note = 2'-O-Methyl-guanosine
  modified_base 90: mod_base = OTHER; note = 2'-O-Methyl-uridine
  modified_base 91: mod_base = OTHER; note = 2'-O-Methyl-cytidine
  modified_base 92: mod_base = OTHER; note = 2'-O-Methyl-guanosine
  modified_base 93: mod_base = OTHER; note = 2'-O-Methyl-guanosine
  modified_base 94: mod_base = OTHER; note = 2'-O-Methyl-uridine
  modified_base 95: mod_base = OTHER; note = 2'-O-Methyl-guanosine
  modified_base 96: mod_base = OTHER; note = 2'-O-Methyl-cytidine
  modified_base 97: mod_base = OTHER; note = 2'-O-Methyl-uridine
  modified_base 98: mod_base = OTHER; note = 2'-O-Methyl-uridine phosphorothioate
  modified_base 99: mod_base = OTHER; note = 2'-O-Methyl-uridine phosphorothioate
  modified_base 100: mod_base = OTHER; note = 2'-O-Methyl-uridine

SEQ ID NO: 2350 - RNA, 100 nt, synthetic construct; identical to SEQ ID NO: 422
  source 1..100: mol_type = other RNA
  modified_base 1: mod_base = OTHER; note = 2'-O-Methyl-guanosine phosphorothioate
  modified_base 2: mod_base = OTHER; note = 2'-O-Methyl-adenosine phosphorothioate
  modified_base 3: mod_base = OTHER; note = 2'-O-Methyl-guanosine phosphorothioate
  modified_base 21: mod_base = OTHER; note = 2'-O-Methyl-guanosine
  modified_base 25: mod_base = OTHER; note = uridine phosphorothioate
  modified_base 28: mod_base = OTHER; note = 2'-O-Methyl-adenosine
  modified_base 29: mod_base = OTHER; note = 2'-O-Methyl-guanosine
  modified_base 30: mod_base = OTHER; note = 2'-O-Methyl-cytidine
  modified_base 31: mod_base = OTHER; note = 2'-O-Methyl-uridine
  modified_base 32: mod_base = OTHER; note = 2'-O-Methyl-adenosine
  modified_base 33: mod_base = OTHER; note = 2'-O-Methyl-guanosine
  modified_base 34: mod_base = OTHER; note = 2'-O-Methyl-adenosine
  modified_base 35: mod_base = OTHER; note = 2'-O-Methyl-adenosine
  modified_base 36: mod_base = OTHER; note = 2'-O-Methyl-adenosine
  modified_base 37: mod_base = OTHER; note = 2'-O-Methyl-uridine
  modified_base 38: mod_base = OTHER; note = 2'-O-Methyl-adenosine
  modified_base 39: mod_base = OTHER; note = 2'-O-Methyl-guanosine
  modified_base 40: mod_base = OTHER; note = 2'-O-Methyl-cytidine
  modified_base 41: mod_base = OTHER; note = 2'-O-Methyl-adenosine
  modified_base 42: mod_base = OTHER; note = 2'-O-Methyl-adenosine
  modified_base 45: mod_base = OTHER; note = uridine phosphorothioate
  modified_base 46: mod_base = OTHER; note = 2'-O-Methyl-adenosine
  modified_base 48: mod_base = OTHER; note = 2'-O-Methyl-adenosine
  modified_base 50: mod_base = OTHER; note = 2'-O-Methyl-uridine
  modified_base 52: mod_base = OTHER; note = 2'-O-Methyl-adenosine
  modified_base 53: mod_base = OTHER; note = 2'-O-Methyl-guanosine
  modified_base 54: mod_base = OTHER; note = 2'-O-Methyl-guanosine
  modified_base 55: mod_base = OTHER; note = 2'-O-Methyl-cytidine
  modified_base 56: mod_base = OTHER; note = 2'-O-Methyl-uridine
  modified_base 57: mod_base = OTHER; note = 2'-O-Methyl-adenosine
  modified_base 60: mod_base = OTHER; note = 2'-O-Methyl-cytidine
  modified_base 61: mod_base = OTHER; note = 2'-O-Methyl-cytidine
  modified_base 64: mod_base = OTHER; note = uridine phosphorothioate
  modified_base 66: mod_base = OTHER; note = 2'-O-Methyl-uridine
  modified_base 67: mod_base = OTHER; note = 2'-O-Methyl-cytidine
  modified_base 70: mod_base = OTHER; note = 2'-O-Methyl-cytidine
  modified_base 71: mod_base = OTHER; note = 2'-O-Methyl-uridine
  modified_base 72: mod_base = OTHER; note = 2'-O-Methyl-uridine
  modified_base 73: mod_base = OTHER; note = 2'-O-Methyl-guanosine
  modified_base 74: mod_base = OTHER; note = 2'-O-Methyl-adenosine
  modified_base 75: mod_base = OTHER; note = 2'-O-Methyl-adenosine
  modified_base 76: mod_base = OTHER; note = 2'-O-Methyl-adenosine
  modified_base 77: mod_base = OTHER; note = 2'-O-Methyl-adenosine
  modified_base 78: mod_base = OTHER; note = 2'-O-Methyl-adenosine
  modified_base 79: mod_base = OTHER; note = 2'-O-Methyl-guanosine
  modified_base 80: mod_base = OTHER; note = 2'-O-Methyl-uridine
  modified_base 81: mod_base = OTHER; note = 2'-O-Methyl-guanosine
  modified_base 83: mod_base = OTHER; note = 2'-O-Methyl-cytidine
  modified_base 84: mod_base = OTHER; note = 2'-O-Methyl-adenosine
  modified_base 85: mod_base = OTHER; note = 2'-O-Methyl-cytidine
  modified_base 86: mod_base = OTHER; note = 2'-O-Methyl-cytidine
  modified_base 87: mod_base = OTHER; note = 2'-O-Methyl-guanosine
  modified_base 88: mod_base = OTHER; note = 2'-O-Methyl-adenosine
  modified_base 89: mod_base = OTHER; note = 2'-O-Methyl-guanosine
  modified_base 90: mod_base = OTHER; note = 2'-O-Methyl-uridine
  modified_base 91: mod_base = OTHER; note = 2'-O-Methyl-cytidine
  modified_base 92: mod_base = OTHER; note = 2'-O-Methyl-guanosine
  modified_base 93: mod_base = OTHER; note = 2'-O-Methyl-guanosine
  modified_base 94: mod_base = OTHER; note = 2'-O-Methyl-uridine
  modified_base 95: mod_base = OTHER; note = 2'-O-Methyl-guanosine
  modified_base 96: mod_base = OTHER; note = 2'-O-Methyl-cytidine
  modified_base 97: mod_base = OTHER; note = 2'-O-Methyl-uridine
  modified_base 98: mod_base = OTHER; note = 2'-O-Methyl-uridine phosphorothioate
  modified_base 99: mod_base = OTHER; note = 2'-O-Methyl-uridine phosphorothioate
  modified_base 100: mod_base = OTHER; note = 2'-O-Methyl-uridine

SEQ ID NO: 2351 - RNA, 100 nt, synthetic construct; identical to SEQ ID NO: 422
  source 1..100: mol_type = other RNA
  modified_base 1: mod_base = OTHER; note = 2'-O-Methyl-guanosine phosphorothioate
  modified_base 2: mod_base = OTHER; note = 2'-O-Methyl-adenosine phosphorothioate
  modified_base 3: mod_base = OTHER; note = 2'-O-Methyl-guanosine phosphorothioate
  modified_base 21: mod_base = OTHER; note = 2'-O-Methyl-guanosine
  modified_base 25: mod_base = OTHER; note = uridine phosphorothioate
  modified_base 28: mod_base = OTHER; note = 2'-O-Methyl-adenosine
  modified_base 29: mod_base = OTHER; note = 2'-O-Methyl-guanosine
  modified_base 30: mod_base = OTHER; note = 2'-O-Methyl-cytidine
  modified_base 31: mod_base = OTHER; note = 2'-O-Methyl-uridine
  modified_base 32: mod_base = OTHER; note = 2'-O-Methyl-adenosine
  modified_base 34: mod_base = OTHER; note = 2'-O-Methyl-adenosine
  modified_base 35: mod_base = OTHER; note = 2'-O-Methyl-adenosine
  modified_base 36: mod_base = OTHER; note = 2'-O-Methyl-adenosine
  modified_base 37: mod_base = OTHER; note = 2'-O-Methyl-uridine
  modified_base 38: mod_base = OTHER; note = 2'-O-Methyl-adenosine
  modified_base 39: mod_base = OTHER; note = 2'-O-Methyl-guanosine
  modified_base 40: mod_base = OTHER; note = 2'-O-Methyl-cytidine
  modified_base 41: mod_base = OTHER; note = 2'-O-Methyl-adenosine
  modified_base 42: mod_base = OTHER; note = 2'-O-Methyl-adenosine
  modified_base 45: mod_base = OTHER; note = uridine phosphorothioate
  modified_base 46: mod_base = OTHER; note = 2'-O-Methyl-adenosine
  modified_base 48: mod_base = OTHER; note = 2'-O-Methyl-adenosine
  modified_base 50: mod_base = OTHER; note = 2'-O-Methyl-uridine
  modified_base 52: mod_base = OTHER; note = 2'-O-Methyl-adenosine
  modified_base 53: mod_base = OTHER; note = 2'-O-Methyl-guanosine
  modified_base 54: mod_base = OTHER; note = 2'-O-Methyl-guanosine
  modified_base 55: mod_base = OTHER; note = 2'-O-Methyl-cytidine
  modified_base 56: mod_base = OTHER; note = 2'-O-Methyl-uridine
  modified_base 57: mod_base = OTHER; note = 2'-O-Methyl-adenosine
  modified_base 60: mod_base = OTHER; note = 2'-O-Methyl-cytidine
  modified_base 61: mod_base = OTHER; note = 2'-O-Methyl-cytidine
  modified_base 64: mod_base = OTHER; note = uridine phosphorothioate
  modified_base 66: mod_base = OTHER; note = 2'-O-Methyl-uridine
  modified_base 67: mod_base = OTHER; note = 2'-O-Methyl-cytidine
  modified_base 70: mod_base = OTHER; note = 2'-O-Methyl-cytidine
  modified_base 71: mod_base = OTHER; note = 2'-O-Methyl-uridine
  modified_base 72: mod_base = OTHER; note = 2'-O-Methyl-uridine
  modified_base 74: mod_base = OTHER; note = 2'-O-Methyl-adenosine
  modified_base 75: mod_base = OTHER; note = 2'-O-Methyl-adenosine
  modified_base 76: mod_base = OTHER; note = 2'-O-Methyl-adenosine
  modified_base 77: mod_base = OTHER; note = 2'-O-Methyl-adenosine
  modified_base 78: mod_base = OTHER; note = 2'-O-Methyl-adenosine
  modified_base 79: mod_base = OTHER; note = 2'-O-Methyl-guanosine
  modified_base 80: mod_base = OTHER; note = 2'-O-Methyl-uridine
  modified_base 81: mod_base = OTHER; note = 2'-O-Methyl-guanosine
  modified_base 83: mod_base = OTHER; note = 2'-O-Methyl-cytidine
  modified_base 84: mod_base = OTHER; note = 2'-O-Methyl-adenosine
  modified_base 85: mod_base = OTHER; note = 2'-O-Methyl-cytidine
  modified_base 86: mod_base = OTHER; note = 2'-O-Methyl-cytidine
  modified_base 87: mod_base = OTHER; note = 2'-O-Methyl-guanosine
  modified_base 88: mod_base = OTHER; note = 2'-O-Methyl-adenosine
  modified_base 89: mod_base = OTHER; note = 2'-O-Methyl-guanosine
  modified_base 90: mod_base = OTHER; note = 2'-O-Methyl-uridine
  modified_base 91: mod_base = OTHER; note = 2'-O-Methyl-cytidine
  modified_base 92: mod_base = OTHER; note = 2'-O-Methyl-guanosine
  modified_base 93: mod_base = OTHER; note = 2'-O-Methyl-guanosine
  modified_base 94: mod_base = OTHER; note = 2'-O-Methyl-uridine
  modified_base 95: mod_base = OTHER; note = 2'-O-Methyl-guanosine
  modified_base 96: mod_base = OTHER; note = 2'-O-Methyl-cytidine
  modified_base 97: mod_base = OTHER; note = 2'-O-Methyl-uridine
  modified_base 98: mod_base = OTHER; note = 2'-O-Methyl-uridine phosphorothioate
  modified_base 99: mod_base = OTHER; note = 2'-O-Methyl-uridine phosphorothioate
  modified_base 100: mod_base = OTHER; note = 2'-O-Methyl-uridine

SEQ ID NO: 2352 - RNA, 100 nt, synthetic construct; identical to SEQ ID NO: 55
  source 1..100: mol_type = other RNA
  modified_base 1: mod_base = OTHER; note = 2'-O-Methyl-cytidine phosphorothioate
  modified_base 2: mod_base = OTHER; note = 2'-O-Methyl-adenosine phosphorothioate
  modified_base 3: mod_base = OTHER; note = 2'-O-Methyl-guanosine phosphorothioate
  modified_base 21: mod_base = OTHER; note = 2'-O-Methyl-guanosine
  modified_base 25: mod_base = OTHER; note = uridine phosphorothioate
  modified_base 28: mod_base = OTHER; note = 2'-O-Methyl-adenosine
  modified_base 29: mod_base = OTHER; note = 2'-O-Methyl-guanosine
  modified_base 30: mod_base = OTHER; note = 2'-O-Methyl-cytidine
  modified_base 31: mod_base = OTHER; note = 2'-O-Methyl-uridine
  modified_base 32: mod_base = OTHER; note = 2'-O-Methyl-adenosine
  modified_base 33: mod_base = OTHER; note = 2'-O-Methyl-guanosine
  modified_base 34: mod_base = OTHER; note = 2'-O-Methyl-adenosine
  modified_base 35: mod_base = OTHER; note = 2'-O-Methyl-adenosine
  modified_base 36: mod_base = OTHER; note = 2'-O-Methyl-adenosine
  modified_base 37: mod_base = OTHER; note = 2'-O-Methyl-uridine
  modified_base 38: mod_base = OTHER; note = 2'-O-Methyl-adenosine
  modified_base 39: mod_base = OTHER; note = 2'-O-Methyl-guanosine
  modified_base 40: mod_base = OTHER; note = 2'-O-Methyl-cytidine
  modified_base 41: mod_base = OTHER; note = 2'-O-Methyl-adenosine
  modified_base 42: mod_base = OTHER; note = 2'-O-Methyl-adenosine
  modified_base 45: mod_base = OTHER; note = uridine phosphorothioate
  modified_base 46: mod_base = OTHER; note = 2'-O-Methyl-adenosine
  modified_base 48: mod_base = OTHER; note = 2'-O-Methyl-adenosine
  modified_base 50: mod_base = OTHER; note = 2'-O-Methyl-uridine
  modified_base 52: mod_base = OTHER; note = 2'-O-Methyl-adenosine
  modified_base 53: mod_base = OTHER; note = 2'-O-Methyl-guanosine
  modified_base 54: mod_base = OTHER; note = 2'-O-Methyl-guanosine
  modified_base 57: mod_base = OTHER; note = 2'-O-Methyl-adenosine
  modified_base 61: mod_base = OTHER; note = 2'-O-Methyl-cytidine
  modified_base 64: mod_base = OTHER; note = uridine phosphorothioate
  modified_base 66: mod_base = OTHER; note = 2'-O-Methyl-uridine
  modified_base 67: mod_base = OTHER; note = 2'-O-Methyl-cytidine
  modified_base 70: mod_base = OTHER; note = 2'-O-Methyl-cytidine
  modified_base 71: mod_base = OTHER; note = 2'-O-Methyl-uridine
  modified_base 72: mod_base = OTHER; note = 2'-O-Methyl-uridine
  modified_base 74: mod_base = OTHER; note = 2'-O-Methyl-adenosine
  modified_base 75: mod_base = OTHER; note = 2'-O-Methyl-adenosine
  modified_base 76: mod_base = OTHER; note = 2'-O-Methyl-adenosine
  modified_base 77: mod_base = OTHER; note = 2'-O-Methyl-adenosine
  modified_base 78: mod_base = OTHER; note = 2'-O-Methyl-adenosine
  modified_base 79: mod_base = OTHER; note = 2'-O-Methyl-guanosine
  modified_base 80: mod_base = OTHER; note = 2'-O-Methyl-uridine
  modified_base 82: mod_base = OTHER; note = 2'-O-Methyl-guanosine
  modified_base 83: mod_base = OTHER; note = 2'-O-Methyl-cytidine
  modified_base 84: mod_base = OTHER; note = 2'-O-Methyl-adenosine
  modified_base 85: mod_base = OTHER; note = 2'-O-Methyl-cytidine
  modified_base 86: mod_base = OTHER; note = 2'-O-Methyl-cytidine
  modified_base 87: mod_base = OTHER; note = 2'-O-Methyl-guanosine
  modified_base 89: mod_base = OTHER; note = 2'-O-Methyl-guanosine
  modified_base 92: mod_base = OTHER; note = 2'-O-Methyl-guanosine
  modified_base 93: mod_base = OTHER; note = 2'-O-Methyl-guanosine
  modified_base 94: mod_base = OTHER; note = 2'-O-Methyl-uridine
  modified_base 95: mod_base = OTHER; note = 2'-O-Methyl-guanosine
  modified_base 96: mod_base = OTHER; note = 2'-O-Methyl-cytidine
  modified_base 97: mod_base = OTHER; note = 2'-O-Methyl-uridine
  modified_base 98: mod_base = OTHER; note = 2'-O-Methyl-uridine phosphorothioate
  modified_base 99: mod_base = OTHER; note = 2'-O-Methyl-uridine phosphorothioate
  modified_base 100: mod_base = OTHER; note = 2'-O-Methyl-uridine

SEQ ID NO: 2353 - RNA, 100 nt, synthetic construct; identical to SEQ ID NO: 55
  source 1..100: mol_type = other RNA
  modified_base 1: mod_base = OTHER; note = 2'-O-Methyl-cytidine phosphorothioate
  modified_base 2: mod_base = OTHER; note = 2'-O-Methyl-adenosine phosphorothioate
  modified_base 3: mod_base = OTHER; note = 2'-O-Methyl-guanosine phosphorothioate
  modified_base 21: mod_base = OTHER; note = 2'-O-Methyl-guanosine
  modified_base 25: mod_base = OTHER; note = uridine phosphorothioate
  modified_base 28: mod_base = OTHER; note = 2'-O-Methyl-adenosine
  modified_base 29: mod_base = OTHER; note = 2'-O-Methyl-guanosine
  modified_base 30: mod_base = OTHER; note = 2'-O-Methyl-cytidine
  modified_base 31: mod_base = OTHER; note = 2'-O-Methyl-uridine
  modified_base 32: mod_base = OTHER; note = 2'-O-Methyl-adenosine
  modified_base 33: mod_base = OTHER; note = 2'-O-Methyl-guanosine
  modified_base 34: mod_base = OTHER; note = 2'-O-Methyl-adenosine
  modified_base 35: mod_base = OTHER; note = 2'-O-Methyl-adenosine
  modified_base 36: mod_base = OTHER; note = 2'-O-Methyl-adenosine
  modified_base 37: mod_base = OTHER; note = 2'-O-Methyl-uridine
  modified_base 38: mod_base = OTHER; note = 2'-O-Methyl-adenosine
  modified_base 39: mod_base = OTHER; note = 2'-O-Methyl-guanosine
  modified_base 40: mod_base = OTHER; note = 2'-O-Methyl-cytidine
  modified_base 41: mod_base = OTHER; note = 2'-O-Methyl-adenosine
  modified_base 42: mod_base = OTHER; note = 2'-O-Methyl-adenosine
  modified_base 45: mod_base = OTHER; note = uridine phosphorothioate
  modified_base 46: mod_base = OTHER; note = 2'-O-Methyl-adenosine
  modified_base 48: mod_base = OTHER; note = 2'-O-Methyl-adenosine
  modified_base 50: mod_base = OTHER; note = 2'-O-Methyl-uridine
  modified_base 52: mod_base = OTHER; note = 2'-O-Methyl-adenosine
  modified_base 53: mod_base = OTHER; note = 2'-O-Methyl-guanosine
  modified_base 54: mod_base = OTHER; note = 2'-O-Methyl-guanosine
  modified_base 55: mod_base = OTHER; note = 2'-O-Methyl-cytidine
  modified_base 56: mod_base = OTHER; note = 2'-O-Methyl-uridine
  modified_base 57: mod_base = OTHER; note = 2'-O-Methyl-adenosine
  modified_base 60: mod_base = OTHER; note = 2'-O-Methyl-cytidine
  modified_base 61: mod_base = OTHER; note = 2'-O-Methyl-cytidine
  modified_base 64: mod_base = OTHER; note = uridine phosphorothioate
  modified_base 66: mod_base = OTHER; note = 2'-O-Methyl-uridine
  modified_base 67: mod_base = OTHER; note = 2'-O-Methyl-cytidine
  modified_base 70: mod_base = OTHER; note = 2'-O-Methyl-cytidine
  modified_base 71: mod_base = OTHER; note = 2'-O-Methyl-uridine
  modified_base 72: mod_base = OTHER; note = 2'-O-Methyl-uridine
  modified_base 74: mod_base = OTHER; note = 2'-O-Methyl-adenosine
  modified_base 75: mod_base = OTHER; note = 2'-O-Methyl-adenosine
  modified_base 76: mod_base = OTHER; note = 2'-O-Methyl-adenosine
  modified_base 77: mod_base = OTHER; note = 2'-O-Methyl-adenosine
  modified_base 78: mod_base = OTHER; note = 2'-O-Methyl-adenosine
  modified_base 79: mod_base = OTHER; note = 2'-O-Methyl-guanosine
  modified_base 80: mod_base = OTHER; note = 2'-O-Methyl-uridine
  modified_base 82: mod_base = OTHER; note = 2'-O-Methyl-guanosine
  modified_base 83: mod_base = OTHER; note = 2'-O-Methyl-cytidine
  modified_base 84: mod_base = OTHER; note = 2'-O-Methyl-adenosine
  modified_base 85: mod_base = OTHER; note = 2'-O-Methyl-cytidine
  modified_base 86: mod_base = OTHER; note = 2'-O-Methyl-cytidine
  modified_base 87: mod_base = OTHER; note = 2'-O-Methyl-guanosine
  modified_base 89: mod_base = OTHER; note = 2'-O-Methyl-guanosine
  modified_base 92: mod_base = OTHER; note = 2'-O-Methyl-guanosine
  modified_base 93: mod_base = OTHER; note = 2'-O-Methyl-guanosine
  modified_base 94: mod_base = OTHER; note = 2'-O-Methyl-uridine
  modified_base 95: mod_base = OTHER; note = 2'-O-Methyl-guanosine
  modified_base 96: mod_base = OTHER; note = 2'-O-Methyl-cytidine
  modified_base 97: mod_base = OTHER; note = 2'-O-Methyl-uridine
  modified_base 98: mod_base = OTHER; note = 2'-O-Methyl-uridine phosphorothioate
  modified_base 99: mod_base = OTHER; note = 2'-O-Methyl-uridine phosphorothioate
  modified_base 100: mod_base = OTHER; note = 2'-O-Methyl-uridine

SEQ ID NO: 2354 - RNA, 100 nt, synthetic construct; identical to SEQ ID NO: 55
  source 1..100: mol_type = other RNA
  modified_base 1: mod_base = OTHER; note = 2'-O-Methyl-cytidine phosphorothioate
  modified_base 2: mod_base = OTHER; note = 2'-O-Methyl-adenosine phosphorothioate
  modified_base 3: mod_base = OTHER; note = 2'-O-Methyl-guanosine phosphorothioate
  modified_base 21: mod_base = OTHER; note = 2'-O-Methyl-guanosine
  modified_base 25: mod_base = OTHER; note = uridine phosphorothioate
  modified_base 28: mod_base = OTHER; note = 2'-O-Methyl-adenosine
  modified_base 29: mod_base = OTHER; note = 2'-O-Methyl-guanosine
  modified_base 30: mod_base = OTHER; note = 2'-O-Methyl-cytidine
  modified_base 31: mod_base = OTHER; note = 2'-O-Methyl-uridine
  modified_base 32: mod_base = OTHER; note = 2'-O-Methyl-adenosine
  modified_base 33: mod_base = OTHER; note = 2'-O-Methyl-guanosine
  modified_base 34: mod_base = OTHER; note = 2'-O-Methyl-adenosine
  modified_base 35: mod_base = OTHER; note = 2'-O-Methyl-adenosine
  modified_base 36: mod_base = OTHER; note = 2'-O-Methyl-adenosine
  modified_base 37: mod_base = OTHER; note = 2'-O-Methyl-uridine
  modified_base 38: mod_base = OTHER; note = 2'-O-Methyl-adenosine
  modified_base 39: mod_base = OTHER; note = 2'-O-Methyl-guanosine
  modified_base 40: mod_base = OTHER; note = 2'-O-Methyl-cytidine
  modified_base 41: mod_base = OTHER; note = 2'-O-Methyl-adenosine
  modified_base 42: mod_base = OTHER; note = 2'-O-Methyl-adenosine
  modified_base 45: mod_base = OTHER; note = uridine phosphorothioate
  modified_base 46: mod_base = OTHER; note = 2'-O-Methyl-adenosine
  modified_base 48: mod_base = OTHER; note = 2'-O-Methyl-adenosine
  modified_base 50: mod_base = OTHER; note = 2'-O-Methyl-uridine
  modified_base 52: mod_base = OTHER; note = 2'-O-Methyl-adenosine
  modified_base 53: mod_base = OTHER; note = 2'-O-Methyl-guanosine
  modified_base 54: mod_base = OTHER; note = 2'-O-Methyl-guanosine
  modified_base 57: mod_base = OTHER; note = 2'-O-Methyl-adenosine
  modified_base 61: mod_base = OTHER; note = 2'-O-Methyl-cytidine
  modified_base 64: mod_base = OTHER; note = uridine phosphorothioate
  modified_base 66: mod_base = OTHER; note = 2'-O-Methyl-uridine
  modified_base 67: mod_base = OTHER; note = 2'-O-Methyl-cytidine
  modified_base 70: mod_base = OTHER; note = 2'-O-Methyl-cytidine
  modified_base 71: mod_base = OTHER; note = 2'-O-Methyl-uridine
  modified_base 72: mod_base = OTHER; note = 2'-O-Methyl-uridine
  modified_base 73: mod_base = OTHER; note = 2'-O-Methyl-guanosine
  modified_base 74: mod_base = OTHER; note = 2'-O-Methyl-adenosine
  modified_base 75: mod_base = OTHER; note = 2'-O-Methyl-adenosine
  modified_base 76: mod_base = OTHER; note = 2'-O-Methyl-adenosine
  modified_base 77: mod_base = OTHER; note = 2'-O-Methyl-adenosine
  modified_base 78: mod_base = OTHER; note = 2'-O-Methyl-adenosine
  modified_base 79: mod_base = OTHER; note = 2'-O-Methyl-guanosine
  modified_base 80: mod_base = OTHER; note = 2'-O-Methyl-uridine
  modified_base 82: mod_base = OTHER; note = 2'-O-Methyl-guanosine
  modified_base 83: mod_base = OTHER; note = 2'-O-Methyl-cytidine
  modified_base 84: mod_base = OTHER; note = 2'-O-Methyl-adenosine
  modified_base 85: mod_base = OTHER; note = 2'-O-Methyl-cytidine
  modified_base 86: mod_base = OTHER; note = 2'-O-Methyl-cytidine
  modified_base 87: mod_base = OTHER; note = 2'-O-Methyl-guanosine
  modified_base 89: mod_base = OTHER; note = 2'-O-Methyl-guanosine
  modified_base 92: mod_base = OTHER; note = 2'-O-Methyl-guanosine
  modified_base 93: mod_base = OTHER; note = 2'-O-Methyl-guanosine
  modified_base 94: mod_base = OTHER; note = 2'-O-Methyl-uridine
  modified_base 95: mod_base = OTHER; note = 2'-O-Methyl-guanosine
  modified_base 96: mod_base = OTHER; note = 2'-O-Methyl-cytidine
  modified_base 97: mod_base = OTHER; note = 2'-O-Methyl-uridine
  modified_base 98: mod_base = OTHER; note = 2'-O-Methyl-uridine phosphorothioate
  modified_base 99: mod_base = OTHER; note = 2'-O-Methyl-uridine phosphorothioate
  modified_base 100: mod_base = OTHER; note = 2'-O-Methyl-uridine

SEQ ID NO: 2355 - RNA, 100 nt, synthetic construct; identical to SEQ ID NO: 55
  source 1..100: mol_type = other RNA
  modified_base 1: mod_base = OTHER; note = 2'-O-Methyl-cytidine phosphorothioate
  modified_base 2: mod_base = OTHER; note = 2'-O-Methyl-adenosine phosphorothioate
  modified_base 3: mod_base = OTHER; note = 2'-O-Methyl-guanosine phosphorothioate
  modified_base 21: mod_base = OTHER; note = 2'-O-Methyl-guanosine
  modified_base 25: mod_base = OTHER; note = uridine phosphorothioate
  modified_base 28: mod_base = OTHER; note = 2'-O-Methyl-adenosine
  modified_base 29: mod_base = OTHER; note = 2'-O-Methyl-guanosine
  modified_base 30: mod_base = OTHER; note = 2'-O-Methyl-cytidine
  modified_base 31: mod_base = OTHER; note = 2'-O-Methyl-uridine
  modified_base 32: mod_base = OTHER; note = 2'-O-Methyl-adenosine
  modified_base 33: mod_base = OTHER; note = 2'-O-Methyl-guanosine
  modified_base 34: mod_base = OTHER; note = 2'-O-Methyl-adenosine
  modified_base 35: mod_base = OTHER; note = 2'-O-Methyl-adenosine
  modified_base 36: mod_base = OTHER; note = 2'-O-Methyl-adenosine
  modified_base 37: mod_base = OTHER; note = 2'-O-Methyl-uridine
  modified_base 38: mod_base = OTHER; note = 2'-O-Methyl-adenosine
  modified_base 39: mod_base = OTHER; note = 2'-O-Methyl-guanosine
  modified_base 40: mod_base = OTHER; note = 2'-O-Methyl-cytidine
  modified_base 41: mod_base = OTHER; note = 2'-O-Methyl-adenosine
  modified_base 42: mod_base = OTHER; note = 2'-O-Methyl-adenosine
  modified_base 45: mod_base = OTHER; note = uridine phosphorothioate
  modified_base 46: mod_base = OTHER; note = 2'-O-Methyl-adenosine
  modified_base 48: mod_base = OTHER; note = 2'-O-Methyl-adenosine
  modified_base 50: mod_base = OTHER; note = 2'-O-Methyl-uridine
  modified_base 52: mod_base = OTHER; note = 2'-O-Methyl-adenosine
  modified_base 53: mod_base = OTHER; note = 2'-O-Methyl-guanosine
  modified_base 54: mod_base = OTHER; note = 2'-O-Methyl-guanosine
  modified_base 57: mod_base = OTHER; note = 2'-O-Methyl-adenosine
  modified_base 61: mod_base = OTHER; note = 2'-O-Methyl-cytidine
  modified_base 64: mod_base = OTHER; note = uridine phosphorothioate
  modified_base 66: mod_base = OTHER; note = 2'-O-Methyl-uridine
  modified_base 67: mod_base = OTHER; note = 2'-O-Methyl-cytidine
  modified_base 70: mod_base = OTHER; note = 2'-O-Methyl-cytidine
  modified_base 71: mod_base = OTHER; note = 2'-O-Methyl-uridine
  modified_base 72: mod_base = OTHER; note = 2'-O-Methyl-uridine
  modified_base 73: mod_base = OTHER; note = 2'-O-Methyl-guanosine
  modified_base 74: mod_base = OTHER; note = 2'-O-Methyl-adenosine
  modified_base 75: mod_base = OTHER; note = 2'-O-Methyl-adenosine
  modified_base 76: mod_base = OTHER; note = 2'-O-Methyl-adenosine
  modified_base 77: mod_base = OTHER; note = 2'-O-Methyl-adenosine
  modified_base 78: mod_base = OTHER; note = 2'-O-Methyl-adenosine
  modified_base 79: mod_base = OTHER; note = 2'-O-Methyl-guanosine
  modified_base 80: mod_base = OTHER; note = 2'-O-Methyl-uridine
  modified_base 82: mod_base = OTHER; note = 2'-O-Methyl-guanosine
  modified_base 83: mod_base = OTHER; note = 2'-O-Methyl-cytidine
  modified_base 84: mod_base = OTHER; note = 2'-O-Methyl-adenosine
  modified_base 85: mod_base = OTHER; note = 2'-O-Methyl-cytidine
  modified_base 86: mod_base = OTHER; note = 2'-O-Methyl-cytidine
  modified_base 87: mod_base = OTHER; note = 2'-O-Methyl-guanosine
  modified_base 89: mod_base = OTHER; note = 2'-O-Methyl-guanosine
  modified_base 91: mod_base = OTHER; note = 2'-O-Methyl-cytidine
  modified_base 92: mod_base = OTHER; note = 2'-O-Methyl-guanosine
  modified_base 93: mod_base = OTHER; note = 2'-O-Methyl-guanosine
  modified_base 94: mod_base = OTHER; note = 2'-O-Methyl-uridine
  modified_base 95: mod_base = OTHER; note = 2'-O-Methyl-guanosine
  modified_base 96: mod_base = OTHER; note = 2'-O-Methyl-cytidine
  modified_base 97: mod_base = OTHER; note = 2'-O-Methyl-uridine
  modified_base 98: mod_base = OTHER; note = 2'-O-Methyl-uridine phosphorothioate
  modified_base 99: mod_base = OTHER; note = 2'-O-Methyl-uridine phosphorothioate
  modified_base 100: mod_base = OTHER; note = 2'-O-Methyl-uridine

SEQ ID NO: 2356 - RNA, 100 nt, synthetic construct; identical to SEQ ID NO: 55
  source 1..100: mol_type = other RNA
  modified_base 1: mod_base = OTHER; note = 2'-O-Methyl-cytidine phosphorothioate
  modified_base 2: mod_base = OTHER; note = 2'-O-Methyl-adenosine phosphorothioate
  modified_base 3: mod_base = OTHER; note = 2'-O-Methyl-guanosine phosphorothioate
  modified_base 21: mod_base = OTHER; note = 2'-O-Methyl-guanosine
  modified_base 25: mod_base = OTHER; note = uridine phosphorothioate
  modified_base 28: mod_base = OTHER; note = 2'-O-Methyl-adenosine
  modified_base 29: mod_base = OTHER; note = 2'-O-Methyl-guanosine
  modified_base 30: mod_base = OTHER; note = 2'-O-Methyl-cytidine
  modified_base 31: mod_base = OTHER; note = 2'-O-Methyl-uridine
  modified_base 32: mod_base = OTHER; note = 2'-O-Methyl-adenosine
  modified_base 34: mod_base = OTHER; note = 2'-O-Methyl-adenosine
  modified_base 35: mod_base = OTHER; note = 2'-O-Methyl-adenosine
  modified_base 36: mod_base = OTHER; note = 2'-O-Methyl-adenosine
  modified_base 37: mod_base = OTHER; note = 2'-O-Methyl-uridine
  modified_base 38: mod_base = OTHER; note = 2'-O-Methyl-adenosine
  modified_base 39: mod_base = OTHER; note = 2'-O-Methyl-guanosine
  modified_base 40: mod_base = OTHER; note = 2'-O-Methyl-cytidine
  modified_base 41: mod_base = OTHER; note = 2'-O-Methyl-adenosine
  modified_base 42: mod_base = OTHER; note = 2'-O-Methyl-adenosine
  modified_base 45: mod_base = OTHER; note = uridine phosphorothioate
  modified_base 46: mod_base = OTHER; note = 2'-O-Methyl-adenosine
  modified_base 48: mod_base = OTHER; note = 2'-O-Methyl-adenosine
  modified_base 50: mod_base = OTHER; note = 2'-O-Methyl-uridine
  modified_base 52: mod_base = OTHER; note = 2'-O-Methyl-adenosine
  modified_base 53: mod_base = OTHER; note = 2'-O-Methyl-guanosine
  modified_base 54: mod_base = OTHER; note = 2'-O-Methyl-guanosine
  modified_base 57: mod_base = OTHER; note = 2'-O-Methyl-adenosine
  modified_base 61: mod_base = OTHER; note = 2'-O-Methyl-cytidine
  modified_base 64: mod_base = OTHER; note = uridine phosphorothioate
  modified_base 66: mod_base = OTHER; note = 2'-O-Methyl-uridine
  modified_base 67: mod_base = OTHER; note = 2'-O-Methyl-cytidine
  modified_base 70: mod_base = OTHER; note = 2'-O-Methyl-cytidine
  modified_base 71: mod_base = OTHER; note = 2'-O-Methyl-uridine
  modified_base 72: mod_base = OTHER; note = 2'-O-Methyl-uridine
  modified_base 73: mod_base = OTHER; note = 2'-O-Methyl-guanosine
  modified_base 74: mod_base = OTHER; note = 2'-O-Methyl-adenosine
  modified_base 75: mod_base = OTHER; note = 2'-O-Methyl-adenosine
  modified_base 76: mod_base = OTHER; note = 2'-O-Methyl-adenosine
  modified_base 77: mod_base = OTHER; note = 2'-O-Methyl-adenosine
  modified_base 78: mod_base = OTHER; note = 2'-O-Methyl-adenosine
  modified_base 79: mod_base = OTHER; note = 2'-O-Methyl-guanosine
  modified_base 80: mod_base = OTHER; note = 2'-O-Methyl-uridine
  modified_base 82: mod_base = OTHER; note = 2'-O-Methyl-guanosine
  modified_base 83: mod_base = OTHER; note = 2'-O-Methyl-cytidine
  modified_base 84: mod_base = OTHER; note = 2'-O-Methyl-adenosine
  modified_base 85: mod_base = OTHER; note = 2'-O-Methyl-cytidine
  modified_base 86: mod_base = OTHER; note = 2'-O-Methyl-cytidine
  modified_base 87: mod_base = OTHER; note = 2'-O-Methyl-guanosine
  modified_base 89: mod_base = OTHER; note = 2'-O-Methyl-guanosine
  modified_base 92: mod_base = OTHER; note = 2'-O-Methyl-guanosine
  modified_base 93: mod_base = OTHER; note = 2'-O-Methyl-guanosine
  modified_base 94: mod_base = OTHER; note = 2'-O-Methyl-uridine
  modified_base 95: mod_base = OTHER; note = 2'-O-Methyl-guanosine
  modified_base 96: mod_base = OTHER; note = 2'-O-Methyl-cytidine
  modified_base 97: mod_base = OTHER; note = 2'-O-Methyl-uridine
  modified_base 98: mod_base = OTHER; note = 2'-O-Methyl-uridine phosphorothioate
  modified_base 99: mod_base = OTHER; note = 2'-O-Methyl-uridine phosphorothioate
  modified_base 100: mod_base = OTHER; note = 2'-O-Methyl-uridine

SEQ ID NO: 2357 - RNA, 100 nt, synthetic construct; identical to SEQ ID NO: 55
  source 1..100: mol_type = other RNA
  modified_base 1: mod_base = OTHER; note = 2'-O-Methyl-cytidine phosphorothioate
  modified_base 2: mod_base = OTHER; note = 2'-O-Methyl-adenosine phosphorothioate
  modified_base 3: mod_base = OTHER; note = 2'-O-Methyl-guanosine phosphorothioate
  modified_base 21: mod_base = OTHER; note = 2'-O-Methyl-guanosine
  modified_base 25: mod_base = OTHER; note = uridine phosphorothioate
  modified_base 28: mod_base = OTHER; note = 2'-O-Methyl-adenosine
  modified_base 29: mod_base = OTHER; note = 2'-O-Methyl-guanosine
  modified_base 30: mod_base = OTHER; note = 2'-O-Methyl-cytidine
  modified_base 31: mod_base = OTHER; note = 2'-O-Methyl-uridine
  modified_base 32: mod_base = OTHER; note = 2'-O-Methyl-adenosine
  modified_base 34: mod_base = OTHER; note = 2'-O-Methyl-adenosine
  modified_base 35: mod_base = OTHER; note = 2'-O-Methyl-adenosine
  modified_base 36: mod_base = OTHER; note = 2'-O-Methyl-adenosine
  modified_base 37: mod_base = OTHER; note = 2'-O-Methyl-uridine
  modified_base 38: mod_base = OTHER; note = 2'-O-Methyl-adenosine
  modified_base 39: mod_base = OTHER; note = 2'-O-Methyl-guanosine
  modified_base 40: mod_base = OTHER; note = 2'-O-Methyl-cytidine
  modified_base 41: mod_base = OTHER; note = 2'-O-Methyl-adenosine
  modified_base 42: mod_base = OTHER; note = 2'-O-Methyl-adenosine
  modified_base 45: mod_base = OTHER; note = uridine phosphorothioate
  modified_base 46: mod_base = OTHER; note = 2'-O-Methyl-adenosine
  modified_base 48: mod_base = OTHER; note = 2'-O-Methyl-adenosine
  modified_base 50: mod_base = OTHER; note = 2'-O-Methyl-uridine
  modified_base 52: mod_base = OTHER; note = 2'-O-Methyl-adenosine
  modified_base 53: mod_base = OTHER; note = 2'-O-Methyl-guanosine
  modified_base 54: mod_base = OTHER; note = 2'-O-Methyl-guanosine
  modified_base 57: mod_base = OTHER; note = 2'-O-Methyl-adenosine
  modified_base 61: mod_base = OTHER; note = 2'-O-Methyl-cytidine
  modified_base 64: mod_base = OTHER; note = uridine phosphorothioate
  modified_base 66: mod_base = OTHER; note = 2'-O-Methyl-uridine
  modified_base 67: mod_base = OTHER; note = 2'-O-Methyl-cytidine
  modified_base 70: mod_base = OTHER; note = 2'-O-Methyl-cytidine
  modified_base 71: mod_base = OTHER; note = 2'-O-Methyl-uridine
  modified_base 72: mod_base = OTHER; note = 2'-O-Methyl-uridine
  modified_base 73: mod_base = OTHER; note = 2'-O-Methyl-guanosine
  modified_base 74: mod_base = OTHER; note = 2'-O-Methyl-adenosine
  modified_base 75: mod_base = OTHER; note = 2'-O-Methyl-adenosine
  modified_base 76: mod_base = OTHER; note = 2'-O-Methyl-adenosine
  modified_base 77: mod_base = OTHER; note = 2'-O-Methyl-adenosine
  modified_base 78: mod_base = OTHER; note = 2'-O-Methyl-adenosine
  modified_base 79: mod_base = OTHER; note = 2'-O-Methyl-guanosine
  modified_base 80: mod_base = OTHER; note = 2'-O-Methyl-uridine
  modified_base 82: mod_base = OTHER; note = 2'-O-Methyl-guanosine
  modified_base 83: mod_base = OTHER; note = 2'-O-Methyl-cytidine
  modified_base 84: mod_base = OTHER; note = 2'-O-Methyl-adenosine
  modified_base 85: mod_base = OTHER; note = 2'-O-Methyl-cytidine
  modified_base 86: mod_base = OTHER; note = 2'-O-Methyl-cytidine
  modified_base 87: mod_base = OTHER; note = 2'-O-Methyl-guanosine
  modified_base 89: mod_base = OTHER; note = 2'-O-Methyl-guanosine
  modified_base 91: mod_base = OTHER; note = 2'-O-Methyl-cytidine
  modified_base 92: mod_base = OTHER; note = 2'-O-Methyl-guanosine
  modified_base 93: mod_base = OTHER; note = 2'-O-Methyl-guanosine
  modified_base 94: mod_base = OTHER; note = 2'-O-Methyl-uridine
  modified_base 95: mod_base = OTHER; note = 2'-O-Methyl-guanosine
  modified_base 96: mod_base = OTHER; note = 2'-O-Methyl-cytidine
  modified_base 97: mod_base = OTHER; note = 2'-O-Methyl-uridine
  modified_base 98: mod_base = OTHER; note = 2'-O-Methyl-uridine phosphorothioate
  modified_base 99: mod_base = OTHER; note = 2'-O-Methyl-uridine phosphorothioate
  modified_base 100: mod_base = OTHER; note = 2'-O-Methyl-uridine

SEQ ID NO: 2358 - RNA, 100 nt, synthetic construct; identical to SEQ ID NO: 55
  source 1..100: mol_type = other RNA
  modified_base 1: mod_base = OTHER; note = 2'-O-Methyl-cytidine phosphorothioate
  modified_base 2: mod_base = OTHER; note = 2'-O-Methyl-adenosine phosphorothioate
  modified_base 3: mod_base = OTHER; note = 2'-O-Methyl-guanosine phosphorothioate
  modified_base 21: mod_base = OTHER; note = 2'-O-Methyl-guanosine
  modified_base 25: mod_base = OTHER; note = uridine phosphorothioate
  modified_base 28: mod_base = OTHER; note = 2'-O-Methyl-adenosine
  modified_base 29: mod_base = OTHER; note = 2'-O-Methyl-guanosine
  modified_base 30: mod_base = OTHER; note = 2'-O-Methyl-cytidine
  modified_base 31: mod_base = OTHER; note = 2'-O-Methyl-uridine
  modified_base 32: mod_base = OTHER; note = 2'-O-Methyl-adenosine
  modified_base 34: mod_base = OTHER; note = 2'-O-Methyl-adenosine
  modified_base 35: mod_base = OTHER; note = 2'-O-Methyl-adenosine
  modified_base 36: mod_base = OTHER; note = 2'-O-Methyl-adenosine
  modified_base 37: mod_base = OTHER; note = 2'-O-Methyl-uridine
  modified_base 38: mod_base = OTHER; note = 2'-O-Methyl-adenosine
  modified_base 39: mod_base = OTHER; note = 2'-O-Methyl-guanosine
  modified_base 40: mod_base = OTHER; note = 2'-O-Methyl-cytidine
  modified_base 41: mod_base = OTHER; note = 2'-O-Methyl-adenosine
  modified_base 42: mod_base = OTHER; note = 2'-O-Methyl-adenosine
  modified_base 45: mod_base = OTHER; note = uridine phosphorothioate
  modified_base 46: mod_base = OTHER; note = 2'-O-Methyl-adenosine
  modified_base 48: mod_base = OTHER; note = 2'-O-Methyl-adenosine
  modified_base 50: mod_base = OTHER; note = 2'-O-Methyl-uridine
  modified_base 52: mod_base = OTHER; note = 2'-O-Methyl-adenosine
  modified_base 53: mod_base = OTHER; note = 2'-O-Methyl-guanosine
  modified_base 54: mod_base = OTHER; note = 2'-O-Methyl-guanosine
  modified_base 55: mod_base = OTHER; note = 2'-O-Methyl-cytidine
  modified_base 56: mod_base = OTHER; note = 2'-O-Methyl-uridine
  modified_base 57: mod_base = OTHER; note = 2'-O-Methyl-adenosine
  modified_base 60: mod_base = OTHER; note = 2'-O-Methyl-cytidine
  modified_base 61: mod_base = OTHER; note = 2'-O-Methyl-cytidine
  modified_base 64: mod_base = OTHER; note = uridine phosphorothioate
  modified_base 66: mod_base = OTHER; note = 2'-O-Methyl-uridine
  modified_base 67: mod_base = OTHER; note = 2'-O-Methyl-cytidine
  modified_base 70: mod_base = OTHER; note = 2'-O-Methyl-cytidine
  modified_base 71: mod_base = OTHER; note = 2'-O-Methyl-uridine
  modified_base 72: mod_base = OTHER; note = 2'-O-Methyl-uridine
  modified_base 74: mod_base = OTHER; note = 2'-O-Methyl-adenosine
  modified_base 75: mod_base = OTHER; note = 2'-O-Methyl-adenosine
  modified_base 76: mod_base = OTHER; note = 2'-O-Methyl-adenosine
  modified_base 77: mod_base = OTHER; note = 2'-O-Methyl-adenosine
  modified_base 78: mod_base = OTHER; note = 2'-O-Methyl-adenosine
  modified_base 79: mod_base = OTHER; note = 2'-O-Methyl-guanosine
  modified_base 80: mod_base = OTHER; note = 2'-O-Methyl-uridine
  modified_base 82: mod_base = OTHER; note = 2'-O-Methyl-guanosine
  modified_base 83: mod_base = OTHER; note = 2'-O-Methyl-cytidine
  modified_base 84: mod_base = OTHER; note = 2'-O-Methyl-adenosine
  modified_base 85: mod_base = OTHER; note = 2'-O-Methyl-cytidine
  modified_base 86: mod_base = OTHER; note = 2'-O-Methyl-cytidine
  modified_base 87: mod_base = OTHER; note = 2'-O-Methyl-guanosine
  modified_base 89: mod_base = OTHER; note = 2'-O-Methyl-guanosine
  modified_base 92: mod_base = OTHER; note = 2'-O-Methyl-guanosine
  modified_base 93: mod_base = OTHER; note = 2'-O-Methyl-guanosine
  modified_base 94: mod_base = OTHER; note = 2'-O-Methyl-uridine
  modified_base 95: mod_base = OTHER; note = 2'-O-Methyl-guanosine
  modified_base 96: mod_base = OTHER; note = 2'-O-Methyl-cytidine
  modified_base 97: mod_base = OTHER; note = 2'-O-Methyl-uridine
  modified_base 98: mod_base = OTHER; note = 2'-O-Methyl-uridine phosphorothioate
  modified_base 99: mod_base = OTHER; note = 2'-O-Methyl-uridine phosphorothioate
  modified_base 100: mod_base = OTHER; note = 2'-O-Methyl-uridine

SEQ ID NO: 2359 - RNA, 100 nt, synthetic construct; identical to SEQ ID NO: 422
  source 1..100: mol_type = other RNA
  modified_base 1: mod_base = OTHER; note = 2'-O-Methyl-guanosine phosphorothioate
  modified_base 2: mod_base = OTHER; note = 2'-O-Methyl-adenosine phosphorothioate
  modified_base 3: mod_base = OTHER; note = 2'-O-Methyl-guanosine
  modified_base 21: mod_base = OTHER; note = 2'-O-Methyl-guanosine
  modified_base 28: mod_base = OTHER; note = 2'-O-Methyl-adenosine
  modified_base 29: mod_base = OTHER; note = 2'-O-Methyl-guanosine
  modified_base 30: mod_base = OTHER; note = 2'-O-Methyl-cytidine
  modified_base 31: mod_base = OTHER; note = 2'-O-Methyl-uridine
  modified_base 32: mod_base = OTHER; note = 2'-O-Methyl-adenosine
  modified_base 33: mod_base = OTHER; note = 2'-O-Methyl-guanosine
  modified_base 34: mod_base = OTHER; note = 2'-O-Methyl-adenosine
  modified_base 35: mod_base = OTHER; note = 2'-O-Methyl-adenosine
  modified_base 36: mod_base = OTHER; note = 2'-O-Methyl-adenosine
  modified_base 37: mod_base = OTHER; note = 2'-O-Methyl-uridine
  modified_base 38: mod_base = OTHER; note = 2'-O-Methyl-adenosine
  modified_base 39: mod_base = OTHER; note = 2'-O-Methyl-guanosine
  modified_base 40: mod_base = OTHER; note = 2'-O-Methyl-cytidine
  modified_base 41: mod_base = OTHER; note = 2'-O-Methyl-adenosine
  modified_base 42: mod_base = OTHER; note = 2'-O-Methyl-adenosine
  modified_base 46: mod_base = OTHER; note = 2'-O-Methyl-adenosine
  modified_base 48: mod_base = OTHER; note = 2'-O-Methyl-adenosine
  modified_base 50: mod_base = OTHER; note = 2'-O-Methyl-uridine
  modified_base 52: mod_base = OTHER; note = 2'-O-Methyl-adenosine
  modified_base 53: mod_base = OTHER; note = 2'-O-Methyl-guanosine
  modified_base 54: mod_base = OTHER; note = 2'-O-Methyl-guanosine
  modified_base 55: mod_base = OTHER; note = 2'-O-Methyl-cytidine
  modified_base 56: mod_base = OTHER; note = 2'-O-Methyl-uridine
  modified_base 57: mod_base = OTHER; note = 2'-O-Methyl-adenosine
  modified_base 60: mod_base = OTHER; note = 2'-O-Methyl-cytidine
  modified_base 61: mod_base = OTHER; note = 2'-O-Methyl-cytidine
  modified_base 64: mod_base = OTHER; note = uridine phosphorothioate
  modified_base 66: mod_base = OTHER; note = 2'-O-Methyl-uridine
  modified_base 67: mod_base = OTHER; note = 2'-O-Methyl-cytidine
  modified_base 70: mod_base = OTHER; note = 2'-O-Methyl-cytidine
  modified_base 71: mod_base = OTHER; note = 2'-O-Methyl-uridine
  modified_base 72: mod_base = OTHER; note = 2'-O-Methyl-uridine
  modified_base 73: mod_base = OTHER; note = 2'-O-Methyl-guanosine
  modified_base 74: mod_base = OTHER; note = 2'-O-Methyl-adenosine
  modified_base 75: mod_base = OTHER; note = 2'-O-Methyl-adenosine
  modified_base 76: mod_base = OTHER; note = 2'-O-Methyl-adenosine
  modified_base 77: mod_base = OTHER; note = 2'-O-Methyl-adenosine
  modified_base 78: mod_base = OTHER; note = 2'-O-Methyl-adenosine
  modified_base 79: mod_base = OTHER; note = 2'-O-Methyl-guanosine
  modified_base 80: mod_base = OTHER; note = 2'-O-Methyl-uridine
  modified_base 81: mod_base = OTHER; note = 2'-O-Methyl-guanosine
  modified_base 83: mod_base = OTHER; note = 2'-O-Methyl-cytidine
  modified_base 84: mod_base = OTHER; note = 2'-O-Methyl-adenosine
  modified_base 85: mod_base = OTHER; note = 2'-O-Methyl-cytidine
  modified_base 86: mod_base = OTHER; note = 2'-O-Methyl-cytidine
  modified_base 87: mod_base = OTHER; note = 2'-O-Methyl-guanosine
  modified_base 88: mod_base = OTHER; note = 2'-O-Methyl-adenosine
  modified_base 89: mod_base = OTHER; note = 2'-O-Methyl-guanosine
  modified_base 90: mod_base = OTHER; note = 2'-O-Methyl-uridine
  modified_base 91: mod_base = OTHER; note = 2'-O-Methyl-cytidine
  modified_base 92: mod_base = OTHER; note = 2'-O-Methyl-guanosine
  modified_base 93: mod_base = OTHER; note = 2'-O-Methyl-guanosine
  modified_base 94: mod_base = OTHER; note = 2'-O-Methyl-uridine
  modified_base 95: mod_base = OTHER; note = 2'-O-Methyl-guanosine
  modified_base 96: mod_base = OTHER; note = 2'-O-Methyl-cytidine
  modified_base 97: mod_base = OTHER; note = 2'-O-Methyl-uridine
  modified_base 98: mod_base = OTHER; note = 2'-O-Methyl-uridine phosphorothioate
  modified_base 99: mod_base = OTHER; note = 2'-O-Methyl-uridine phosphorothioate
  modified_base 100: mod_base = OTHER; note = 2'-O-Methyl-uridine

SEQ ID NO: 2360 - RNA, 100 nt, synthetic construct; identical to SEQ ID NO: 422
  source 1..100: mol_type = other RNA
  modified_base 1: mod_base = OTHER; note = 2'-O-Methyl-guanosine phosphorothioate
  modified_base 2: mod_base = OTHER; note = 2'-O-Methyl-adenosine phosphorothioate
  modified_base 3: mod_base = OTHER; note = 2'-O-Methyl-guanosine
  modified_base 21: mod_base = OTHER; note = 2'-O-Methyl-guanosine
  modified_base 28: mod_base = OTHER; note = 2'-O-Methyl-adenosine
  modified_base 29: mod_base = OTHER; note = 2'-O-Methyl-guanosine
  modified_base 30: mod_base = OTHER; note = 2'-O-Methyl-cytidine
  modified_base 31: mod_base = OTHER; note = 2'-O-Methyl-uridine
  modified_base 32: mod_base = OTHER; note = 2'-O-Methyl-adenosine
  modified_base 34: mod_base = OTHER; note = 2'-O-Methyl-adenosine
  modified_base 35: mod_base = OTHER; note = 2'-O-Methyl-adenosine
  modified_base 36: mod_base = OTHER; note = 2'-O-Methyl-adenosine
  modified_base 37: mod_base = OTHER; note = 2'-O-Methyl-uridine
  modified_base 38: mod_base = OTHER; note = 2'-O-Methyl-adenosine
  modified_base 39: mod_base = OTHER; note = 2'-O-Methyl-guanosine
  modified_base 40: mod_base = OTHER; note = 2'-O-Methyl-cytidine
  modified_base 41: mod_base = OTHER; note = 2'-O-Methyl-adenosine
  modified_base 42: mod_base = OTHER; note = 2'-O-Methyl-adenosine
  modified_base 46: mod_base = OTHER; note = 2'-O-Methyl-adenosine
  modified_base 48: mod_base = OTHER; note = 2'-O-Methyl-adenosine
  modified_base 50: mod_base = OTHER; note = 2'-O-Methyl-uridine
  modified_base 52: mod_base = OTHER; note = 2'-O-Methyl-adenosine
  modified_base 53: mod_base = OTHER; note = 2'-O-Methyl-guanosine
  modified_base 54: mod_base = OTHER; note = 2'-O-Methyl-guanosine
  modified_base 55: mod_base = OTHER; note = 2'-O-Methyl-cytidine
  modified_base 56: mod_base = OTHER; note = 2'-O-Methyl-uridine
  modified_base 57: mod_base = OTHER; note = 2'-O-Methyl-adenosine
  modified_base 60: mod_base = OTHER; note = 2'-O-Methyl-cytidine
  modified_base 61: mod_base = OTHER; note = 2'-O-Methyl-cytidine
  modified_base 64: mod_base = OTHER; note = uridine phosphorothioate
  modified_base 66: mod_base = OTHER; note = 2'-O-Methyl-uridine
  modified_base 67: mod_base = OTHER; note = 2'-O-Methyl-cytidine
  modified_base 70: mod_base = OTHER; note = 2'-O-Methyl-cytidine
  modified_base 71: mod_base = OTHER; note = 2'-O-Methyl-uridine
  modified_base 72: mod_base = OTHER; note = 2'-O-Methyl-uridine
  modified_base 74: mod_base = OTHER; note = 2'-O-Methyl-adenosine
  modified_base 75: mod_base = OTHER; note = 2'-O-Methyl-adenosine
  modified_base 76: mod_base = OTHER; note = 2'-O-Methyl-adenosine
  modified_base 77: mod_base = OTHER; note = 2'-O-Methyl-adenosine
  modified_base 78: mod_base = OTHER; note = 2'-O-Methyl-adenosine
  modified_base 79: mod_base = OTHER; note = 2'-O-Methyl-guanosine
  modified_base 80: mod_base = OTHER; note = 2'-O-Methyl-uridine
  modified_base 81: mod_base = OTHER; note = 2'-O-Methyl-guanosine
  modified_base 83: mod_base = OTHER; note = 2'-O-Methyl-cytidine
  modified_base 84: mod_base = OTHER; note = 2'-O-Methyl-adenosine
  modified_base 85: mod_base = OTHER; note = 2'-O-Methyl-cytidine
  modified_base 86: mod_base = OTHER; note = 2'-O-Methyl-cytidine
  modified_base 87: mod_base = OTHER; note = 2'-O-Methyl-guanosine
  modified_base 88: mod_base = OTHER; note = 2'-O-Methyl-adenosine
  modified_base 89: mod_base = OTHER; note = 2'-O-Methyl-guanosine
  modified_base 90: mod_base = OTHER; note = 2'-O-Methyl-uridine
  modified_base 91: mod_base = OTHER; note = 2'-O-Methyl-cytidine
  modified_base 92: mod_base = OTHER; note = 2'-O-Methyl-guanosine
  modified_base 93: mod_base = OTHER; note = 2'-O-Methyl-guanosine
  modified_base 94: mod_base = OTHER; note = 2'-O-Methyl-uridine
  modified_base 95: mod_base = OTHER; note = 2'-O-Methyl-guanosine
  modified_base 96: mod_base = OTHER; note = 2'-O-Methyl-cytidine
  modified_base 97: mod_base = OTHER; note = 2'-O-Methyl-uridine
  modified_base 98: mod_base = OTHER; note = 2'-O-Methyl-uridine phosphorothioate
  modified_base 99: mod_base = OTHER; note = 2'-O-Methyl-uridine phosphorothioate
  modified_base 100: mod_base = OTHER; note = 2'-O-Methyl-uridine

SEQ ID NO: 2361 - RNA, 100 nt, synthetic construct; identical to SEQ ID NO: 55
  source 1..100: mol_type = other RNA
  modified_base 1: mod_base = OTHER; note = 2'-O-Methyl-cytidine phosphorothioate
  modified_base 2: mod_base = OTHER; note = 2'-O-Methyl-adenosine phosphorothioate
  modified_base 3: mod_base = OTHER; note = 2'-O-Methyl-guanosine
  modified_base 21: mod_base = OTHER; note = 2'-O-Methyl-guanosine
  modified_base 28: mod_base = OTHER; note = 2'-O-Methyl-adenosine
  modified_base 29: mod_base = OTHER; note = 2'-O-Methyl-guanosine
  modified_base 30: mod_base = OTHER; note = 2'-O-Methyl-cytidine
  modified_base 31: mod_base = OTHER; note = 2'-O-Methyl-uridine
  modified_base 32: mod_base = OTHER; note = 2'-O-Methyl-adenosine
  modified_base 33: mod_base = OTHER; note = 2'-O-Methyl-guanosine
  modified_base 34: mod_base = OTHER; note = 2'-O-Methyl-adenosine
  modified_base 35: mod_base = OTHER; note = 2'-O-Methyl-adenosine
  modified_base 36: mod_base = OTHER; note = 2'-O-Methyl-adenosine
  modified_base 37: mod_base = OTHER; note = 2'-O-Methyl-uridine
  modified_base 38: mod_base = OTHER; note = 2'-O-Methyl-adenosine
  modified_base 39: mod_base = OTHER; note = 2'-O-Methyl-guanosine
  modified_base 40: mod_base = OTHER; note = 2'-O-Methyl-cytidine
  modified_base 41: mod_base = OTHER; note = 2'-O-Methyl-adenosine
  modified_base 42: mod_base = OTHER; note = 2'-O-Methyl-adenosine
  modified_base 46: mod_base = OTHER; note = 2'-O-Methyl-adenosine
  modified_base 48: mod_base = OTHER; note = 2'-O-Methyl-adenosine
  modified_base 50: mod_base = OTHER; note = 2'-O-Methyl-uridine
  modified_base 52: mod_base = OTHER; note = 2'-O-Methyl-adenosine
  modified_base 53: mod_base = OTHER; note = 2'-O-Methyl-guanosine
  modified_base 54: mod_base = OTHER; note = 2'-O-Methyl-guanosine
  modified_base 57: mod_base = OTHER; note = 2'-O-Methyl-adenosine
  modified_base 61: mod_base = OTHER; note = 2'-O-Methyl-cytidine
  modified_base 64: mod_base = OTHER; note = uridine phosphorothioate
  modified_base 66: mod_base = OTHER; note = 2'-O-Methyl-uridine
  modified_base 67: mod_base = OTHER; note = 2'-O-Methyl-cytidine
  modified_base 70: mod_base = OTHER; note = 2'-O-Methyl-cytidine
  modified_base 71: mod_base = OTHER; note = 2'-O-Methyl-uridine
  modified_base 72: mod_base = OTHER; note = 2'-O-Methyl-uridine
  modified_base 74: mod_base = OTHER; note = 2'-O-Methyl-adenosine
  modified_base 75: mod_base = OTHER; note = 2'-O-Methyl-adenosine
  modified_base 76: mod_base = OTHER; note = 2'-O-Methyl-adenosine
  modified_base 77: mod_base = OTHER; note = 2'-O-Methyl-adenosine
  modified_base 78: mod_base = OTHER; note = 2'-O-Methyl-adenosine
  modified_base 79: mod_base = OTHER; note = 2'-O-Methyl-guanosine
  modified_base 80: mod_base = OTHER; note = 2'-O-Methyl-uridine
  modified_base 82: mod_base = OTHER; note = 2'-O-Methyl-guanosine
  modified_base 83: mod_base = OTHER; note = 2'-O-Methyl-cytidine
  modified_base 84: mod_base = OTHER; note = 2'-O-Methyl-adenosine
  modified_base 85: mod_base = OTHER; note = 2'-O-Methyl-cytidine
  modified_base 86: mod_base = OTHER; note = 2'-O-Methyl-cytidine
  modified_base 87: mod_base = OTHER; note = 2'-O-Methyl-guanosine
  modified_base 89: mod_base = OTHER; note = 2'-O-Methyl-guanosine
  modified_base 92: mod_base = OTHER; note = 2'-O-Methyl-guanosine
  modified_base 93: mod_base = OTHER; note = 2'-O-Methyl-guanosine
  modified_base 94: mod_base = OTHER; note = 2'-O-Methyl-uridine
  modified_base 95: mod_base = OTHER; note = 2'-O-Methyl-guanosine
  modified_base 96: mod_base = OTHER; note = 2'-O-Methyl-cytidine
  modified_base 97: mod_base = OTHER; note = 2'-O-Methyl-uridine
  modified_base 98: mod_base = OTHER; note = 2'-O-Methyl-uridine phosphorothioate
  modified_base 99: mod_base = OTHER; note = 2'-O-Methyl-uridine phosphorothioate
  modified_base 100: mod_base = OTHER; note = 2'-O-Methyl-uridine

SEQ ID NO: 2362 - RNA, 100 nt, synthetic construct; identical to SEQ ID NO: 55
  source 1..100: mol_type = other RNA
  modified_base 1: mod_base = OTHER; note = 2'-O-Methyl-cytidine phosphorothioate
  modified_base 2: mod_base = OTHER; note = 2'-O-Methyl-adenosine phosphorothioate
  modified_base 3: mod_base = OTHER; note = 2'-O-Methyl-guanosine
  modified_base 21: mod_base = OTHER; note = 2'-O-Methyl-guanosine
  modified_base 28: mod_base = OTHER; note = 2'-O-Methyl-adenosine
  modified_base 29: mod_base = OTHER; note = 2'-O-Methyl-guanosine
  modified_base 30: mod_base = OTHER; note = 2'-O-Methyl-cytidine
  modified_base 31: mod_base = OTHER; note = 2'-O-Methyl-uridine
  modified_base 32: mod_base = OTHER; note = 2'-O-Methyl-adenosine
  modified_base 33: mod_base = OTHER; note = 2'-O-Methyl-guanosine
  modified_base 34: mod_base = OTHER; note = 2'-O-Methyl-adenosine
  modified_base 35: mod_base = OTHER; note = 2'-O-Methyl-adenosine
  modified_base 36: mod_base = OTHER; note = 2'-O-Methyl-adenosine
  modified_base 37: mod_base = OTHER; note = 2'-O-Methyl-uridine
  modified_base 38: mod_base = OTHER; note = 2'-O-Methyl-adenosine
  modified_base 39: mod_base = OTHER; note = 2'-O-Methyl-guanosine
  modified_base 40: mod_base = OTHER; note = 2'-O-Methyl-cytidine
  modified_base 41: mod_base = OTHER; note = 2'-O-Methyl-adenosine
  modified_base 42: mod_base = OTHER; note = 2'-O-Methyl-adenosine
  modified_base 46: mod_base = OTHER; note = 2'-O-Methyl-adenosine
  modified_base 48: mod_base = OTHER; note = 2'-O-Methyl-adenosine
  modified_base 50: mod_base = OTHER; note = 2'-O-Methyl-uridine
  modified_base 52: mod_base = OTHER; note = 2'-O-Methyl-adenosine
  modified_base 53: mod_base = OTHER; note = 2'-O-Methyl-guanosine
  modified_base 54: mod_base = OTHER; note = 2'-O-Methyl-guanosine
  modified_base 55: mod_base = OTHER; note = 2'-O-Methyl-cytidine
  modified_base 56: mod_base = OTHER; note = 2'-O-Methyl-uridine
  modified_base 57: mod_base = OTHER; note = 2'-O-Methyl-adenosine
  modified_base 60: mod_base = OTHER; note = 2'-O-Methyl-cytidine
  modified_base 61: mod_base = OTHER; note = 2'-O-Methyl-cytidine
  modified_base 64: mod_base = OTHER; note = uridine phosphorothioate
  modified_base 66: mod_base = OTHER; note = 2'-O-Methyl-uridine
  modified_base 67: mod_base = OTHER; note = 2'-O-Methyl-cytidine
  modified_base 70: mod_base = OTHER; note = 2'-O-Methyl-cytidine
  modified_base 71: mod_base = OTHER; note = 2'-O-Methyl-uridine
  modified_base 72: mod_base = OTHER; note = 2'-O-Methyl-uridine
  modified_base 74: mod_base = OTHER; note = 2'-O-Methyl-adenosine
  modified_base 75: mod_base = OTHER; note = 2'-O-Methyl-adenosine
  modified_base 76: mod_base = OTHER; note = 2'-O-Methyl-adenosine
  modified_base 77: mod_base = OTHER; note = 2'-O-Methyl-adenosine
  modified_base 78: mod_base = OTHER; note = 2'-O-Methyl-adenosine
  modified_base 79: mod_base = OTHER; note = 2'-O-Methyl-guanosine
  modified_base 80: mod_base = OTHER; note = 2'-O-Methyl-uridine
  modified_base 82: mod_base = OTHER; note = 2'-O-Methyl-guanosine
  modified_base 83: mod_base = OTHER; note = 2'-O-Methyl-cytidine
  modified_base 84: mod_base = OTHER; note = 2'-O-Methyl-adenosine
  modified_base 85: mod_base = OTHER; note = 2'-O-Methyl-cytidine
  modified_base 86: mod_base = OTHER; note = 2'-O-Methyl-cytidine
  modified_base 87: mod_base = OTHER; note = 2'-O-Methyl-guanosine
  modified_base 89: mod_base = OTHER; note = 2'-O-Methyl-guanosine
  modified_base 92: mod_base = OTHER; note = 2'-O-Methyl-guanosine
  modified_base 93: mod_base = OTHER; note = 2'-O-Methyl-guanosine
  modified_base 94: mod_base = OTHER; note = 2'-O-Methyl-uridine
  modified_base 95: mod_base = OTHER; note = 2'-O-Methyl-guanosine
  modified_base 96: mod_base = OTHER; note = 2'-O-Methyl-cytidine
  modified_base 97: mod_base = OTHER; note = 2'-O-Methyl-uridine
  modified_base 98: mod_base = OTHER; note = 2'-O-Methyl-uridine phosphorothioate
  modified_base 99: mod_base = OTHER; note = 2'-O-Methyl-uridine phosphorothioate
  modified_base 100: mod_base = OTHER; note = 2'-O-Methyl-uridine

SEQ ID NO: 2363 - RNA, 100 nt, synthetic construct; identical to SEQ ID NO: 55
  source 1..100: mol_type = other RNA
  modified_base 1: mod_base = OTHER; note = 2'-O-Methyl-cytidine phosphorothioate
  modified_base 2: mod_base = OTHER; note = 2'-O-Methyl-adenosine phosphorothioate
  modified_base 3: mod_base = OTHER; note = 2'-O-Methyl-guanosine
  modified_base 21: mod_base = OTHER; note = 2'-O-Methyl-guanosine
  modified_base 28: mod_base = OTHER; note = 2'-O-Methyl-adenosine
  modified_base 29: mod_base = OTHER; note = 2'-O-Methyl-guanosine
  modified_base 30: mod_base = OTHER; note = 2'-O-Methyl-cytidine
  modified_base 31: mod_base = OTHER; note = 2'-O-Methyl-uridine
  modified_base 32: mod_base = OTHER; note = 2'-O-Methyl-adenosine
  modified_base 33: mod_base = OTHER; note = 2'-O-Methyl-guanosine
  modified_base 34: mod_base = OTHER; note = 2'-O-Methyl-adenosine
  modified_base 35: mod_base = OTHER; note = 2'-O-Methyl-adenosine
  modified_base 36: mod_base = OTHER; note = 2'-O-Methyl-adenosine
  modified_base 37: mod_base = OTHER; note = 2'-O-Methyl-uridine
  modified_base 38: mod_base = OTHER; note = 2'-O-Methyl-adenosine
  modified_base 39: mod_base = OTHER; note = 2'-O-Methyl-guanosine
  modified_base 40: mod_base = OTHER; note = 2'-O-Methyl-cytidine
  modified_base 41: mod_base = OTHER; note = 2'-O-Methyl-adenosine
  modified_base 42: mod_base = OTHER; note = 2'-O-Methyl-adenosine
  modified_base 46: mod_base = OTHER; note = 2'-O-Methyl-adenosine
  modified_base 48: mod_base = OTHER; note = 2'-O-Methyl-adenosine
  modified_base 50: mod_base = OTHER; note = 2'-O-Methyl-uridine
  modified_base 52: mod_base = OTHER; note = 2'-O-Methyl-adenosine
  modified_base 53: mod_base = OTHER; note = 2'-O-Methyl-guanosine
  modified_base 54: mod_base = OTHER; note = 2'-O-Methyl-guanosine
  modified_base 57: mod_base = OTHER; note = 2'-O-Methyl-adenosine
  modified_base 61: mod_base = OTHER; note = 2'-O-Methyl-cytidine
  modified_base 64: mod_base = OTHER; note = uridine phosphorothioate
  modified_base 66: mod_base = OTHER; note = 2'-O-Methyl-uridine
  modified_base 67: mod_base = OTHER; note = 2'-O-Methyl-cytidine
  modified_base 70: mod_base = OTHER; note = 2'-O-Methyl-cytidine
  modified_base 71: mod_base = OTHER; note = 2'-O-Methyl-uridine
  modified_base 72: mod_base = OTHER; note = 2'-O-Methyl-uridine
  modified_base 73: mod_base = OTHER; note = 2'-O-Methyl-guanosine
  modified_base 74: mod_base = OTHER; note = 2'-O-Methyl-adenosine
  modified_base 75: mod_base = OTHER; note = 2'-O-Methyl-adenosine
  modified_base 76: mod_base = OTHER; note = 2'-O-Methyl-adenosine
  modified_base 77: mod_base = OTHER; note = 2'-O-Methyl-adenosine
  modified_base 78: mod_base = OTHER; note = 2'-O-Methyl-adenosine
  modified_base 79: mod_base = OTHER; note = 2'-O-Methyl-guanosine
  modified_base 80: mod_base = OTHER; note = 2'-O-Methyl-uridine
  modified_base 82: mod_base = OTHER; note = 2'-O-Methyl-guanosine
  modified_base 83: mod_base = OTHER; note = 2'-O-Methyl-cytidine
  modified_base 84: mod_base = OTHER; note = 2'-O-Methyl-adenosine
  modified_base 85: mod_base = OTHER; note = 2'-O-Methyl-cytidine
  modified_base 86: mod_base = OTHER; note = 2'-O-Methyl-cytidine
  modified_base 87: mod_base = OTHER; note = 2'-O-Methyl-guanosine
  modified_base 89: mod_base = OTHER; note = 2'-O-Methyl-guanosine
  modified_base 92: mod_base = OTHER; note = 2'-O-Methyl-guanosine
  modified_base 93: mod_base = OTHER; note = 2'-O-Methyl-guanosine
  modified_base 94: mod_base = OTHER; note = 2'-O-Methyl-uridine
  modified_base 95: mod_base = OTHER; note = 2'-O-Methyl-guanosine
  modified_base 96: mod_base = OTHER; note = 2'-O-Methyl-cytidine
  modified_base 97: mod_base = OTHER; note = 2'-O-Methyl-uridine
  modified_base 98: mod_base = OTHER; note = 2'-O-Methyl-uridine phosphorothioate
  modified_base 99: mod_base = OTHER; note = 2'-O-Methyl-uridine phosphorothioate
  modified_base 100: mod_base = OTHER; note = 2'-O-Methyl-uridine

SEQ ID NO: 2364 - RNA, 100 nt, synthetic construct; identical to SEQ ID NO: 55
  source 1..100: mol_type = other RNA
  modified_base 1: mod_base = OTHER; note = 2'-O-Methyl-cytidine phosphorothioate
  modified_base 2: mod_base = OTHER; note = 2'-O-Methyl-adenosine phosphorothioate
  modified_base 3: mod_base = OTHER; note = 2'-O-Methyl-guanosine
  modified_base 21: mod_base = OTHER; note = 2'-O-Methyl-guanosine
  modified_base 28: mod_base = OTHER; note = 2'-O-Methyl-adenosine
  modified_base 29: mod_base = OTHER; note = 2'-O-Methyl-guanosine
  modified_base 30: mod_base = OTHER; note = 2'-O-Methyl-cytidine
  modified_base 31: mod_base = OTHER; note = 2'-O-Methyl-uridine
  modified_base 32: mod_base = OTHER; note = 2'-O-Methyl-adenosine
  modified_base 33: mod_base = OTHER; note = 2'-O-Methyl-guanosine
  modified_base 34: mod_base = OTHER; note = 2'-O-Methyl-adenosine
  modified_base 35: mod_base = OTHER; note = 2'-O-Methyl-adenosine
  modified_base 36: mod_base = OTHER; note = 2'-O-Methyl-adenosine
  modified_base 37: mod_base = OTHER; note = 2'-O-Methyl-uridine
  modified_base 38: mod_base = OTHER; note = 2'-O-Methyl-adenosine
  modified_base 39: mod_base = OTHER; note = 2'-O-Methyl-guanosine
  modified_base 40: mod_base = OTHER; note = 2'-O-Methyl-cytidine
  modified_base 41: mod_base = OTHER; note = 2'-O-Methyl-adenosine
  modified_base 42: mod_base = OTHER; note = 2'-O-Methyl-adenosine
  modified_base 46: mod_base = OTHER; note = 2'-O-Methyl-adenosine
  modified_base 48: mod_base = OTHER; note = 2'-O-Methyl-adenosine
  modified_base 50: mod_base = OTHER; note = 2'-O-Methyl-uridine
  modified_base 52: mod_base = OTHER; note = 2'-O-Methyl-adenosine
  modified_base 53: mod_base = OTHER; note = 2'-O-Methyl-guanosine
  modified_base 54: mod_base = OTHER; note = 2'-O-Methyl-guanosine
  modified_base 57: mod_base = OTHER; note = 2'-O-Methyl-adenosine
  modified_base 61: mod_base = OTHER; note = 2'-O-Methyl-cytidine
  modified_base 64: mod_base = OTHER; note = uridine phosphorothioate
  modified_base 66: mod_base = OTHER; note = 2'-O-Methyl-uridine
  modified_base 67: mod_base = OTHER; note = 2'-O-Methyl-cytidine
  modified_base 70: mod_base = OTHER; note = 2'-O-Methyl-cytidine
  modified_base 71: mod_base = OTHER; note = 2'-O-Methyl-uridine
  modified_base 72: mod_base = OTHER; note = 2'-O-Methyl-uridine
  modified_base 73: mod_base = OTHER; note = 2'-O-Methyl-guanosine
  modified_base 74: mod_base = OTHER; note = 2'-O-Methyl-adenosine
  modified_base 75: mod_base = OTHER; note = 2'-O-Methyl-adenosine
  modified_base 76: mod_base = OTHER; note = 2'-O-Methyl-adenosine
  modified_base 77: mod_base = OTHER; note = 2'-O-Methyl-adenosine
  modified_base 78: mod_base = OTHER; note = 2'-O-Methyl-adenosine
  modified_base 79: mod_base = OTHER; note = 2'-O-Methyl-guanosine
  modified_base 80: mod_base = OTHER; note = 2'-O-Methyl-uridine
  modified_base 82: mod_base = OTHER; note = 2'-O-Methyl-guanosine
  modified_base 83: mod_base = OTHER; note = 2'-O-Methyl-cytidine
  modified_base 84: mod_base = OTHER; note = 2'-O-Methyl-adenosine
  modified_base 85: mod_base = OTHER; note = 2'-O-Methyl-cytidine
  modified_base 86: mod_base = OTHER; note = 2'-O-Methyl-cytidine
  modified_base 87: mod_base = OTHER; note = 2'-O-Methyl-guanosine
  modified_base 89: mod_base = OTHER; note = 2'-O-Methyl-guanosine
  modified_base 91: mod_base = OTHER; note = 2'-O-Methyl-cytidine
  modified_base 92: mod_base = OTHER; note = 2'-O-Methyl-guanosine
  modified_base 93: mod_base = OTHER; note = 2'-O-Methyl-guanosine
  modified_base 94: mod_base = OTHER; note = 2'-O-Methyl-uridine
  modified_base 95: mod_base = OTHER; note = 2'-O-Methyl-guanosine
  modified_base 96: mod_base = OTHER; note = 2'-O-Methyl-cytidine
  modified_base 97: mod_base = OTHER; note = 2'-O-Methyl-uridine
  modified_base 98: mod_base = OTHER; note = 2'-O-Methyl-uridine phosphorothioate
  modified_base 99: mod_base = OTHER; note = 2'-O-Methyl-uridine phosphorothioate
  modified_base 100: mod_base = OTHER; note = 2'-O-Methyl-uridine

SEQ ID NO: 2365 - RNA, 100 nt, synthetic construct; identical to SEQ ID NO: 55
  source 1..100: mol_type = other RNA
  modified_base 1: mod_base = OTHER; note = 2'-O-Methyl-cytidine phosphorothioate
  modified_base 2: mod_base = OTHER; note = 2'-O-Methyl-adenosine phosphorothioate
  modified_base 3: mod_base = OTHER; note = 2'-O-Methyl-guanosine
  modified_base 21: mod_base = OTHER; note = 2'-O-Methyl-guanosine
  modified_base 28: mod_base = OTHER; note = 2'-O-Methyl-adenosine
  modified_base 29: mod_base = OTHER; note = 2'-O-Methyl-guanosine
  modified_base 30: mod_base = OTHER; note = 2'-O-Methyl-cytidine
  modified_base 31: mod_base = OTHER; note = 2'-O-Methyl-uridine
  modified_base 32: mod_base = OTHER; note = 2'-O-Methyl-adenosine
  modified_base 34: mod_base = OTHER; note = 2'-O-Methyl-adenosine
  modified_base 35: mod_base = OTHER; note = 2'-O-Methyl-adenosine
  modified_base 36: mod_base = OTHER; note = 2'-O-Methyl-adenosine
  modified_base 37: mod_base = OTHER; note = 2'-O-Methyl-uridine
  modified_base 38: mod_base = OTHER; note = 2'-O-Methyl-adenosine
  modified_base 39: mod_base = OTHER; note = 2'-O-Methyl-guanosine
  modified_base 40: mod_base = OTHER; note = 2'-O-Methyl-cytidine
  modified_base 41: mod_base = OTHER; note = 2'-O-Methyl-adenosine
  modified_base 42: mod_base = OTHER; note = 2'-O-Methyl-adenosine
  modified_base 46: mod_base = OTHER; note = 2'-O-Methyl-adenosine
  modified_base 48: mod_base = OTHER; note = 2'-O-Methyl-adenosine
  modified_base 50: mod_base = OTHER; note = 2'-O-Methyl-uridine
  modified_base 52: mod_base = OTHER; note = 2'-O-Methyl-adenosine
  modified_base 53: mod_base = OTHER; note = 2'-O-Methyl-guanosine
  modified_base 54: mod_base = OTHER; note = 2'-O-Methyl-guanosine
  modified_base 57: mod_base = OTHER; note = 2'-O-Methyl-adenosine
  modified_base 61: mod_base = OTHER; note = 2'-O-Methyl-cytidine
  modified_base 64: mod_base = OTHER; note = uridine phosphorothioate
  modified_base 66: mod_base = OTHER; note = 2'-O-Methyl-uridine
  modified_base 67: mod_base = OTHER; note = 2'-O-Methyl-cytidine
  modified_base 70: mod_base = OTHER; note = 2'-O-Methyl-cytidine
  modified_base 71: mod_base = OTHER; note = 2'-O-Methyl-uridine
  modified_base 72: mod_base = OTHER; note = 2'-O-Methyl-uridine
  modified_base 73: mod_base = OTHER; note = 2'-O-Methyl-guanosine
  modified_base 74: mod_base = OTHER; note = 2'-O-Methyl-adenosine
  modified_base 75: mod_base = OTHER; note = 2'-O-Methyl-adenosine
  modified_base 76: mod_base = OTHER; note = 2'-O-Methyl-adenosine
  modified_base 77: mod_base = OTHER; note = 2'-O-Methyl-adenosine
  modified_base 78: mod_base = OTHER; note = 2'-O-Methyl-adenosine
  modified_base 79: mod_base = OTHER; note = 2'-O-Methyl-guanosine
  modified_base 80: mod_base = OTHER; note = 2'-O-Methyl-uridine
  modified_base 82: mod_base = OTHER; note = 2'-O-Methyl-guanosine
  modified_base 83: mod_base = OTHER; note = 2'-O-Methyl-cytidine
  modified_base 84: mod_base = OTHER; note = 2'-O-Methyl-adenosine
  modified_base 85: mod_base = OTHER; note = 2'-O-Methyl-cytidine
  modified_base 86: mod_base = OTHER; note = 2'-O-Methyl-cytidine
  modified_base 87: mod_base = OTHER; note = 2'-O-Methyl-guanosine
  modified_base 89: mod_base = OTHER; note = 2'-O-Methyl-guanosine
  modified_base 92: mod_base = OTHER; note = 2'-O-Methyl-guanosine
  modified_base 93: mod_base = OTHER; note = 2'-O-Methyl-guanosine
  modified_base 94: mod_base = OTHER; note = 2'-O-Methyl-uridine
  modified_base 95: mod_base = OTHER; note = 2'-O-Methyl-guanosine
  modified_base 96: mod_base = OTHER; note = 2'-O-Methyl-cytidine
  modified_base 97: mod_base = OTHER; note = 2'-O-Methyl-uridine
  modified_base 98: mod_base = OTHER; note = 2'-O-Methyl-uridine phosphorothioate
  modified_base 99: mod_base = OTHER; note = 2'-O-Methyl-uridine phosphorothioate
  modified_base 100: mod_base = OTHER; note = 2'-O-Methyl-uridine

SEQ ID NO: 2366 - RNA, 100 nt, synthetic construct; identical to SEQ ID NO: 55
  source 1..100: mol_type = other RNA
  modified_base 1: mod_base = OTHER; note = 2'-O-Methyl-cytidine phosphorothioate
  modified_base 2: mod_base = OTHER; note = 2'-O-Methyl-adenosine phosphorothioate
  modified_base 3: mod_base = OTHER; note = 2'-O-Methyl-guanosine
  modified_base 21: mod_base = OTHER; note = 2'-O-Methyl-guanosine
  modified_base 28: mod_base = OTHER; note = 2'-O-Methyl-adenosine
  modified_base 29: mod_base = OTHER; note = 2'-O-Methyl-guanosine
  modified_base 30: mod_base = OTHER; note = 2'-O-Methyl-cytidine
  modified_base 31: mod_base = OTHER; note = 2'-O-Methyl-uridine
  modified_base 32: mod_base = OTHER; note = 2'-O-Methyl-adenosine
  modified_base 34: mod_base = OTHER; note = 2'-O-Methyl-adenosine
  modified_base 35: mod_base = OTHER; note = 2'-O-Methyl-adenosine
  modified_base 36: mod_base = OTHER; note = 2'-O-Methyl-adenosine
  modified_base 37: mod_base = OTHER; note = 2'-O-Methyl-uridine
  modified_base 38: mod_base = OTHER; note = 2'-O-Methyl-adenosine
  modified_base 39: mod_base = OTHER; note = 2'-O-Methyl-guanosine
  modified_base 40: mod_base = OTHER; note = 2'-O-Methyl-cytidine
  modified_base 41: mod_base = OTHER; note = 2'-O-Methyl-adenosine
  modified_base 42: mod_base = OTHER; note = 2'-O-Methyl-adenosine
  modified_base 46: mod_base = OTHER; note = 2'-O-Methyl-adenosine
  modified_base 48: mod_base = OTHER; note = 2'-O-Methyl-adenosine
  modified_base 50: mod_base = OTHER; note = 2'-O-Methyl-uridine
  modified_base 52: mod_base = OTHER; note = 2'-O-Methyl-adenosine
  modified_base 53: mod_base = OTHER; note = 2'-O-Methyl-guanosine
  modified_base 54: mod_base = OTHER; note = 2'-O-Methyl-guanosine
  modified_base 57: mod_base = OTHER; note = 2'-O-Methyl-adenosine
  modified_base 61: mod_base = OTHER; note = 2'-O-Methyl-cytidine
  modified_base 64: mod_base = OTHER; note = uridine phosphorothioate
  modified_base 66: mod_base = OTHER; note = 2'-O-Methyl-uridine
  modified_base 67: mod_base = OTHER; note = 2'-O-Methyl-cytidine
  modified_base 70: mod_base = OTHER; note = 2'-O-Methyl-cytidine
  modified_base 71: mod_base = OTHER; note = 2'-O-Methyl-uridine
  modified_base 72: mod_base = OTHER; note = 2'-O-Methyl-uridine
  modified_base 73: mod_base = OTHER; note = 2'-O-Methyl-guanosine
  modified_base 74: mod_base = OTHER; note = 2'-O-Methyl-adenosine
  modified_base 75: mod_base = OTHER; note = 2'-O-Methyl-adenosine
  modified_base 76: mod_base = OTHER; note = 2'-O-Methyl-adenosine
  modified_base 77: mod_base = OTHER; note = 2'-O-Methyl-adenosine
  modified_base 78: mod_base = OTHER; note = 2'-O-Methyl-adenosine
  modified_base 79: mod_base = OTHER; note = 2'-O-Methyl-guanosine
  modified_base 80: mod_base = OTHER; note = 2'-O-Methyl-uridine
  modified_base 82: mod_base = OTHER; note = 2'-O-Methyl-guanosine
  modified_base 83: mod_base = OTHER; note = 2'-O-Methyl-cytidine
  modified_base 84: mod_base = OTHER; note = 2'-O-Methyl-adenosine
  modified_base 85: mod_base = OTHER; note = 2'-O-Methyl-cytidine
  modified_base 86: mod_base = OTHER; note = 2'-O-Methyl-cytidine
  modified_base 87: mod_base = OTHER; note = 2'-O-Methyl-guanosine
  modified_base 89: mod_base = OTHER; note = 2'-O-Methyl-guanosine
  modified_base 91: mod_base = OTHER; note = 2'-O-Methyl-cytidine
  modified_base 92: mod_base = OTHER; note = 2'-O-Methyl-guanosine
  modified_base 93: mod_base = OTHER; note = 2'-O-Methyl-guanosine
  modified_base 94: mod_base = OTHER; note = 2'-O-Methyl-uridine
  modified_base 95: mod_base = OTHER; note = 2'-O-Methyl-guanosine
  modified_base 96: mod_base = OTHER; note = 2'-O-Methyl-cytidine
  modified_base 97: mod_base = OTHER; note = 2'-O-Methyl-uridine
  modified_base 98: mod_base = OTHER; note = 2'-O-Methyl-uridine phosphorothioate
  modified_base 99: mod_base = OTHER; note = 2'-O-Methyl-uridine phosphorothioate
  modified_base 100: mod_base = OTHER; note = 2'-O-Methyl-uridine

SEQ ID NO: 2367 - RNA, 100 nt, synthetic construct; identical to SEQ ID NO: 55
  source 1..100: mol_type = other RNA
  modified_base 1: mod_base = OTHER; note = 2'-O-Methyl-cytidine phosphorothioate
  modified_base 2: mod_base = OTHER; note = 2'-O-Methyl-adenosine phosphorothioate
  modified_base 3: mod_base = OTHER; note = 2'-O-Methyl-guanosine
  modified_base 21: mod_base = OTHER; note = 2'-O-Methyl-guanosine
  modified_base 28: mod_base = OTHER; note = 2'-O-Methyl-adenosine
  modified_base 29: mod_base = OTHER; note = 2'-O-Methyl-guanosine
  modified_base 30: mod_base = OTHER; note = 2'-O-Methyl-cytidine
  modified_base 31: mod_base = OTHER; note = 2'-O-Methyl-uridine
  modified_base 32: mod_base = OTHER; note = 2'-O-Methyl-adenosine
  modified_base 34: mod_base = OTHER; note = 2'-O-Methyl-adenosine
  modified_base 35: mod_base = OTHER; note = 2'-O-Methyl-adenosine
  modified_base 36: mod_base = OTHER; note = 2'-O-Methyl-adenosine
  modified_base 37: mod_base = OTHER; note = 2'-O-Methyl-uridine
  modified_base 38: mod_base = OTHER; note = 2'-O-Methyl-adenosine
  modified_base 39: mod_base = OTHER; note = 2'-O-Methyl-guanosine
  modified_base 40: mod_base = OTHER; note = 2'-O-Methyl-cytidine
  modified_base 41: mod_base = OTHER; note = 2'-O-Methyl-adenosine
  modified_base 42: mod_base = OTHER; note = 2'-O-Methyl-adenosine
  modified_base 46: mod_base = OTHER; note = 2'-O-Methyl-adenosine
  modified_base 48: mod_base = OTHER; note = 2'-O-Methyl-adenosine
  modified_base 50: mod_base = OTHER; note = 2'-O-Methyl-uridine
  modified_base 52: mod_base = OTHER; note = 2'-O-Methyl-adenosine
  modified_base 53: mod_base = OTHER; note = 2'-O-Methyl-guanosine
  modified_base 54: mod_base = OTHER; note = 2'-O-Methyl-guanosine
  modified_base 55: mod_base = OTHER; note = 2'-O-Methyl-cytidine
  modified_base 56: mod_base = OTHER; note = 2'-O-Methyl-uridine
  modified_base 57: mod_base = OTHER; note = 2'-O-Methyl-adenosine
  modified_base 60: mod_base = OTHER; note = 2'-O-Methyl-cytidine
  modified_base 61: mod_base = OTHER; note = 2'-O-Methyl-cytidine
  modified_base 64: mod_base = OTHER; note = uridine phosphorothioate
  modified_base 66: mod_base = OTHER; note = 2'-O-Methyl-uridine
  modified_base 67: mod_base = OTHER; note = 2'-O-Methyl-cytidine
  modified_base 70: mod_base = OTHER; note = 2'-O-Methyl-cytidine
  modified_base 71: mod_base = OTHER; note = 2'-O-Methyl-uridine
  modified_base 72: mod_base = OTHER; note = 2'-O-Methyl-uridine
  modified_base 74: mod_base = OTHER; note = 2'-O-Methyl-adenosine
  modified_base 75: mod_base = OTHER; note = 2'-O-Methyl-adenosine
  modified_base 76: mod_base = OTHER; note = 2'-O-Methyl-adenosine
  modified_base 77: mod_base = OTHER; note = 2'-O-Methyl-adenosine
  modified_base 78: mod_base = OTHER; note = 2'-O-Methyl-adenosine
  modified_base 79: mod_base = OTHER; note = 2'-O-Methyl-guanosine
  modified_base 80: mod_base = OTHER; note = 2'-O-Methyl-uridine
  modified_base 82: mod_base = OTHER; note = 2'-O-Methyl-guanosine
  modified_base 83: mod_base = OTHER; note = 2'-O-Methyl-cytidine
  modified_base 84: mod_base = OTHER; note = 2'-O-Methyl-adenosine
  modified_base 85: mod_base = OTHER; note = 2'-O-Methyl-cytidine
  modified_base 86: mod_base = OTHER; note = 2'-O-Methyl-cytidine
  modified_base 87: mod_base = OTHER; note = 2'-O-Methyl-guanosine
  modified_base 89: mod_base = OTHER; note = 2'-O-Methyl-guanosine
  modified_base 92: mod_base = OTHER; note = 2'-O-Methyl-guanosine
  modified_base 93: mod_base = OTHER; note = 2'-O-Methyl-guanosine
  modified_base 94: mod_base = OTHER; note = 2'-O-Methyl-uridine
  modified_base 95: mod_base = OTHER; note = 2'-O-Methyl-guanosine
  modified_base 96: mod_base = OTHER; note = 2'-O-Methyl-cytidine
  modified_base 97: mod_base = OTHER; note = 2'-O-Methyl-uridine
  modified_base 98: mod_base = OTHER; note = 2'-O-Methyl-uridine phosphorothioate
  modified_base 99: mod_base = OTHER; note = 2'-O-Methyl-uridine phosphorothioate
  modified_base 100: mod_base = OTHER; note = 2'-O-Methyl-uridine

SEQ ID NO: 2368 - RNA, 100 nt, synthetic construct; identical to SEQ ID NO: 421
  source 1..100: mol_type = other RNA
  modified_base 1: mod_base = OTHER; note = 2'-O-Methyl-cytidine phosphorothioate
  modified_base 2: mod_base = OTHER; note = 2'-O-Methyl-cytidine phosphorothioate
  modified_base 3: mod_base = OTHER; note = 2'-O-Methyl-cytidine
  modified_base 21: mod_base = OTHER; note = 2'-O-Methyl-guanosine
  modified_base 28: mod_base = OTHER; note = 2'-O-Methyl-adenosine
  modified_base 29: mod_base = OTHER; note = 2'-O-Methyl-guanosine
  modified_base 30: mod_base = OTHER; note = 2'-O-Methyl-cytidine
  modified_base 31: mod_base = OTHER; note = 2'-O-Methyl-uridine
  modified_base 32: mod_base = OTHER; note = 2'-O-Methyl-adenosine
  modified_base 33: mod_base = OTHER; note = 2'-O-Methyl-guanosine
  modified_base 34: mod_base = OTHER; note = 2'-O-Methyl-adenosine
  modified_base 35: mod_base = OTHER; note = 2'-O-Methyl-adenosine
  modified_base 36: mod_base = OTHER; note = 2'-O-Methyl-adenosine
  modified_base 37: mod_base = OTHER; note = 2'-O-Methyl-uridine
  modified_base 38: mod_base = OTHER; note = 2'-O-Methyl-adenosine
  modified_base 39: mod_base = OTHER; note = 2'-O-Methyl-guanosine
  modified_base 40: mod_base = OTHER; note = 2'-O-Methyl-cytidine
  modified_base 41: mod_base = OTHER; note = 2'-O-Methyl-adenosine
  modified_base 42: mod_base = OTHER; note = 2'-O-Methyl-adenosine
  modified_base 45: mod_base = OTHER; note = uridine phosphorothioate
  modified_base 46: mod_base = OTHER; note = 2'-O-Methyl-adenosine
  modified_base 48: mod_base = OTHER; note = 2'-O-Methyl-adenosine
  modified_base 50: mod_base = OTHER; note = 2'-O-Methyl-uridine
  modified_base 52: mod_base = OTHER; note = 2'-O-Methyl-adenosine
  modified_base 53: mod_base = OTHER; note = 2'-O-Methyl-guanosine
  modified_base 54: mod_base = OTHER; note = 2'-O-Methyl-guanosine
  modified_base 55: mod_base = OTHER; note = 2'-O-Methyl-cytidine
  modified_base 56: mod_base = OTHER; note = 2'-O-Methyl-uridine
  modified_base 57: mod_base = OTHER; note = 2'-O-Methyl-adenosine
  modified_base 60: mod_base = OTHER; note = 2'-O-Methyl-cytidine
  modified_base 61: mod_base = OTHER; note = 2'-O-Methyl-cytidine
  modified_base 66: mod_base = OTHER; note = 2'-O-Methyl-uridine
  modified_base 67: mod_base = OTHER; note = 2'-O-Methyl-cytidine
  modified_base 70: mod_base = OTHER; note = 2'-O-Methyl-cytidine
  modified_base 71: mod_base = OTHER; note = 2'-O-Methyl-uridine
  modified_base 72: mod_base = OTHER; note = 2'-O-Methyl-uridine
  modified_base 73: mod_base = OTHER; note = 2'-O-Methyl-guanosine
  modified_base 74: mod_base = OTHER; note = 2'-O-Methyl-adenosine
  modified_base 75: mod_base = OTHER; note = 2'-O-Methyl-adenosine
  modified_base 76: mod_base = OTHER; note = 2'-O-Methyl-adenosine
  modified_base 77: mod_base = OTHER; note = 2'-O-Methyl-adenosine
  modified_base 78: mod_base = OTHER; note = 2'-O-Methyl-adenosine
  modified_base 79: mod_base = OTHER; note = 2'-O-Methyl-guanosine
  modified_base 80: mod_base = OTHER; note = 2'-O-Methyl-uridine
  modified_base 81: mod_base = OTHER; note = 2'-O-Methyl-guanosine
  modified_base 83: mod_base = OTHER; note = 2'-O-Methyl-cytidine
  modified_base 84: mod_base = OTHER; note = 2'-O-Methyl-adenosine
  modified_base 85: mod_base = OTHER; note = 2'-O-Methyl-cytidine
  modified_base 86: mod_base = OTHER; note = 2'-O-Methyl-cytidine
  modified_base 87: mod_base = OTHER; note = 2'-O-Methyl-guanosine
  modified_base 88: mod_base = OTHER; note = 2'-O-Methyl-adenosine
  modified_base 89: mod_base = OTHER; note = 2'-O-Methyl-guanosine
  modified_base 90: mod_base = OTHER; note = 2'-O-Methyl-uridine
  modified_base 91: mod_base = OTHER; note = 2'-O-Methyl-cytidine
  modified_base 92: mod_base = OTHER; note = 2'-O-Methyl-guanosine
  modified_base 93: mod_base = OTHER; note = 2'-O-Methyl-guanosine
  modified_base 94: mod_base = OTHER; note = 2'-O-Methyl-uridine
  modified_base 95: mod_base = OTHER; note = 2'-O-Methyl-guanosine
  modified_base 96: mod_base = OTHER; note = 2'-O-Methyl-cytidine
  modified_base 97: mod_base = OTHER; note = 2'-O-Methyl-uridine
  modified_base 98: mod_base = OTHER; note = 2'-O-Methyl-uridine phosphorothioate
  modified_base 99: mod_base = OTHER; note = 2'-O-Methyl-uridine phosphorothioate
  modified_base 100: mod_base = OTHER; note = 2'-O-Methyl-uridine

SEQ ID NO: 2369 - RNA, 100 nt, synthetic construct; identical to SEQ ID NO: 421
  source 1..100: mol_type = other RNA
  modified_base 1: mod_base = OTHER; note = 2'-O-Methyl-cytidine phosphorothioate
  modified_base 2: mod_base = OTHER; note = 2'-O-Methyl-cytidine phosphorothioate
  modified_base 3: mod_base = OTHER; note = 2'-O-Methyl-cytidine
  modified_base 21: mod_base = OTHER; note = 2'-O-Methyl-guanosine
  modified_base 28: mod_base = OTHER; note = 2'-O-Methyl-adenosine
  modified_base 29: mod_base = OTHER; note = 2'-O-Methyl-guanosine
  modified_base 30: mod_base = OTHER; note = 2'-O-Methyl-cytidine
  modified_base 31: mod_base = OTHER; note = 2'-O-Methyl-uridine
  modified_base 32: mod_base = OTHER; note = 2'-O-Methyl-adenosine
  modified_base 34: mod_base = OTHER; note = 2'-O-Methyl-adenosine
  modified_base 35: mod_base = OTHER; note = 2'-O-Methyl-adenosine
  modified_base 36: mod_base = OTHER; note = 2'-O-Methyl-adenosine
  modified_base 37: mod_base = OTHER; note = 2'-O-Methyl-uridine
  modified_base 38: mod_base = OTHER; note = 2'-O-Methyl-adenosine
  modified_base 39: mod_base = OTHER; note = 2'-O-Methyl-guanosine
  modified_base 40: mod_base = OTHER; note = 2'-O-Methyl-cytidine
  modified_base 41: mod_base = OTHER; note = 2'-O-Methyl-adenosine
  modified_base 42: mod_base = OTHER; note = 2'-O-Methyl-adenosine
  modified_base 45: mod_base = OTHER; note = uridine phosphorothioate
  modified_base 46: mod_base = OTHER; note = 2'-O-Methyl-adenosine
  modified_base 48: mod_base = OTHER; note = 2'-O-Methyl-adenosine
  modified_base 50: mod_base = OTHER; note = 2'-O-Methyl-uridine
  modified_base 52: mod_base = OTHER; note = 2'-O-Methyl-adenosine
  modified_base 53: mod_base = OTHER; note = 2'-O-Methyl-guanosine
  modified_base 54: mod_base = OTHER; note = 2'-O-Methyl-guanosine
  modified_base 55: mod_base = OTHER; note = 2'-O-Methyl-cytidine
  modified_base 56: mod_base = OTHER; note = 2'-O-Methyl-uridine
  modified_base 57: mod_base = OTHER; note = 2'-O-Methyl-adenosine
  modified_base 60: mod_base = OTHER; note = 2'-O-Methyl-cytidine
  modified_base 61: mod_base = OTHER; note = 2'-O-Methyl-cytidine
  modified_base 66: mod_base = OTHER; note = 2'-O-Methyl-uridine
  modified_base 67: mod_base = OTHER; note = 2'-O-Methyl-cytidine
  modified_base 70: mod_base = OTHER; note = 2'-O-Methyl-cytidine
  modified_base 71: mod_base = OTHER; note = 2'-O-Methyl-uridine
  modified_base 72: mod_base = OTHER; note = 2'-O-Methyl-uridine
  modified_base 74: mod_base = OTHER; note = 2'-O-Methyl-adenosine
  modified_base 75: mod_base = OTHER; note = 2'-O-Methyl-adenosine
  modified_base 76: mod_base = OTHER; note = 2'-O-Methyl-adenosine
  modified_base 77: mod_base = OTHER; note = 2'-O-Methyl-adenosine
  modified_base 78: mod_base = OTHER; note = 2'-O-Methyl-adenosine
  modified_base 79: mod_base = OTHER; note = 2'-O-Methyl-guanosine
  modified_base 80: mod_base = OTHER; note = 2'-O-Methyl-uridine
  modified_base 81: mod_base = OTHER; note = 2'-O-Methyl-guanosine
  modified_base 83: mod_base = OTHER; note = 2'-O-Methyl-cytidine
  modified_base 84: mod_base = OTHER; note = 2'-O-Methyl-adenosine
  modified_base 85: mod_base = OTHER; note = 2'-O-Methyl-cytidine
  modified_base 86: mod_base = OTHER; note = 2'-O-Methyl-cytidine
  modified_base 87: mod_base = OTHER; note = 2'-O-Methyl-guanosine
  modified_base 88: mod_base = OTHER; note = 2'-O-Methyl-adenosine
  modified_base 89: mod_base = OTHER; note = 2'-O-Methyl-guanosine
  modified_base 90: mod_base = OTHER; note = 2'-O-Methyl-uridine
  modified_base 91: mod_base = OTHER; note = 2'-O-Methyl-cytidine
  modified_base 92: mod_base = OTHER; note = 2'-O-Methyl-guanosine
  modified_base 93: mod_base = OTHER; note = 2'-O-Methyl-guanosine
  modified_base 94: mod_base = OTHER; note = 2'-O-Methyl-uridine
  modified_base 95: mod_base = OTHER; note = 2'-O-Methyl-guanosine
  modified_base 96: mod_base = OTHER; note = 2'-O-Methyl-cytidine
  modified_base 97: mod_base = OTHER; note = 2'-O-Methyl-uridine
  modified_base 98: mod_base = OTHER; note = 2'-O-Methyl-uridine phosphorothioate
  modified_base 99: mod_base = OTHER; note = 2'-O-Methyl-uridine phosphorothioate
  modified_base 100: mod_base = OTHER; note = 2'-O-Methyl-uridine

SEQ ID NO: 2370 - RNA, 100 nt, synthetic construct; identical to SEQ ID NO: 422
  source 1..100: mol_type = other RNA
  modified_base 1: mod_base = OTHER; note = 2'-O-Methyl-guanosine phosphorothioate
  modified_base 2: mod_base = OTHER; note = 2'-O-Methyl-adenosine phosphorothioate
  modified_base 3: mod_base = OTHER; note = 2'-O-Methyl-guanosine
  modified_base 21: mod_base = OTHER; note = 2'-O-Methyl-guanosine
  modified_base 28: mod_base = OTHER; note = 2'-O-Methyl-adenosine
  modified_base 29: mod_base = OTHER; note = 2'-O-Methyl-guanosine
  modified_base 30: mod_base = OTHER; note = 2'-O-Methyl-cytidine
  modified_base 31: mod_base = OTHER; note = 2'-O-Methyl-uridine
  modified_base 32: mod_base = OTHER; note = 2'-O-Methyl-adenosine
  modified_base 33: mod_base = OTHER; note = 2'-O-Methyl-guanosine
  modified_base 34: mod_base = OTHER; note = 2'-O-Methyl-adenosine
  modified_base 35: mod_base = OTHER; note = 2'-O-Methyl-adenosine
  modified_base 36: mod_base = OTHER; note = 2'-O-Methyl-adenosine
  modified_base 37: mod_base = OTHER; note = 2'-O-Methyl-uridine
  modified_base 38: mod_base = OTHER; note = 2'-O-Methyl-adenosine
  modified_base 39: mod_base = OTHER; note = 2'-O-Methyl-guanosine
  modified_base 40: mod_base = OTHER; note = 2'-O-Methyl-cytidine
  modified_base 41: mod_base = OTHER; note = 2'-O-Methyl-adenosine
  modified_base 42: mod_base = OTHER; note = 2'-O-Methyl-adenosine
  modified_base 45: mod_base = OTHER; note = uridine phosphorothioate
  modified_base 46: mod_base = OTHER; note = 2'-O-Methyl-adenosine
  modified_base 48: mod_base = OTHER; note = 2'-O-Methyl-adenosine
  modified_base 50: mod_base = OTHER; note = 2'-O-Methyl-uridine
  modified_base 52: mod_base = OTHER; note = 2'-O-Methyl-adenosine
  modified_base 53: mod_base = OTHER; note = 2'-O-Methyl-guanosine
  modified_base 54: mod_base = OTHER; note = 2'-O-Methyl-guanosine
  modified_base 55: mod_base = OTHER; note = 2'-O-Methyl-cytidine
  modified_base 56: mod_base = OTHER; note = 2'-O-Methyl-uridine
  modified_base 57: mod_base = OTHER; note = 2'-O-Methyl-adenosine
  modified_base 60: mod_base = OTHER; note = 2'-O-Methyl-cytidine
  modified_base 61: mod_base = OTHER; note = 2'-O-Methyl-cytidine
  modified_base 66: mod_base = OTHER; note = 2'-O-Methyl-uridine
  modified_base 67: mod_base = OTHER; note = 2'-O-Methyl-cytidine
  modified_base 70: mod_base = OTHER; note = 2'-O-Methyl-cytidine
  modified_base 71: mod_base = OTHER; note = 2'-O-Methyl-uridine
  modified_base 72: mod_base = OTHER; note = 2'-O-Methyl-uridine
  modified_base 73: mod_base = OTHER; note = 2'-O-Methyl-guanosine
  modified_base 74: mod_base = OTHER; note = 2'-O-Methyl-adenosine
  modified_base 75: mod_base = OTHER; note = 2'-O-Methyl-adenosine
  modified_base 76: mod_base = OTHER; note = 2'-O-Methyl-adenosine
  modified_base 77: mod_base = OTHER; note = 2'-O-Methyl-adenosine
  modified_base 78: mod_base = OTHER; note = 2'-O-Methyl-adenosine
  modified_base 79: mod_base = OTHER; note = 2'-O-Methyl-guanosine
  modified_base 80: mod_base = OTHER; note = 2'-O-Methyl-uridine
  modified_base 81: mod_base = OTHER; note = 2'-O-Methyl-guanosine
  modified_base 83: mod_base = OTHER; note = 2'-O-Methyl-cytidine
  modified_base 84: mod_base = OTHER; note = 2'-O-Methyl-adenosine
  modified_base 85: mod_base = OTHER; note = 2'-O-Methyl-cytidine
  modified_base 86: mod_base = OTHER; note = 2'-O-Methyl-cytidine
  modified_base 87: mod_base = OTHER; note = 2'-O-Methyl-guanosine
  modified_base 88: mod_base = OTHER; note = 2'-O-Methyl-adenosine
  modified_base 89: mod_base = OTHER; note = 2'-O-Methyl-guanosine
  modified_base 90: mod_base = OTHER; note = 2'-O-Methyl-uridine
  modified_base 91: mod_base = OTHER; note = 2'-O-Methyl-cytidine
  modified_base 92: mod_base = OTHER; note = 2'-O-Methyl-guanosine
  modified_base 93: mod_base = OTHER; note = 2'-O-Methyl-guanosine
  modified_base 94: mod_base = OTHER; note = 2'-O-Methyl-uridine
  modified_base 95: mod_base = OTHER; note = 2'-O-Methyl-guanosine
  modified_base 96: mod_base = OTHER; note = 2'-O-Methyl-cytidine
  modified_base 97: mod_base = OTHER; note = 2'-O-Methyl-uridine
  modified_base 98: mod_base = OTHER; note = 2'-O-Methyl-uridine phosphorothioate
  modified_base 99: mod_base = OTHER; note = 2'-O-Methyl-uridine phosphorothioate
  modified_base 100: mod_base = OTHER; note = 2'-O-Methyl-uridine

SEQ ID NO: 2371 - RNA, 100 nt, synthetic construct; identical to SEQ ID NO: 422
  source 1..100: mol_type = other RNA
  modified_base 1: mod_base = OTHER; note = 2'-O-Methyl-guanosine phosphorothioate
  modified_base 2: mod_base = OTHER; note = 2'-O-Methyl-adenosine phosphorothioate
  modified_base 3: mod_base = OTHER; note = 2'-O-Methyl-guanosine
  modified_base 21: mod_base = OTHER; note = 2'-O-Methyl-guanosine
  modified_base 28: mod_base = OTHER; note = 2'-O-Methyl-adenosine
  modified_base 29: mod_base = OTHER; note = 2'-O-Methyl-guanosine
  modified_base 30: mod_base = OTHER; note = 2'-O-Methyl-cytidine
  modified_base 31: mod_base = OTHER; note = 2'-O-Methyl-uridine
  modified_base 32: mod_base = OTHER; note = 2'-O-Methyl-adenosine
  modified_base 34: mod_base = OTHER; note = 2'-O-Methyl-adenosine
  modified_base 35: mod_base = OTHER; note = 2'-O-Methyl-adenosine
  modified_base 36: mod_base = OTHER; note = 2'-O-Methyl-adenosine
  modified_base 37: mod_base = OTHER; note = 2'-O-Methyl-uridine
  modified_base 38: mod_base = OTHER; note = 2'-O-Methyl-adenosine
  modified_base 39: mod_base = OTHER; note = 2'-O-Methyl-guanosine
  modified_base 40: mod_base = OTHER; note = 2'-O-Methyl-cytidine
  modified_base 41: mod_base = OTHER; note = 2'-O-Methyl-adenosine
  modified_base 42: mod_base = OTHER; note = 2'-O-Methyl-adenosine
  modified_base 45: mod_base = OTHER; note = uridine phosphorothioate
  modified_base 46: mod_base = OTHER; note = 2'-O-Methyl-adenosine
  modified_base 48: mod_base = OTHER; note = 2'-O-Methyl-adenosine
  modified_base 50: mod_base = OTHER; note = 2'-O-Methyl-uridine
  modified_base 52: mod_base = OTHER; note = 2'-O-Methyl-adenosine
  modified_base 53: mod_base = OTHER; note = 2'-O-Methyl-guanosine
  modified_base 54: mod_base = OTHER; note = 2'-O-Methyl-guanosine
  modified_base 55: mod_base = OTHER; note = 2'-O-Methyl-cytidine
  modified_base 56: mod_base = OTHER; note = 2'-O-Methyl-uridine
  modified_base 57: mod_base = OTHER; note = 2'-O-Methyl-adenosine
  modified_base 60: mod_base = OTHER; note = 2'-O-Methyl-cytidine
  modified_base 61: mod_base = OTHER; note = 2'-O-Methyl-cytidine
  modified_base 66: mod_base = OTHER; note = 2'-O-Methyl-uridine
  modified_base 67: mod_base = OTHER; note = 2'-O-Methyl-cytidine
  modified_base 70: mod_base = OTHER; note = 2'-O-Methyl-cytidine
  modified_base 71: mod_base = OTHER; note = 2'-O-Methyl-uridine
  modified_base 72: mod_base = OTHER; note = 2'-O-Methyl-uridine
  modified_base 74: mod_base = OTHER; note = 2'-O-Methyl-adenosine
  modified_base 75: mod_base = OTHER; note = 2'-O-Methyl-adenosine
  modified_base 76: mod_base = OTHER; note = 2'-O-Methyl-adenosine
  modified_base 77: mod_base = OTHER; note = 2'-O-Methyl-adenosine
  modified_base 78: mod_base = OTHER; note = 2'-O-Methyl-adenosine
  modified_base 79: mod_base = OTHER; note = 2'-O-Methyl-guanosine
  modified_base 80: mod_base = OTHER; note = 2'-O-Methyl-uridine
  modified_base 81: mod_base = OTHER; note = 2'-O-Methyl-guanosine
  modified_base 83: mod_base = OTHER; note = 2'-O-Methyl-cytidine
  modified_base 84: mod_base = OTHER; note = 2'-O-Methyl-adenosine
  modified_base 85: mod_base = OTHER; note = 2'-O-Methyl-cytidine
  modified_base 86: mod_base = OTHER; note = 2'-O-Methyl-cytidine
  modified_base 87: mod_base = OTHER; note = 2'-O-Methyl-guanosine
  modified_base 88: mod_base = OTHER; note = 2'-O-Methyl-adenosine
  modified_base 89: mod_base = OTHER; note = 2'-O-Methyl-guanosine
  modified_base 90: mod_base = OTHER; note = 2'-O-Methyl-uridine
  modified_base 91: mod_base = OTHER; note = 2'-O-Methyl-cytidine
  modified_base 92: mod_base = OTHER; note = 2'-O-Methyl-guanosine
  modified_base 93: mod_base = OTHER; note = 2'-O-Methyl-guanosine
  modified_base 94: mod_base = OTHER; note = 2'-O-Methyl-uridine
  modified_base 95: mod_base = OTHER; note = 2'-O-Methyl-guanosine
  modified_base 96: mod_base = OTHER; note = 2'-O-Methyl-cytidine
  modified_base 97: mod_base = OTHER; note = 2'-O-Methyl-uridine
  modified_base 98: mod_base = OTHER; note = 2'-O-Methyl-uridine phosphorothioate
  modified_base 99: mod_base = OTHER; note = 2'-O-Methyl-uridine phosphorothioate
  modified_base 100: mod_base = OTHER; note = 2'-O-Methyl-uridine

SEQ ID NO: 2372 - RNA, 100 nt, synthetic construct; identical to SEQ ID NO: 55
  source 1..100: mol_type = other RNA
  modified_base 1: mod_base = OTHER; note = 2'-O-Methyl-cytidine phosphorothioate
  modified_base 2: mod_base = OTHER; note = 2'-O-Methyl-adenosine phosphorothioate
  modified_base 3: mod_base = OTHER; note = 2'-O-Methyl-guanosine
  modified_base 21: mod_base = OTHER; note = 2'-O-Methyl-guanosine
  modified_base 28: mod_base = OTHER; note = 2'-O-Methyl-adenosine
  modified_base 29: mod_base = OTHER; note = 2'-O-Methyl-guanosine
  modified_base 30: mod_base = OTHER; note = 2'-O-Methyl-cytidine
  modified_base 31: mod_base = OTHER; note = 2'-O-Methyl-uridine
  modified_base 32: mod_base = OTHER; note = 2'-O-Methyl-adenosine
  modified_base 33: mod_base = OTHER; note = 2'-O-Methyl-guanosine
  modified_base 34: mod_base = OTHER; note = 2'-O-Methyl-adenosine
  modified_base 35: mod_base = OTHER; note = 2'-O-Methyl-adenosine
  modified_base 36: mod_base = OTHER; note = 2'-O-Methyl-adenosine
  modified_base 37: mod_base = OTHER; note = 2'-O-Methyl-uridine
  modified_base 38: mod_base = OTHER; note = 2'-O-Methyl-adenosine
  modified_base 39: mod_base = OTHER; note = 2'-O-Methyl-guanosine
  modified_base 40: mod_base = OTHER; note = 2'-O-Methyl-cytidine
  modified_base 41: mod_base = OTHER; note = 2'-O-Methyl-adenosine
  modified_base 42: mod_base = OTHER; note = 2'-O-Methyl-adenosine
  modified_base 45: mod_base = OTHER; note = uridine phosphorothioate
  modified_base 46: mod_base = OTHER; note = 2'-O-Methyl-adenosine
  modified_base 48: mod_base = OTHER; note = 2'-O-Methyl-adenosine
  modified_base 50: mod_base = OTHER; note = 2'-O-Methyl-uridine
  modified_base 52: mod_base = OTHER; note = 2'-O-Methyl-adenosine
  modified_base 53: mod_base = OTHER; note = 2'-O-Methyl-guanosine
  modified_base 54: mod_base = OTHER; note = 2'-O-Methyl-guanosine
  modified_base 57: mod_base = OTHER; note = 2'-O-Methyl-adenosine
  modified_base 61: mod_base = OTHER; note = 2'-O-Methyl-cytidine
  modified_base 66: mod_base = OTHER; note = 2'-O-Methyl-uridine
  modified_base 67: mod_base = OTHER; note = 2'-O-Methyl-cytidine
  modified_base 70: mod_base = OTHER; note = 2'-O-Methyl-cytidine
  modified_base 71: mod_base = OTHER; note = 2'-O-Methyl-uridine
  modified_base 72: mod_base = OTHER; note = 2'-O-Methyl-uridine
  modified_base 74: mod_base = OTHER; note = 2'-O-Methyl-adenosine
  modified_base 75: mod_base = OTHER; note = 2'-O-Methyl-adenosine
  modified_base 76: mod_base = OTHER; note = 2'-O-Methyl-adenosine
  modified_base 77: mod_base = OTHER; note = 2'-O-Methyl-adenosine
  modified_base 78: mod_base = OTHER; note = 2'-O-Methyl-adenosine
  modified_base 79: mod_base = OTHER; note = 2'-O-Methyl-guanosine
  modified_base 80: mod_base = OTHER; note = 2'-O-Methyl-uridine
  modified_base 82: mod_base = OTHER; note = 2'-O-Methyl-guanosine
  modified_base 83: mod_base = OTHER; note = 2'-O-Methyl-cytidine
  modified_base 84: mod_base = OTHER; note = 2'-O-Methyl-adenosine
  modified_base 85: mod_base = OTHER; note = 2'-O-Methyl-cytidine
  modified_base 86: mod_base = OTHER; note = 2'-O-Methyl-cytidine
  modified_base 87: mod_base = OTHER; note = 2'-O-Methyl-guanosine
  modified_base 89: mod_base = OTHER; note = 2'-O-Methyl-guanosine
  modified_base 92: mod_base = OTHER; note = 2'-O-Methyl-guanosine
  modified_base 93: mod_base = OTHER; note = 2'-O-Methyl-guanosine
  modified_base 94: mod_base = OTHER; note = 2'-O-Methyl-uridine
  modified_base 95: mod_base = OTHER; note = 2'-O-Methyl-guanosine
  modified_base 96: mod_base = OTHER; note = 2'-O-Methyl-cytidine
  modified_base 97: mod_base = OTHER; note = 2'-O-Methyl-uridine
  modified_base 98: mod_base = OTHER; note = 2'-O-Methyl-uridine phosphorothioate
  modified_base 99: mod_base = OTHER; note = 2'-O-Methyl-uridine phosphorothioate
  modified_base 100: mod_base = OTHER; note = 2'-O-Methyl-uridine

SEQ ID NO: 2373 - RNA, 100 nt, synthetic construct; identical to SEQ ID NO: 55
  source 1..100: mol_type = other RNA
  modified_base 1: mod_base = OTHER; note = 2'-O-Methyl-cytidine phosphorothioate
  modified_base 2: mod_base = OTHER; note = 2'-O-Methyl-adenosine phosphorothioate
  modified_base 3: mod_base = OTHER; note = 2'-O-Methyl-guanosine
  modified_base 21: mod_base = OTHER; note = 2'-O-Methyl-guanosine
  modified_base 28: mod_base = OTHER; note = 2'-O-Methyl-adenosine
  modified_base 29: mod_base = OTHER; note = 2'-O-Methyl-guanosine
  modified_base 30: mod_base = OTHER; note = 2'-O-Methyl-cytidine
  modified_base 31: mod_base = OTHER; note = 2'-O-Methyl-uridine
  modified_base 32: mod_base = OTHER; note = 2'-O-Methyl-adenosine
  modified_base 33: mod_base = OTHER; note = 2'-O-Methyl-guanosine
  modified_base 34: mod_base = OTHER; note = 2'-O-Methyl-adenosine
  modified_base 35: mod_base = OTHER; note = 2'-O-Methyl-adenosine
  modified_base 36: mod_base = OTHER; note = 2'-O-Methyl-adenosine
  modified_base 37: mod_base = OTHER; note = 2'-O-Methyl-uridine
  modified_base 38: mod_base = OTHER; note = 2'-O-Methyl-adenosine
  modified_base 39: mod_base = OTHER; note = 2'-O-Methyl-guanosine
  modified_base 40: mod_base = OTHER; note = 2'-O-Methyl-cytidine
  modified_base 41: mod_base = OTHER; note = 2'-O-Methyl-adenosine
  modified_base 42: mod_base = OTHER; note = 2'-O-Methyl-adenosine
  modified_base 45: mod_base = OTHER; note = uridine phosphorothioate
  modified_base 46: mod_base = OTHER; note = 2'-O-Methyl-adenosine
  modified_base 48: mod_base = OTHER; note = 2'-O-Methyl-adenosine
  modified_base 50: mod_base = OTHER; note = 2'-O-Methyl-uridine
  modified_base 52: mod_base = OTHER; note = 2'-O-Methyl-adenosine
  modified_base 53: mod_base = OTHER; note = 2'-O-Methyl-guanosine
  modified_base 54: mod_base = OTHER; note = 2'-O-Methyl-guanosine
  modified_base 55: mod_base = OTHER; note = 2'-O-Methyl-cytidine
  modified_base 56: mod_base = OTHER; note = 2'-O-Methyl-uridine
  modified_base 57: mod_base = OTHER; note = 2'-O-Methyl-adenosine
  modified_base 60: mod_base = OTHER; note = 2'-O-Methyl-cytidine
  modified_base 61: mod_base = OTHER; note = 2'-O-Methyl-cytidine
  modified_base 66: mod_base = OTHER; note = 2'-O-Methyl-uridine
  modified_base 67: mod_base = OTHER; note = 2'-O-Methyl-cytidine
  modified_base 70: mod_base = OTHER; note = 2'-O-Methyl-cytidine
  modified_base 71: mod_base = OTHER; note = 2'-O-Methyl-uridine
  modified_base 72: mod_base = OTHER; note = 2'-O-Methyl-uridine
  modified_base 74: mod_base = OTHER; note = 2'-O-Methyl-adenosine
  modified_base 75: mod_base = OTHER; note = 2'-O-Methyl-adenosine
  modified_base 76: mod_base = OTHER; note = 2'-O-Methyl-adenosine
  modified_base 77: mod_base = OTHER; note = 2'-O-Methyl-adenosine
  modified_base 78: mod_base = OTHER; note = 2'-O-Methyl-adenosine
  modified_base 79: mod_base = OTHER; note = 2'-O-Methyl-guanosine
  modified_base 80: mod_base = OTHER; note = 2'-O-Methyl-uridine
  modified_base 82: mod_base = OTHER; note = 2'-O-Methyl-guanosine
  modified_base 83: mod_base = OTHER; note = 2'-O-Methyl-cytidine
  modified_base 84: mod_base = OTHER; note = 2'-O-Methyl-adenosine
  modified_base 85: mod_base = OTHER; note = 2'-O-Methyl-cytidine
  modified_base 86: mod_base = OTHER; note = 2'-O-Methyl-cytidine
  modified_base 87: mod_base = OTHER; note = 2'-O-Methyl-guanosine
  modified_base 89: mod_base = OTHER; note = 2'-O-Methyl-guanosine
  modified_base 92: mod_base = OTHER; note = 2'-O-Methyl-guanosine
  modified_base 93: mod_base = OTHER; note = 2'-O-Methyl-guanosine
  modified_base 94: mod_base = OTHER; note = 2'-O-Methyl-uridine
  modified_base 95: mod_base = OTHER; note = 2'-O-Methyl-guanosine
  modified_base 96: mod_base = OTHER; note = 2'-O-Methyl-cytidine
  modified_base 97: mod_base = OTHER; note = 2'-O-Methyl-uridine
  modified_base 98: mod_base = OTHER; note = 2'-O-Methyl-uridine phosphorothioate
  modified_base 99: mod_base = OTHER; note = 2'-O-Methyl-uridine phosphorothioate
  modified_base 100: mod_base = OTHER; note = 2'-O-Methyl-uridine

SEQ ID NO: 2374 - RNA, 100 nt, synthetic construct; identical to SEQ ID NO: 55
  source 1..100: mol_type = other RNA
  modified_base 1: mod_base = OTHER; note = 2'-O-Methyl-cytidine phosphorothioate
  modified_base 2: mod_base = OTHER; note = 2'-O-Methyl-adenosine phosphorothioate
  modified_base 3: mod_base = OTHER; note = 2'-O-Methyl-guanosine
  modified_base 21: mod_base = OTHER; note = 2'-O-Methyl-guanosine
  modified_base 28: mod_base = OTHER; note = 2'-O-Methyl-adenosine
  modified_base 29: mod_base = OTHER; note = 2'-O-Methyl-guanosine
  modified_base 30: mod_base = OTHER; note = 2'-O-Methyl-cytidine
  modified_base 31: mod_base = OTHER; note = 2'-O-Methyl-uridine
  modified_base 32: mod_base = OTHER; note = 2'-O-Methyl-adenosine
  modified_base 33: mod_base = OTHER; note = 2'-O-Methyl-guanosine
  modified_base 34: mod_base = OTHER; note = 2'-O-Methyl-adenosine
  modified_base 35: mod_base = OTHER; note = 2'-O-Methyl-adenosine
  modified_base 36: mod_base = OTHER; note = 2'-O-Methyl-adenosine
  modified_base 37: mod_base = OTHER; note = 2'-O-Methyl-uridine
  modified_base 38: mod_base = OTHER; note = 2'-O-Methyl-adenosine
  modified_base 39: mod_base = OTHER; note = 2'-O-Methyl-guanosine
  modified_base 40: mod_base = OTHER; note = 2'-O-Methyl-cytidine
  modified_base 41: mod_base = OTHER; note = 2'-O-Methyl-adenosine
  modified_base 42: mod_base = OTHER; note = 2'-O-Methyl-adenosine
  modified_base 45: mod_base = OTHER; note = uridine phosphorothioate
  modified_base 46: mod_base = OTHER; note = 2'-O-Methyl-adenosine
  modified_base 48: mod_base = OTHER; note = 2'-O-Methyl-adenosine
  modified_base 50: mod_base = OTHER; note = 2'-O-Methyl-uridine
  modified_base 52: mod_base = OTHER; note = 2'-O-Methyl-adenosine
  modified_base 53: mod_base = OTHER; note = 2'-O-Methyl-guanosine
  modified_base 54: mod_base = OTHER; note = 2'-O-Methyl-guanosine
  modified_base 57: mod_base = OTHER; note = 2'-O-Methyl-adenosine
  modified_base 61: mod_base = OTHER; note = 2'-O-Methyl-cytidine
  modified_base 66: mod_base = OTHER; note = 2'-O-Methyl-uridine
  modified_base 67: mod_base = OTHER; note = 2'-O-Methyl-cytidine
  modified_base 70: mod_base = OTHER; note = 2'-O-Methyl-cytidine
  modified_base 71: mod_base = OTHER; note = 2'-O-Methyl-uridine
  modified_base 72: mod_base = OTHER; note = 2'-O-Methyl-uridine
  modified_base 73: mod_base = OTHER; note = 2'-O-Methyl-guanosine
  modified_base 74: mod_base = OTHER; note = 2'-O-Methyl-adenosine
  modified_base 75: mod_base = OTHER; note = 2'-O-Methyl-adenosine
  modified_base 76: mod_base = OTHER; note = 2'-O-Methyl-adenosine
  modified_base 77: mod_base = OTHER; note = 2'-O-Methyl-adenosine
  modified_base 78: mod_base = OTHER; note = 2'-O-Methyl-adenosine
  modified_base 79: mod_base = OTHER; note = 2'-O-Methyl-guanosine
  modified_base 80: mod_base = OTHER; note = 2'-O-Methyl-uridine
  modified_base 82: mod_base = OTHER; note = 2'-O-Methyl-guanosine
  modified_base 83: mod_base = OTHER; note = 2'-O-Methyl-cytidine
  modified_base 84: mod_base = OTHER; note = 2'-O-Methyl-adenosine
  modified_base 85: mod_base = OTHER; note = 2'-O-Methyl-cytidine
  modified_base 86: mod_base = OTHER; note = 2'-O-Methyl-cytidine
  modified_base 87: mod_base = OTHER; note = 2'-O-Methyl-guanosine
  modified_base 89: mod_base = OTHER; note = 2'-O-Methyl-guanosine
  modified_base 91: mod_base = OTHER; note = 2'-O-Methyl-cytidine
  modified_base 92: mod_base = OTHER; note = 2'-O-Methyl-guanosine
  modified_base 93: mod_base = OTHER; note = 2'-O-Methyl-guanosine
  modified_base 94: mod_base = OTHER; note = 2'-O-Methyl-uridine
  modified_base 95: mod_base = OTHER; note = 2'-O-Methyl-guanosine
  modified_base 96: mod_base = OTHER; note = 2'-O-Methyl-cytidine
  modified_base 97: mod_base = OTHER; note = 2'-O-Methyl-uridine
  modified_base 98: mod_base = OTHER; note = 2'-O-Methyl-uridine phosphorothioate
  modified_base 99: mod_base = OTHER; note = 2'-O-Methyl-uridine phosphorothioate
  modified_base 100: mod_base = OTHER; note = 2'-O-Methyl-uridine

SEQ ID NO: 2375 - RNA, 100 nt, synthetic construct; identical to SEQ ID NO: 55
  source 1..100: mol_type = other RNA
  modified_base 1: mod_base = OTHER; note = 2'-O-Methyl-cytidine phosphorothioate
  modified_base 2: mod_base = OTHER; note = 2'-O-Methyl-adenosine phosphorothioate
  modified_base 3: mod_base = OTHER; note = 2'-O-Methyl-guanosine
  modified_base 21: mod_base = OTHER; note = 2'-O-Methyl-guanosine
  modified_base 28: mod_base = OTHER; note = 2'-O-Methyl-adenosine
  modified_base 29: mod_base = OTHER; note = 2'-O-Methyl-guanosine
  modified_base 30: mod_base = OTHER; note = 2'-O-Methyl-cytidine
  modified_base 31: mod_base = OTHER; note = 2'-O-Methyl-uridine
  modified_base 32: mod_base = OTHER; note = 2'-O-Methyl-adenosine
  modified_base 34: mod_base = OTHER; note = 2'-O-Methyl-adenosine
  modified_base 35: mod_base = OTHER; note = 2'-O-Methyl-adenosine
  modified_base 36: mod_base = OTHER; note = 2'-O-Methyl-adenosine
  modified_base 37: mod_base = OTHER; note = 2'-O-Methyl-uridine
  modified_base 38: mod_base = OTHER; note = 2'-O-Methyl-adenosine
  modified_base 39: mod_base = OTHER; note = 2'-O-Methyl-guanosine
  modified_base 40: mod_base = OTHER; note = 2'-O-Methyl-cytidine
  modified_base 41: mod_base = OTHER; note = 2'-O-Methyl-adenosine
  modified_base 42: mod_base = OTHER; note = 2'-O-Methyl-adenosine
  modified_base 45: mod_base = OTHER; note = uridine phosphorothioate
  modified_base 46: mod_base = OTHER; note = 2'-O-Methyl-adenosine
  modified_base 48: mod_base = OTHER; note = 2'-O-Methyl-adenosine
  modified_base 50: mod_base = OTHER; note = 2'-O-Methyl-uridine
  modified_base 52: mod_base = OTHER; note = 2'-O-Methyl-adenosine
  modified_base 53: mod_base = OTHER; note = 2'-O-Methyl-guanosine
  modified_base 54: mod_base = OTHER; note = 2'-O-Methyl-guanosine
  modified_base 57: mod_base = OTHER; note = 2'-O-Methyl-adenosine
  modified_base 61: mod_base = OTHER; note = 2'-O-Methyl-cytidine
  modified_base 66: mod_base = OTHER; note = 2'-O-Methyl-uridine
  modified_base 67: mod_base = OTHER; note = 2'-O-Methyl-cytidine
  modified_base 70: mod_base = OTHER; note = 2'-O-Methyl-cytidine
  modified_base 71: mod_base = OTHER; note = 2'-O-Methyl-uridine
  modified_base 72: mod_base = OTHER; note = 2'-O-Methyl-uridine
  modified_base 73: mod_base = OTHER; note = 2'-O-Methyl-guanosine
  modified_base 74: mod_base = OTHER; note = 2'-O-Methyl-adenosine
  modified_base 75: mod_base = OTHER; note = 2'-O-Methyl-adenosine
  modified_base 76: mod_base = OTHER; note = 2'-O-Methyl-adenosine
  modified_base 77: mod_base = OTHER; note = 2'-O-Methyl-adenosine
  modified_base 78: mod_base = OTHER; note = 2'-O-Methyl-adenosine
  modified_base 79: mod_base = OTHER; note = 2'-O-Methyl-guanosine
  modified_base 80: mod_base = OTHER; note = 2'-O-Methyl-uridine
  modified_base 82: mod_base = OTHER; note = 2'-O-Methyl-guanosine
  modified_base 83: mod_base = OTHER; note = 2'-O-Methyl-cytidine
  modified_base 84: mod_base = OTHER; note = 2'-O-Methyl-adenosine
  modified_base 85: mod_base = OTHER; note = 2'-O-Methyl-cytidine
  modified_base 86: mod_base = OTHER; note = 2'-O-Methyl-cytidine
  modified_base 87: mod_base = OTHER; note = 2'-O-Methyl-guanosine
  modified_base 89: mod_base = OTHER; note = 2'-O-Methyl-guanosine
  modified_base 92: mod_base = OTHER; note = 2'-O-Methyl-guanosine
  modified_base 93: mod_base = OTHER; note = 2'-O-Methyl-guanosine
  modified_base 94: mod_base = OTHER; note = 2'-O-Methyl-uridine
  modified_base 95: mod_base = OTHER; note = 2'-O-Methyl-guanosine
  modified_base 96: mod_base = OTHER; note = 2'-O-Methyl-cytidine
  modified_base 97: mod_base = OTHER; note = 2'-O-Methyl-uridine
  modified_base 98: mod_base = OTHER; note = 2'-O-Methyl-uridine phosphorothioate
  modified_base 99: mod_base = OTHER; note = 2'-O-Methyl-uridine phosphorothioate
  modified_base 100: mod_base = OTHER; note = 2'-O-Methyl-uridine

SEQ ID NO: 2376 - RNA, 100 nt, synthetic construct; identical to SEQ ID NO: 55
  source 1..100: mol_type = other RNA
  modified_base 1: mod_base = OTHER; note = 2'-O-Methyl-cytidine phosphorothioate
  modified_base 2: mod_base = OTHER; note = 2'-O-Methyl-adenosine phosphorothioate
  modified_base 3: mod_base = OTHER; note = 2'-O-Methyl-guanosine
  modified_base 21: mod_base = OTHER; note = 2'-O-Methyl-guanosine
  modified_base 28: mod_base = OTHER; note = 2'-O-Methyl-adenosine
  modified_base 29: mod_base = OTHER; note = 2'-O-Methyl-guanosine
  modified_base 30: mod_base = OTHER; note = 2'-O-Methyl-cytidine
  modified_base 31: mod_base = OTHER; note = 2'-O-Methyl-uridine
  modified_base 32: mod_base = OTHER; note = 2'-O-Methyl-adenosine
  modified_base 34: mod_base = OTHER; note = 2'-O-Methyl-adenosine
  modified_base 35: mod_base = OTHER; note = 2'-O-Methyl-adenosine
  modified_base 36: mod_base = OTHER; note = 2'-O-Methyl-adenosine
  modified_base 37: mod_base = OTHER; note = 2'-O-Methyl-uridine
  modified_base 38: mod_base = OTHER; note = 2'-O-Methyl-adenosine
  modified_base 39: mod_base = OTHER; note = 2'-O-Methyl-guanosine
  modified_base 40: mod_base = OTHER; note = 2'-O-Methyl-cytidine
  modified_base 41: mod_base = OTHER; note = 2'-O-Methyl-adenosine
  modified_base 42: mod_base = OTHER; note = 2'-O-Methyl-adenosine
  modified_base 45: mod_base = OTHER; note = uridine phosphorothioate
  modified_base 46: mod_base = OTHER; note = 2'-O-Methyl-adenosine
  modified_base 48: mod_base = OTHER; note = 2'-O-Methyl-adenosine
  modified_base 50: mod_base = OTHER; note = 2'-O-Methyl-uridine
  modified_base 52: mod_base = OTHER; note = 2'-O-Methyl-adenosine
  modified_base 53: mod_base = OTHER; note = 2'-O-Methyl-guanosine
  modified_base 54: mod_base = OTHER; note = 2'-O-Methyl-guanosine
  modified_base 57: mod_base = OTHER; note = 2'-O-Methyl-adenosine
  modified_base 61: mod_base = OTHER; note = 2'-O-Methyl-cytidine
  modified_base 66: mod_base = OTHER; note = 2'-O-Methyl-uridine
  modified_base 67: mod_base = OTHER; note = 2'-O-Methyl-cytidine
  modified_base 70: mod_base = OTHER; note = 2'-O-Methyl-cytidine
  modified_base 71: mod_base = OTHER; note = 2'-O-Methyl-uridine
  modified_base 72: mod_base = OTHER; note = 2'-O-Methyl-uridine
  modified_base 73: mod_base = OTHER; note = 2'-O-Methyl-guanosine
  modified_base 74: mod_base = OTHER; note = 2'-O-Methyl-adenosine
  modified_base 75: mod_base = OTHER; note = 2'-O-Methyl-adenosine
  modified_base 76: mod_base = OTHER; note = 2'-O-Methyl-adenosine
  modified_base 77: mod_base = OTHER; note = 2'-O-Methyl-adenosine
  modified_base 78: mod_base = OTHER; note = 2'-O-Methyl-adenosine
  modified_base 79: mod_base = OTHER; note = 2'-O-Methyl-guanosine
  modified_base 80: mod_base = OTHER; note = 2'-O-Methyl-uridine
  modified_base 82: mod_base = OTHER; note = 2'-O-Methyl-guanosine
  modified_base 83: mod_base = OTHER; note = 2'-O-Methyl-cytidine
  modified_base 84: mod_base = OTHER; note = 2'-O-Methyl-adenosine
  modified_base 85: mod_base = OTHER; note = 2'-O-Methyl-cytidine
  modified_base 86: mod_base = OTHER; note = 2'-O-Methyl-cytidine
  modified_base 87: mod_base = OTHER; note = 2'-O-Methyl-guanosine
  modified_base 89: mod_base = OTHER; note = 2'-O-Methyl-guanosine
  modified_base 91: mod_base = OTHER; note = 2'-O-Methyl-cytidine
  modified_base 92: mod_base = OTHER; note = 2'-O-Methyl-guanosine
  modified_base 93: mod_base = OTHER; note = 2'-O-Methyl-guanosine
  modified_base 94: mod_base = OTHER; note = 2'-O-Methyl-uridine
  modified_base 95: mod_base = OTHER; note = 2'-O-Methyl-guanosine
  modified_base 96: mod_base = OTHER; note = 2'-O-Methyl-cytidine
  modified_base 97: mod_base = OTHER; note = 2'-O-Methyl-uridine
  modified_base 98: mod_base = OTHER; note = 2'-O-Methyl-uridine phosphorothioate
  modified_base 99: mod_base = OTHER; note = 2'-O-Methyl-uridine phosphorothioate
  modified_base 100: mod_base = OTHER; note = 2'-O-Methyl-uridine

SEQ ID NO: 2377 - RNA, 100 nt, synthetic construct; identical to SEQ ID NO: 55
  source 1..100: mol_type = other RNA
  modified_base 1: mod_base = OTHER; note = 2'-O-Methyl-cytidine phosphorothioate
  modified_base 2: mod_base = OTHER; note = 2'-O-Methyl-adenosine phosphorothioate
  modified_base 3: mod_base = OTHER; note = 2'-O-Methyl-guanosine
  modified_base 21: mod_base = OTHER; note = 2'-O-Methyl-guanosine
  modified_base 28: mod_base = OTHER; note = 2'-O-Methyl-adenosine
  modified_base 29: mod_base = OTHER; note = 2'-O-Methyl-guanosine
  modified_base 30: mod_base = OTHER; note = 2'-O-Methyl-cytidine
  modified_base 31: mod_base = OTHER; note = 2'-O-Methyl-uridine
  modified_base 32: mod_base = OTHER; note = 2'-O-Methyl-adenosine
  modified_base 34: mod_base = OTHER; note = 2'-O-Methyl-adenosine
  modified_base 35: mod_base = OTHER; note = 2'-O-Methyl-adenosine
  modified_base 36: mod_base = OTHER; note = 2'-O-Methyl-adenosine
  modified_base 37: mod_base = OTHER; note = 2'-O-Methyl-uridine
  modified_base 38: mod_base = OTHER; note = 2'-O-Methyl-adenosine
  modified_base 39: mod_base = OTHER; note = 2'-O-Methyl-guanosine
  modified_base 40: mod_base = OTHER; note = 2'-O-Methyl-cytidine
  modified_base 41: mod_base = OTHER; note = 2'-O-Methyl-adenosine
  modified_base 42: mod_base = OTHER; note = 2'-O-Methyl-adenosine
  modified_base 45: mod_base = OTHER; note = uridine phosphorothioate
  modified_base 46: mod_base = OTHER; note = 2'-O-Methyl-adenosine
  modified_base 48: mod_base = OTHER; note = 2'-O-Methyl-adenosine
  modified_base 50: mod_base = OTHER; note = 2'-O-Methyl-uridine
  modified_base 52: mod_base = OTHER; note = 2'-O-Methyl-adenosine
  modified_base 53: mod_base = OTHER; note = 2'-O-Methyl-guanosine
  modified_base 54: mod_base = OTHER; note = 2'-O-Methyl-guanosine
  modified_base 55: mod_base = OTHER; note = 2'-O-Methyl-cytidine
  modified_base 56: mod_base = OTHER; note = 2'-O-Methyl-uridine
  modified_base 57: mod_base = OTHER; note = 2'-O-Methyl-adenosine
  modified_base 60: mod_base = OTHER; note = 2'-O-Methyl-cytidine
  modified_base 61: mod_base = OTHER; note = 2'-O-Methyl-cytidine
  modified_base 66: mod_base = OTHER; note = 2'-O-Methyl-uridine
  modified_base 67: mod_base = OTHER; note = 2'-O-Methyl-cytidine
  modified_base 70: mod_base = OTHER; note = 2'-O-Methyl-cytidine
  modified_base 71: mod_base = OTHER; note = 2'-O-Methyl-uridine
  modified_base 72: mod_base = OTHER; note = 2'-O-Methyl-uridine
  modified_base 74: mod_base = OTHER; note = 2'-O-Methyl-adenosine
  modified_base 75: mod_base = OTHER; note = 2'-O-Methyl-adenosine
  modified_base 76: mod_base = OTHER; note = 2'-O-Methyl-adenosine
  modified_base 77: mod_base = OTHER; note = 2'-O-Methyl-adenosine
  modified_base 78: mod_base = OTHER; note = 2'-O-Methyl-adenosine
  modified_base 79: mod_base = OTHER; note = 2'-O-Methyl-guanosine
  modified_base 80: mod_base = OTHER; note = 2'-O-Methyl-uridine
  modified_base 82: mod_base = OTHER; note = 2'-O-Methyl-guanosine
  modified_base 83: mod_base = OTHER; note = 2'-O-Methyl-cytidine
  modified_base 84: mod_base = OTHER; note = 2'-O-Methyl-adenosine
  modified_base 85: mod_base = OTHER; note = 2'-O-Methyl-cytidine
  modified_base 86: mod_base = OTHER; note = 2'-O-Methyl-cytidine
  modified_base 87: mod_base = OTHER; note = 2'-O-Methyl-guanosine
  modified_base 89: mod_base = OTHER; note = 2'-O-Methyl-guanosine
  modified_base 92: mod_base = OTHER; note = 2'-O-Methyl-guanosine
  modified_base 93: mod_base = OTHER; note = 2'-O-Methyl-guanosine
  modified_base 94: mod_base = OTHER; note = 2'-O-Methyl-uridine
  modified_base 95: mod_base = OTHER; note = 2'-O-Methyl-guanosine
  modified_base 96: mod_base = OTHER; note = 2'-O-Methyl-cytidine
  modified_base 97: mod_base = OTHER; note = 2'-O-Methyl-uridine
  modified_base 98: mod_base = OTHER; note = 2'-O-Methyl-uridine phosphorothioate
  modified_base 99: mod_base = OTHER; note = 2'-O-Methyl-uridine phosphorothioate
  modified_base 100: mod_base = OTHER; note = 2'-O-Methyl-uridine

SEQ ID NO: 2378 - RNA, 100 nt, synthetic construct; identical to SEQ ID NO: 421
  source 1..100: mol_type = other RNA
  modified_base 1: mod_base = OTHER; note = 2'-O-Methyl-cytidine phosphorothioate
  modified_base 2: mod_base = OTHER; note = 2'-O-Methyl-cytidine phosphorothioate
  modified_base 3: mod_base = OTHER; note = 2'-O-Methyl-cytidine
  modified_base 21: mod_base = OTHER; note = 2'-O-Methyl-guanosine
  modified_base 25: mod_base = OTHER; note = uridine phosphorothioate
  modified_base 28: mod_base = OTHER; note = 2'-O-Methyl-adenosine
  modified_base 29: mod_base = OTHER; note = 2'-O-Methyl-guanosine
  modified_base 30: mod_base = OTHER; note = 2'-O-Methyl-cytidine
  modified_base 31: mod_base = OTHER; note = 2'-O-Methyl-uridine
  modified_base 32: mod_base = OTHER; note = 2'-O-Methyl-adenosine
  modified_base 33: mod_base = OTHER; note = 2'-O-Methyl-guanosine
  modified_base 34: mod_base = OTHER; note = 2'-O-Methyl-adenosine
  modified_base 35: mod_base = OTHER; note = 2'-O-Methyl-adenosine
  modified_base 36: mod_base = OTHER; note = 2'-O-Methyl-adenosine
  modified_base 37: mod_base = OTHER; note = 2'-O-Methyl-uridine
  modified_base 38: mod_base = OTHER; note = 2'-O-Methyl-adenosine
  modified_base 39: mod_base = OTHER; note = 2'-O-Methyl-guanosine
  modified_base 40: mod_base = OTHER; note = 2'-O-Methyl-cytidine
  modified_base 41: mod_base = OTHER; note = 2'-O-Methyl-adenosine
  modified_base 42: mod_base = OTHER; note = 2'-O-Methyl-adenosine
  modified_base 46: mod_base = OTHER; note = 2'-O-Methyl-adenosine
  modified_base 48: mod_base = OTHER; note = 2'-O-Methyl-adenosine
  modified_base 50: mod_base = OTHER; note = 2'-O-Methyl-uridine
  modified_base 52: mod_base = OTHER; note = 2'-O-Methyl-adenosine
  modified_base 53: mod_base = OTHER; note = 2'-O-Methyl-guanosine
  modified_base 54: mod_base = OTHER; note = 2'-O-Methyl-guanosine
  modified_base 55: mod_base = OTHER; note = 2'-O-Methyl-cytidine
  modified_base 56: mod_base = OTHER; note = 2'-O-Methyl-uridine
  modified_base 57: mod_base = OTHER; note = 2'-O-Methyl-adenosine
  modified_base 60: mod_base = OTHER; note = 2'-O-Methyl-cytidine
  modified_base 61: mod_base = OTHER; note = 2'-O-Methyl-cytidine
  modified_base 66: mod_base = OTHER; note = 2'-O-Methyl-uridine
  modified_base 67: mod_base = OTHER; note = 2'-O-Methyl-cytidine
  modified_base 70: mod_base = OTHER; note = 2'-O-Methyl-cytidine
  modified_base 71: mod_base = OTHER; note = 2'-O-Methyl-uridine
  modified_base 72: mod_base = OTHER; note = 2'-O-Methyl-uridine
  modified_base 73: mod_base = OTHER; note = 2'-O-Methyl-guanosine
  modified_base 74: mod_base = OTHER; note = 2'-O-Methyl-adenosine
  modified_base 75: mod_base = OTHER; note = 2'-O-Methyl-adenosine
  modified_base 76: mod_base = OTHER; note = 2'-O-Methyl-adenosine
  modified_base 77: mod_base = OTHER; note = 2'-O-Methyl-adenosine
  modified_base 78: mod_base = OTHER; note = 2'-O-Methyl-adenosine
  modified_base 79: mod_base = OTHER; note = 2'-O-Methyl-guanosine
  modified_base 80: mod_base = OTHER; note = 2'-O-Methyl-uridine
  modified_base 81: mod_base = OTHER; note = 2'-O-Methyl-guanosine
  modified_base 83: mod_base = OTHER; note = 2'-O-Methyl-cytidine
  modified_base 84: mod_base = OTHER; note = 2'-O-Methyl-adenosine
  modified_base 85: mod_base = OTHER; note = 2'-O-Methyl-cytidine
  modified_base 86: mod_base = OTHER; note = 2'-O-Methyl-cytidine
  modified_base 87: mod_base = OTHER; note = 2'-O-Methyl-guanosine
  modified_base 88: mod_base = OTHER; note = 2'-O-Methyl-adenosine
  modified_base 89: mod_base = OTHER; note = 2'-O-Methyl-guanosine
  modified_base 90: mod_base = OTHER; note = 2'-O-Methyl-uridine
  modified_base 91: mod_base = OTHER; note = 2'-O-Methyl-cytidine
  modified_base 92: mod_base = OTHER; note = 2'-O-Methyl-guanosine
  modified_base 93: mod_base = OTHER; note = 2'-O-Methyl-guanosine
  modified_base 94: mod_base = OTHER; note = 2'-O-Methyl-uridine
  modified_base 95: mod_base = OTHER; note = 2'-O-Methyl-guanosine
  modified_base 96: mod_base = OTHER; note = 2'-O-Methyl-cytidine
  modified_base 97: mod_base = OTHER; note = 2'-O-Methyl-uridine
  modified_base 98: mod_base = OTHER; note = 2'-O-Methyl-uridine phosphorothioate
  modified_base 99: mod_base = OTHER; note = 2'-O-Methyl-uridine phosphorothioate
  modified_base 100: mod_base = OTHER; note = 2'-O-Methyl-uridine

SEQ ID NO: 2379 - RNA, 100 nt, synthetic construct; identical to SEQ ID NO: 421
  source 1..100: mol_type = other RNA
  modified_base 1: mod_base = OTHER; note = 2'-O-Methyl-cytidine phosphorothioate
  modified_base 2: mod_base = OTHER; note = 2'-O-Methyl-cytidine phosphorothioate
  modified_base 3: mod_base = OTHER; note = 2'-O-Methyl-cytidine
  modified_base 21: mod_base = OTHER; note = 2'-O-Methyl-guanosine
  modified_base 25: mod_base = OTHER; note = uridine phosphorothioate
  modified_base 28: mod_base = OTHER; note = 2'-O-Methyl-adenosine
  modified_base 29: mod_base = OTHER; note = 2'-O-Methyl-guanosine
  modified_base 30: mod_base = OTHER; note = 2'-O-Methyl-cytidine
  modified_base 31: mod_base = OTHER; note = 2'-O-Methyl-uridine
  modified_base 32: mod_base = OTHER; note = 2'-O-Methyl-adenosine
  modified_base 34: mod_base = OTHER; note = 2'-O-Methyl-adenosine
  modified_base 35: mod_base = OTHER; note = 2'-O-Methyl-adenosine
  modified_base 36: mod_base = OTHER; note = 2'-O-Methyl-adenosine
  modified_base 37: mod_base = OTHER; note = 2'-O-Methyl-uridine
  modified_base 38: mod_base = OTHER; note = 2'-O-Methyl-adenosine
  modified_base 39: mod_base = OTHER; note = 2'-O-Methyl-guanosine
  modified_base 40: mod_base = OTHER; note = 2'-O-Methyl-cytidine
  modified_base 41: mod_base = OTHER; note = 2'-O-Methyl-adenosine
  modified_base 42: mod_base = OTHER; note = 2'-O-Methyl-adenosine
  modified_base 46: mod_base = OTHER; note = 2'-O-Methyl-adenosine
  modified_base 48: mod_base = OTHER; note = 2'-O-Methyl-adenosine
  modified_base 50: mod_base = OTHER; note = 2'-O-Methyl-uridine
  modified_base 52: mod_base = OTHER; note = 2'-O-Methyl-adenosine
  modified_base 53: mod_base = OTHER; note = 2'-O-Methyl-guanosine
  modified_base 54: mod_base = OTHER; note = 2'-O-Methyl-guanosine
  modified_base 55: mod_base = OTHER; note = 2'-O-Methyl-cytidine
  modified_base 56: mod_base = OTHER; note = 2'-O-Methyl-uridine
  modified_base 57: mod_base = OTHER; note = 2'-O-Methyl-adenosine
  modified_base 60: mod_base = OTHER; note = 2'-O-Methyl-cytidine
  modified_base 61: mod_base = OTHER; note = 2'-O-Methyl-cytidine
  modified_base 66: mod_base = OTHER; note = 2'-O-Methyl-uridine
  modified_base 67: mod_base = OTHER; note = 2'-O-Methyl-cytidine
  modified_base 70: mod_base = OTHER; note = 2'-O-Methyl-cytidine
  modified_base 71: mod_base = OTHER; note = 2'-O-Methyl-uridine
  modified_base 72: mod_base = OTHER; note = 2'-O-Methyl-uridine
  modified_base 74: mod_base = OTHER; note = 2'-O-Methyl-adenosine
  modified_base 75: mod_base = OTHER; note = 2'-O-Methyl-adenosine
  modified_base 76: mod_base = OTHER; note = 2'-O-Methyl-adenosine
  modified_base 77: mod_base = OTHER; note = 2'-O-Methyl-adenosine
  modified_base 78: mod_base = OTHER; note = 2'-O-Methyl-adenosine
  modified_base 79: mod_base = OTHER; note = 2'-O-Methyl-guanosine
  modified_base 80: mod_base = OTHER; note = 2'-O-Methyl-uridine
  modified_base 81: mod_base = OTHER; note = 2'-O-Methyl-guanosine
  modified_base 83: mod_base = OTHER; note = 2'-O-Methyl-cytidine
  modified_base 84: mod_base = OTHER; note = 2'-O-Methyl-adenosine
  modified_base 85: mod_base = OTHER; note = 2'-O-Methyl-cytidine
  modified_base 86: mod_base = OTHER; note = 2'-O-Methyl-cytidine
  modified_base 87: mod_base = OTHER; note = 2'-O-Methyl-guanosine
  modified_base 88: mod_base = OTHER; note = 2'-O-Methyl-adenosine
  modified_base 89: mod_base = OTHER; note = 2'-O-Methyl-guanosine
  modified_base 90: mod_base = OTHER; note = 2'-O-Methyl-uridine
  modified_base 91: mod_base = OTHER; note = 2'-O-Methyl-cytidine
  modified_base 92: mod_base = OTHER; note = 2'-O-Methyl-guanosine
  modified_base 93: mod_base = OTHER; note = 2'-O-Methyl-guanosine
  modified_base 94: mod_base = OTHER; note = 2'-O-Methyl-uridine
  modified_base 95: mod_base = OTHER; note = 2'-O-Methyl-guanosine
  modified_base 96: mod_base = OTHER; note = 2'-O-Methyl-cytidine
  modified_base 97: mod_base = OTHER; note = 2'-O-Methyl-uridine
  modified_base 98: mod_base = OTHER; note = 2'-O-Methyl-uridine phosphorothioate
  modified_base 99: mod_base = OTHER; note = 2'-O-Methyl-uridine phosphorothioate
  modified_base 100: mod_base = OTHER; note = 2'-O-Methyl-uridine

SEQ ID NO: 2380 - RNA, 100 nt, synthetic construct; identical to SEQ ID NO: 422
  source 1..100: mol_type = other RNA
  modified_base 1: mod_base = OTHER; note = 2'-O-Methyl-guanosine phosphorothioate
  modified_base 2: mod_base = OTHER; note = 2'-O-Methyl-adenosine phosphorothioate
  modified_base 3: mod_base = OTHER; note = 2'-O-Methyl-guanosine
  modified_base 21: mod_base = OTHER; note = 2'-O-Methyl-guanosine
  modified_base 25: mod_base = OTHER; note = uridine phosphorothioate
  modified_base 28: mod_base = OTHER; note = 2'-O-Methyl-adenosine
  modified_base 29: mod_base = OTHER; note = 2'-O-Methyl-guanosine
  modified_base 30: mod_base = OTHER; note = 2'-O-Methyl-cytidine
  modified_base 31: mod_base = OTHER; note = 2'-O-Methyl-uridine
  modified_base 32: mod_base = OTHER; note = 2'-O-Methyl-adenosine
  modified_base 33: mod_base = OTHER; note = 2'-O-Methyl-guanosine
  modified_base 34: mod_base = OTHER; note = 2'-O-Methyl-adenosine
  modified_base 35: mod_base = OTHER; note = 2'-O-Methyl-adenosine
  modified_base 36: mod_base = OTHER; note = 2'-O-Methyl-adenosine
  modified_base 37: mod_base = OTHER; note = 2'-O-Methyl-uridine
  modified_base 38: mod_base = OTHER; note = 2'-O-Methyl-adenosine
  modified_base 39: mod_base = OTHER; note = 2'-O-Methyl-guanosine
  modified_base 40: mod_base = OTHER; note = 2'-O-Methyl-cytidine
  modified_base 41: mod_base = OTHER; note = 2'-O-Methyl-adenosine
  modified_base 42: mod_base = OTHER; note = 2'-O-Methyl-adenosine
  modified_base 46: mod_base = OTHER; note = 2'-O-Methyl-adenosine
  modified_base 48: mod_base = OTHER; note = 2'-O-Methyl-adenosine
  modified_base 50: mod_base = OTHER; note = 2'-O-Methyl-uridine
  modified_base 52: mod_base = OTHER; note = 2'-O-Methyl-adenosine
  modified_base 53: mod_base = OTHER; note = 2'-O-Methyl-guanosine
  modified_base 54: mod_base = OTHER; note = 2'-O-Methyl-guanosine
  modified_base 55: mod_base = OTHER; note = 2'-O-Methyl-cytidine
  modified_base 56: mod_base = OTHER; note = 2'-O-Methyl-uridine
  modified_base 57: mod_base = OTHER; note = 2'-O-Methyl-adenosine
  modified_base 60: mod_base = OTHER; note = 2'-O-Methyl-cytidine
  modified_base 61: mod_base = OTHER; note = 2'-O-Methyl-cytidine
  modified_base 66: mod_base = OTHER; note = 2'-O-Methyl-uridine
  modified_base 67: mod_base = OTHER; note = 2'-O-Methyl-cytidine
  modified_base 70: mod_base = OTHER; note = 2'-O-Methyl-cytidine
  modified_base 71: mod_base = OTHER; note = 2'-O-Methyl-uridine
  modified_base 72: mod_base = OTHER; note = 2'-O-Methyl-uridine
  modified_base 73: mod_base = OTHER; note = 2'-O-Methyl-guanosine
  modified_base 74: mod_base = OTHER; note = 2'-O-Methyl-adenosine
  modified_base 75: mod_base = OTHER; note = 2'-O-Methyl-adenosine
  modified_base 76: mod_base = OTHER; note = 2'-O-Methyl-adenosine
  modified_base 77: mod_base = OTHER; note = 2'-O-Methyl-adenosine
  modified_base 78: mod_base = OTHER; note = 2'-O-Methyl-adenosine
  modified_base 79: mod_base = OTHER; note = 2'-O-Methyl-guanosine
  modified_base 80: mod_base = OTHER; note = 2'-O-Methyl-uridine
  modified_base 81: mod_base = OTHER; note = 2'-O-Methyl-guanosine
  modified_base 83: mod_base = OTHER; note = 2'-O-Methyl-cytidine
  modified_base 84: mod_base = OTHER; note = 2'-O-Methyl-adenosine
  modified_base 85: mod_base = OTHER; note = 2'-O-Methyl-cytidine
  modified_base 86: mod_base = OTHER; note = 2'-O-Methyl-cytidine
  modified_base 87: mod_base = OTHER; note = 2'-O-Methyl-guanosine
  modified_base 88: mod_base = OTHER; note = 2'-O-Methyl-adenosine
  modified_base 89: mod_base = OTHER; note = 2'-O-Methyl-guanosine
  modified_base 90: mod_base = OTHER; note = 2'-O-Methyl-uridine
  modified_base 91: mod_base = OTHER; note = 2'-O-Methyl-cytidine
  modified_base 92: mod_base = OTHER; note = 2'-O-Methyl-guanosine
  modified_base 93: mod_base = OTHER; note = 2'-O-Methyl-guanosine
  modified_base 94: mod_base = OTHER; note = 2'-O-Methyl-uridine
  modified_base 95: mod_base = OTHER; note = 2'-O-Methyl-guanosine
  modified_base 96: mod_base = OTHER; note = 2'-O-Methyl-cytidine
  modified_base 97: mod_base = OTHER; note = 2'-O-Methyl-uridine
  modified_base 98: mod_base = OTHER; note = 2'-O-Methyl-uridine phosphorothioate
  modified_base 99: mod_base = OTHER; note = 2'-O-Methyl-uridine phosphorothioate
  modified_base 100: mod_base = OTHER; note = 2'-O-Methyl-uridine

SEQ ID NO: 2381 - RNA, 100 nt, synthetic construct; identical to SEQ ID NO: 422
  source 1..100: mol_type = other RNA
  modified_base 1: mod_base = OTHER; note = 2'-O-Methyl-guanosine phosphorothioate
  modified_base 2: mod_base = OTHER; note = 2'-O-Methyl-adenosine phosphorothioate
  modified_base 3: mod_base = OTHER; note = 2'-O-Methyl-guanosine
  modified_base 21: mod_base = OTHER; note = 2'-O-Methyl-guanosine
  modified_base 25: mod_base = OTHER; note = uridine phosphorothioate
  modified_base 28: mod_base = OTHER; note = 2'-O-Methyl-adenosine
  modified_base 29: mod_base = OTHER; note = 2'-O-Methyl-guanosine
  modified_base 30: mod_base = OTHER; note = 2'-O-Methyl-cytidine
  modified_base 31: mod_base = OTHER; note = 2'-O-Methyl-uridine
  modified_base 32: mod_base = OTHER; note = 2'-O-Methyl-adenosine
  modified_base 34: mod_base = OTHER; note = 2'-O-Methyl-adenosine
  modified_base 35: mod_base = OTHER; note = 2'-O-Methyl-adenosine
  modified_base 36: mod_base = OTHER; note = 2'-O-Methyl-adenosine
  modified_base 37: mod_base = OTHER; note = 2'-O-Methyl-uridine
  modified_base 38: mod_base = OTHER; note = 2'-O-Methyl-adenosine
  modified_base 39: mod_base = OTHER; note = 2'-O-Methyl-guanosine
  modified_base 40: mod_base = OTHER; note = 2'-O-Methyl-cytidine
  modified_base 41: mod_base = OTHER; note = 2'-O-Methyl-adenosine
  modified_base 42: mod_base = OTHER; note = 2'-O-Methyl-adenosine
  modified_base 46: mod_base = OTHER; note = 2'-O-Methyl-adenosine
  modified_base 48: mod_base = OTHER; note = 2'-O-Methyl-adenosine
  modified_base 50: mod_base = OTHER; note = 2'-O-Methyl-uridine
  modified_base 52: mod_base = OTHER; note = 2'-O-Methyl-adenosine
  modified_base 53: mod_base = OTHER; note = 2'-O-Methyl-guanosine
  modified_base 54: mod_base = OTHER; note = 2'-O-Methyl-guanosine
  modified_base 55: mod_base = OTHER; note = 2'-O-Methyl-cytidine
  modified_base 56: mod_base = OTHER; note = 2'-O-Methyl-uridine
  modified_base 57: mod_base = OTHER; note = 2'-O-Methyl-adenosine
  modified_base 60: mod_base = OTHER; note = 2'-O-Methyl-cytidine
  modified_base 61: mod_base = OTHER; note = 2'-O-Methyl-cytidine
  modified_base 66: mod_base = OTHER; note = 2'-O-Methyl-uridine
  modified_base 67: mod_base = OTHER; note = 2'-O-Methyl-cytidine
  modified_base 70: mod_base = OTHER; note = 2'-O-Methyl-cytidine
  modified_base 71: mod_base = OTHER; note = 2'-O-Methyl-uridine
  modified_base 72: mod_base = OTHER; note = 2'-O-Methyl-uridine
  modified_base 74: mod_base = OTHER; note = 2'-O-Methyl-adenosine
  modified_base 75: mod_base = OTHER; note = 2'-O-Methyl-adenosine
  modified_base 76: mod_base = OTHER; note = 2'-O-Methyl-adenosine
  modified_base 77: mod_base = OTHER; note = 2'-O-Methyl-adenosine
  modified_base 78: mod_base = OTHER; note = 2'-O-Methyl-adenosine
  modified_base 79: mod_base = OTHER; note = 2'-O-Methyl-guanosine
  modified_base 80: mod_base = OTHER; note = 2'-O-Methyl-uridine
  modified_base 81: mod_base = OTHER; note = 2'-O-Methyl-guanosine
  modified_base 83: mod_base = OTHER; note = 2'-O-Methyl-cytidine
  modified_base 84: mod_base = OTHER; note = 2'-O-Methyl-adenosine
  modified_base 85: mod_base = OTHER; note = 2'-O-Methyl-cytidine
  modified_base 86: mod_base = OTHER; note = 2'-O-Methyl-cytidine
  modified_base 87: mod_base = OTHER; note = 2'-O-Methyl-guanosine
  modified_base 88: mod_base = OTHER; note = 2'-O-Methyl-adenosine
  modified_base 89: mod_base = OTHER; note = 2'-O-Methyl-guanosine
  modified_base 90: mod_base = OTHER; note = 2'-O-Methyl-uridine
  modified_base 91: mod_base = OTHER; note = 2'-O-Methyl-cytidine
  modified_base 92: mod_base = OTHER; note = 2'-O-Methyl-guanosine
  modified_base 93: mod_base = OTHER; note = 2'-O-Methyl-guanosine
  modified_base 94: mod_base = OTHER; note = 2'-O-Methyl-uridine
  modified_base 95: mod_base = OTHER; note = 2'-O-Methyl-guanosine
  modified_base 96: mod_base = OTHER; note = 2'-O-Methyl-cytidine
  modified_base 97: mod_base = OTHER; note = 2'-O-Methyl-uridine
  modified_base 98: mod_base = OTHER; note = 2'-O-Methyl-uridine phosphorothioate
  modified_base 99: mod_base = OTHER; note = 2'-O-Methyl-uridine phosphorothioate
  modified_base 100: mod_base = OTHER; note = 2'-O-Methyl-uridine

SEQ ID NO: 2382 - RNA, 100 nt, synthetic construct; identical to SEQ ID NO: 55
  source 1..100: mol_type = other RNA
  modified_base 1: mod_base = OTHER; note = 2'-O-Methyl-cytidine phosphorothioate
  modified_base 2: mod_base = OTHER; note = 2'-O-Methyl-adenosine phosphorothioate
  modified_base 3: mod_base = OTHER; note = 2'-O-Methyl-guanosine
  modified_base 21: mod_base = OTHER; note = 2'-O-Methyl-guanosine
  modified_base 25: mod_base = OTHER; note = uridine phosphorothioate
  modified_base 28: mod_base = OTHER; note = 2'-O-Methyl-adenosine
  modified_base 29: mod_base = OTHER; note = 2'-O-Methyl-guanosine
  modified_base 30: mod_base = OTHER; note = 2'-O-Methyl-cytidine
  modified_base 31: mod_base = OTHER; note = 2'-O-Methyl-uridine
  modified_base 32: mod_base = OTHER; note = 2'-O-Methyl-adenosine
  modified_base 33: mod_base = OTHER; note = 2'-O-Methyl-guanosine
  modified_base 34: mod_base = OTHER; note = 2'-O-Methyl-adenosine
  modified_base 35: mod_base = OTHER; note = 2'-O-Methyl-adenosine
  modified_base 36: mod_base = OTHER; note = 2'-O-Methyl-adenosine
  modified_base 37: mod_base = OTHER; note = 2'-O-Methyl-uridine
  modified_base 38: mod_base = OTHER; note = 2'-O-Methyl-adenosine
  modified_base 39: mod_base = OTHER; note = 2'-O-Methyl-guanosine
  modified_base 40: mod_base = OTHER; note = 2'-O-Methyl-cytidine
  modified_base 41: mod_base = OTHER; note = 2'-O-Methyl-adenosine
  modified_base 42: mod_base = OTHER; note = 2'-O-Methyl-adenosine
  modified_base 46: mod_base = OTHER; note = 2'-O-Methyl-adenosine
  modified_base 48: mod_base = OTHER; note = 2'-O-Methyl-adenosine
  modified_base 50: mod_base = OTHER; note = 2'-O-Methyl-uridine
  modified_base 52: mod_base = OTHER; note = 2'-O-Methyl-adenosine
  modified_base 53: mod_base = OTHER; note = 2'-O-Methyl-guanosine
  modified_base 54: mod_base = OTHER; note = 2'-O-Methyl-guanosine
  modified_base 57: mod_base = OTHER; note = 2'-O-Methyl-adenosine
  modified_base 61: mod_base = OTHER; note = 2'-O-Methyl-cytidine
  modified_base 66: mod_base = OTHER; note = 2'-O-Methyl-uridine
  modified_base 67: mod_base = OTHER; note = 2'-O-Methyl-cytidine
  modified_base 70: mod_base = OTHER; note = 2'-O-Methyl-cytidine
  modified_base 71: mod_base = OTHER; note = 2'-O-Methyl-uridine
  modified_base 72: mod_base = OTHER; note = 2'-O-Methyl-uridine
  modified_base 74: mod_base = OTHER; note = 2'-O-Methyl-adenosine
  modified_base 75: mod_base = OTHER; note = 2'-O-Methyl-adenosine
  modified_base 76: mod_base = OTHER; note = 2'-O-Methyl-adenosine
  modified_base 77: mod_base = OTHER; note = 2'-O-Methyl-adenosine
  modified_base 78: mod_base = OTHER; note = 2'-O-Methyl-adenosine
  modified_base 79: mod_base = OTHER; note = 2'-O-Methyl-guanosine
  modified_base 80: mod_base = OTHER; note = 2'-O-Methyl-uridine
  modified_base 82: mod_base = OTHER; note = 2'-O-Methyl-guanosine
  modified_base 83: mod_base = OTHER; note = 2'-O-Methyl-cytidine
  modified_base 84: mod_base = OTHER; note = 2'-O-Methyl-adenosine
  modified_base 85: mod_base = OTHER; note = 2'-O-Methyl-cytidine
  modified_base 86: mod_base = OTHER; note = 2'-O-Methyl-cytidine
  modified_base 87: mod_base = OTHER; note = 2'-O-Methyl-guanosine
  modified_base 89: mod_base = OTHER; note = 2'-O-Methyl-guanosine
  modified_base 92: mod_base = OTHER; note = 2'-O-Methyl-guanosine
  modified_base 93: mod_base = OTHER; note = 2'-O-Methyl-guanosine
  modified_base 94: mod_base = OTHER; note = 2'-O-Methyl-uridine
  modified_base 95: mod_base = OTHER; note = 2'-O-Methyl-guanosine
  modified_base 96: mod_base = OTHER; note = 2'-O-Methyl-cytidine
  modified_base 97: mod_base = OTHER; note = 2'-O-Methyl-uridine
  modified_base 98: mod_base = OTHER; note = 2'-O-Methyl-uridine phosphorothioate
  modified_base 99: mod_base = OTHER; note = 2'-O-Methyl-uridine phosphorothioate
  modified_base 100: mod_base = OTHER; note = 2'-O-Methyl-uridine

SEQ ID NO: 2383 - RNA, 100 nt, synthetic construct; identical to SEQ ID NO: 55
  source 1..100: mol_type = other RNA
  modified_base 1: mod_base = OTHER; note = 2'-O-Methyl-cytidine phosphorothioate
  modified_base 2: mod_base = OTHER; note = 2'-O-Methyl-adenosine phosphorothioate
  modified_base 3: mod_base = OTHER; note = 2'-O-Methyl-guanosine
  modified_base 21: mod_base = OTHER; note = 2'-O-Methyl-guanosine
  modified_base 25: mod_base = OTHER; note = uridine phosphorothioate
  modified_base 28: mod_base = OTHER; note = 2'-O-Methyl-adenosine
  modified_base 29: mod_base = OTHER; note = 2'-O-Methyl-guanosine
  modified_base 30: mod_base = OTHER; note = 2'-O-Methyl-cytidine
  modified_base 31: mod_base = OTHER; note = 2'-O-Methyl-uridine
  modified_base 32: mod_base = OTHER; note = 2'-O-Methyl-adenosine
  modified_base 33: mod_base = OTHER; note = 2'-O-Methyl-guanosine
  modified_base 34: mod_base = OTHER; note = 2'-O-Methyl-adenosine
  modified_base 35: mod_base = OTHER; note = 2'-O-Methyl-adenosine
  modified_base 36: mod_base = OTHER; note = 2'-O-Methyl-adenosine
  modified_base 37: mod_base = OTHER; note = 2'-O-Methyl-uridine
  modified_base 38: mod_base = OTHER; note = 2'-O-Methyl-adenosine
  modified_base 39: mod_base = OTHER; note = 2'-O-Methyl-guanosine
  modified_base 40: mod_base = OTHER; note = 2'-O-Methyl-cytidine
  modified_base 41: mod_base = OTHER; note = 2'-O-Methyl-adenosine
  modified_base 42: mod_base = OTHER; note = 2'-O-Methyl-adenosine
  modified_base 46: mod_base = OTHER; note = 2'-O-Methyl-adenosine
  modified_base 48: mod_base = OTHER; note = 2'-O-Methyl-adenosine
  modified_base 50: mod_base = OTHER; note = 2'-O-Methyl-uridine
  modified_base 52: mod_base = OTHER; note = 2'-O-Methyl-adenosine
  modified_base 53: mod_base = OTHER; note = 2'-O-Methyl-guanosine
  modified_base 54: mod_base = OTHER; note = 2'-O-Methyl-guanosine
  modified_base 55: mod_base = OTHER; note = 2'-O-Methyl-cytidine
  modified_base 56: mod_base = OTHER; note = 2'-O-Methyl-uridine
  modified_base 57: mod_base = OTHER; note = 2'-O-Methyl-adenosine
  modified_base 60: mod_base = OTHER; note = 2'-O-Methyl-cytidine
  modified_base 61: mod_base = OTHER; note = 2'-O-Methyl-cytidine
  modified_base 66: mod_base = OTHER; note = 2'-O-Methyl-uridine
  modified_base 67: mod_base = OTHER; note = 2'-O-Methyl-cytidine
  modified_base 70: mod_base = OTHER; note = 2'-O-Methyl-cytidine
  modified_base 71: mod_base = OTHER; note = 2'-O-Methyl-uridine
  modified_base 72: mod_base = OTHER; note = 2'-O-Methyl-uridine
  modified_base 74: mod_base = OTHER; note = 2'-O-Methyl-adenosine
  modified_base 75: mod_base = OTHER; note = 2'-O-Methyl-adenosine
  modified_base 76: mod_base = OTHER; note = 2'-O-Methyl-adenosine
  modified_base 77: mod_base = OTHER; note = 2'-O-Methyl-adenosine
  modified_base 78: mod_base = OTHER; note = 2'-O-Methyl-adenosine
  modified_base 79: mod_base = OTHER; note = 2'-O-Methyl-guanosine
  modified_base 80: mod_base = OTHER; note = 2'-O-Methyl-uridine
  modified_base 82: mod_base = OTHER; note = 2'-O-Methyl-guanosine
  modified_base 83: mod_base = OTHER; note = 2'-O-Methyl-cytidine
  modified_base 84: mod_base = OTHER; note = 2'-O-Methyl-adenosine
  modified_base 85: mod_base = OTHER; note = 2'-O-Methyl-cytidine
  modified_base 86: mod_base = OTHER; note = 2'-O-Methyl-cytidine
  modified_base 87: mod_base = OTHER; note = 2'-O-Methyl-guanosine
  modified_base 89: mod_base = OTHER; note = 2'-O-Methyl-guanosine
  modified_base 92: mod_base = OTHER; note = 2'-O-Methyl-guanosine
  modified_base 93: mod_base = OTHER; note = 2'-O-Methyl-guanosine
  modified_base 94: mod_base = OTHER; note = 2'-O-Methyl-uridine
  modified_base 95: mod_base = OTHER; note = 2'-O-Methyl-guanosine
  modified_base 96: mod_base = OTHER; note = 2'-O-Methyl-cytidine
  modified_base 97: mod_base = OTHER; note = 2'-O-Methyl-uridine
  modified_base 98: mod_base = OTHER; note = 2'-O-Methyl-uridine phosphorothioate
  modified_base 99: mod_base = OTHER; note = 2'-O-Methyl-uridine phosphorothioate
  modified_base 100: mod_base = OTHER; note = 2'-O-Methyl-uridine

SEQ ID NO: 2384 - RNA, 100 nt, synthetic construct; identical to SEQ ID NO: 55
  source 1..100: mol_type = other RNA
  modified_base 1: mod_base = OTHER; note = 2'-O-Methyl-cytidine phosphorothioate
  modified_base 2: mod_base = OTHER; note = 2'-O-Methyl-adenosine phosphorothioate
  modified_base 3: mod_base = OTHER; note = 2'-O-Methyl-guanosine
  modified_base 21: mod_base = OTHER; note = 2'-O-Methyl-guanosine
  modified_base 25: mod_base = OTHER; note = uridine phosphorothioate
  modified_base 28: mod_base = OTHER; note = 2'-O-Methyl-adenosine
  modified_base 29: mod_base = OTHER; note = 2'-O-Methyl-guanosine
  modified_base 30: mod_base = OTHER; note = 2'-O-Methyl-cytidine
  modified_base 31: mod_base = OTHER; note = 2'-O-Methyl-uridine
  modified_base 32: mod_base = OTHER; note = 2'-O-Methyl-adenosine
  modified_base 33: mod_base = OTHER; note = 2'-O-Methyl-guanosine
  modified_base 34: mod_base = OTHER; note = 2'-O-Methyl-adenosine
  modified_base 35: mod_base = OTHER; note = 2'-O-Methyl-adenosine
  modified_base 36: mod_base = OTHER; note = 2'-O-Methyl-adenosine
  modified_base 37: mod_base = OTHER; note = 2'-O-Methyl-uridine
  modified_base 38: mod_base = OTHER; note = 2'-O-Methyl-adenosine
  modified_base 39: mod_base = OTHER; note = 2'-O-Methyl-guanosine
  modified_base 40: mod_base = OTHER; note = 2'-O-Methyl-cytidine
  modified_base 41: mod_base = OTHER; note = 2'-O-Methyl-adenosine
  modified_base 42: mod_base = OTHER; note = 2'-O-Methyl-adenosine
  modified_base 46: mod_base = OTHER; note = 2'-O-Methyl-adenosine
  modified_base 48: mod_base = OTHER; note = 2'-O-Methyl-adenosine
  modified_base 50: mod_base = OTHER; note = 2'-O-Methyl-uridine
  modified_base 52: mod_base = OTHER; note = 2'-O-Methyl-adenosine
  modified_base 53: mod_base = OTHER; note = 2'-O-Methyl-guanosine
  modified_base 54: mod_base = OTHER; note = 2'-O-Methyl-guanosine
  modified_base 57: mod_base = OTHER; note = 2'-O-Methyl-adenosine
  modified_base 61: mod_base = OTHER; note = 2'-O-Methyl-cytidine
  modified_base 66: mod_base = OTHER; note = 2'-O-Methyl-uridine
  modified_base 67: mod_base = OTHER; note = 2'-O-Methyl-cytidine
  modified_base 70: mod_base = OTHER; note = 2'-O-Methyl-cytidine
  modified_base 71: mod_base = OTHER; note = 2'-O-Methyl-uridine
  modified_base 72: mod_base = OTHER; note = 2'-O-Methyl-uridine
  modified_base 73: mod_base = OTHER; note = 2'-O-Methyl-guanosine
  modified_base 74: mod_base = OTHER; note = 2'-O-Methyl-adenosine
  modified_base 75: mod_base = OTHER; note = 2'-O-Methyl-adenosine
  modified_base 76: mod_base = OTHER; note = 2'-O-Methyl-adenosine
  modified_base 77: mod_base = OTHER; note = 2'-O-Methyl-adenosine
  modified_base 78: mod_base = OTHER; note = 2'-O-Methyl-adenosine
  modified_base 79: mod_base = OTHER; note = 2'-O-Methyl-guanosine
  modified_base 80: mod_base = OTHER; note = 2'-O-Methyl-uridine
  modified_base 82: mod_base = OTHER; note = 2'-O-Methyl-guanosine
  modified_base 83: mod_base = OTHER; note = 2'-O-Methyl-cytidine
  modified_base 84: mod_base = OTHER; note = 2'-O-Methyl-adenosine
  modified_base 85: mod_base = OTHER; note = 2'-O-Methyl-cytidine
  modified_base 86: mod_base = OTHER; note = 2'-O-Methyl-cytidine
  modified_base 87: mod_base = OTHER; note = 2'-O-Methyl-guanosine
  modified_base 89: mod_base = OTHER; note = 2'-O-Methyl-guanosine
  modified_base 92: mod_base = OTHER; note = 2'-O-Methyl-guanosine
  modified_base 93: mod_base = OTHER; note = 2'-O-Methyl-guanosine
  modified_base 94: mod_base = OTHER; note = 2'-O-Methyl-uridine
  modified_base 95: mod_base = OTHER; note = 2'-O-Methyl-guanosine
  modified_base 96: mod_base = OTHER; note = 2'-O-Methyl-cytidine
  modified_base 97: mod_base = OTHER; note = 2'-O-Methyl-uridine
  modified_base 98: mod_base = OTHER; note = 2'-O-Methyl-uridine phosphorothioate
  modified_base 99: mod_base = OTHER; note = 2'-O-Methyl-uridine phosphorothioate
  modified_base 100: mod_base = OTHER; note = 2'-O-Methyl-uridine

SEQ ID NO: 2385 - RNA, 100 nt, synthetic construct; identical to SEQ ID NO: 55
  source 1..100: mol_type = other RNA
  modified_base 1: mod_base = OTHER; note = 2'-O-Methyl-cytidine phosphorothioate
  modified_base 2: mod_base = OTHER; note = 2'-O-Methyl-adenosine phosphorothioate
  modified_base 3: mod_base = OTHER; note = 2'-O-Methyl-guanosine
  modified_base 21: mod_base = OTHER; note = 2'-O-Methyl-guanosine
  modified_base 25: mod_base = OTHER; note = uridine phosphorothioate
  modified_base 28: mod_base = OTHER; note = 2'-O-Methyl-adenosine
  modified_base 29: mod_base = OTHER; note = 2'-O-Methyl-guanosine
  modified_base 30: mod_base = OTHER; note = 2'-O-Methyl-cytidine
  modified_base 31: mod_base = OTHER; note = 2'-O-Methyl-uridine
  modified_base 32: mod_base = OTHER; note = 2'-O-Methyl-adenosine
  modified_base 33: mod_base = OTHER; note = 2'-O-Methyl-guanosine
  modified_base 34: mod_base = OTHER; note = 2'-O-Methyl-adenosine
  modified_base 35: mod_base = OTHER; note = 2'-O-Methyl-adenosine
  modified_base 36: mod_base = OTHER; note = 2'-O-Methyl-adenosine
  modified_base 37: mod_base = OTHER; note = 2'-O-Methyl-uridine
  modified_base 38: mod_base = OTHER; note = 2'-O-Methyl-adenosine
  modified_base 39: mod_base = OTHER; note = 2'-O-Methyl-guanosine
  modified_base 40: mod_base = OTHER; note = 2'-O-Methyl-cytidine
  modified_base 41: mod_base = OTHER; note = 2'-O-Methyl-adenosine
  modified_base 42: mod_base = OTHER; note = 2'-O-Methyl-adenosine
  modified_base 46: mod_base = OTHER; note = 2'-O-Methyl-adenosine
  modified_base 48: mod_base = OTHER; note = 2'-O-Methyl-adenosine
  modified_base 50: mod_base = OTHER; note = 2'-O-Methyl-uridine
  modified_base 52: mod_base = OTHER; note = 2'-O-Methyl-adenosine
  modified_base 53: mod_base = OTHER; note = 2'-O-Methyl-guanosine
  modified_base 54: mod_base = OTHER; note = 2'-O-Methyl-guanosine
  modified_base 57: mod_base = OTHER; note = 2'-O-Methyl-adenosine
  modified_base 61: mod_base = OTHER; note = 2'-O-Methyl-cytidine
  modified_base 66: mod_base = OTHER; note = 2'-O-Methyl-uridine
  modified_base 67: mod_base = OTHER; note = 2'-O-Methyl-cytidine
  modified_base 70: mod_base = OTHER; note = 2'-O-Methyl-cytidine
  modified_base 71: mod_base = OTHER; note = 2'-O-Methyl-uridine
  modified_base 72: mod_base = OTHER; note = 2'-O-Methyl-uridine
  modified_base 73: mod_base = OTHER; note = 2'-O-Methyl-guanosine
  modified_base 74: mod_base = OTHER; note = 2'-O-Methyl-adenosine
  modified_base 75: mod_base = OTHER; note = 2'-O-Methyl-adenosine
  modified_base 76: mod_base = OTHER; note = 2'-O-Methyl-adenosine
  modified_base 77: mod_base = OTHER; note = 2'-O-Methyl-adenosine
  modified_base 78: mod_base = OTHER; note = 2'-O-Methyl-adenosine
  modified_base 79: mod_base = OTHER; note = 2'-O-Methyl-guanosine
  modified_base 80: mod_base = OTHER; note = 2'-O-Methyl-uridine
  modified_base 82: mod_base = OTHER; note = 2'-O-Methyl-guanosine
  modified_base 83: mod_base = OTHER; note = 2'-O-Methyl-cytidine
  modified_base 84: mod_base = OTHER; note = 2'-O-Methyl-adenosine
  modified_base 85: mod_base = OTHER; note = 2'-O-Methyl-cytidine
  modified_base 86: mod_base = OTHER; note = 2'-O-Methyl-cytidine
  modified_base 87: mod_base = OTHER; note = 2'-O-Methyl-guanosine
  modified_base 89: mod_base = OTHER; note = 2'-O-Methyl-guanosine
  modified_base 91: mod_base = OTHER; note = 2'-O-Methyl-cytidine
  modified_base 92: mod_base = OTHER; note = 2'-O-Methyl-guanosine
  modified_base 93: mod_base = OTHER; note = 2'-O-Methyl-guanosine
  modified_base 94: mod_base = OTHER; note = 2'-O-Methyl-uridine
  modified_base 95: mod_base = OTHER; note = 2'-O-Methyl-guanosine
  modified_base 96: mod_base = OTHER; note = 2'-O-Methyl-cytidine
  modified_base 97: mod_base = OTHER; note = 2'-O-Methyl-uridine
  modified_base 98: mod_base = OTHER; note = 2'-O-Methyl-uridine phosphorothioate
  modified_base 99: mod_base = OTHER; note = 2'-O-Methyl-uridine phosphorothioate
  modified_base 100: mod_base = OTHER; note = 2'-O-Methyl-uridine

SEQ ID NO: 2386 - RNA, 100 nt, synthetic construct; identical to SEQ ID NO: 421
  source 1..100: mol_type = other RNA
  modified_base 1: mod_base = OTHER; note = 2'-O-Methyl-cytidine phosphorothioate
  modified_base 2: mod_base = OTHER; note = 2'-O-Methyl-cytidine phosphorothioate
  modified_base 3: mod_base = OTHER; note = 2'-O-Methyl-cytidine
  modified_base 21: mod_base = OTHER; note = 2'-O-Methyl-guanosine
  modified_base 25: mod_base = OTHER; note = uridine phosphorothioate
  modified_base 28: mod_base = OTHER; note = 2'-O-Methyl-adenosine
  modified_base 29: mod_base = OTHER; note = 2'-O-Methyl-guanosine
  modified_base 30: mod_base = OTHER; note = 2'-O-Methyl-cytidine
  modified_base 31: mod_base = OTHER; note = 2'-O-Methyl-uridine
  modified_base 32: mod_base = OTHER; note = 2'-O-Methyl-adenosine
  modified_base 33: mod_base = OTHER; note = 2'-O-Methyl-guanosine
  modified_base 34: mod_base = OTHER; note = 2'-O-Methyl-adenosine
  modified_base 35: mod_base = OTHER; note = 2'-O-Methyl-adenosine
  modified_base 36: mod_base = OTHER; note = 2'-O-Methyl-adenosine
  modified_base 37: mod_base = OTHER; note = 2'-O-Methyl-uridine
  modified_base 38: mod_base = OTHER; note = 2'-O-Methyl-adenosine
  modified_base 39: mod_base = OTHER; note = 2'-O-Methyl-guanosine
  modified_base 40: mod_base = OTHER; note = 2'-O-Methyl-cytidine
  modified_base 41: mod_base = OTHER; note = 2'-O-Methyl-adenosine
  modified_base 42: mod_base = OTHER; note = 2'-O-Methyl-adenosine
  modified_base 46: mod_base = OTHER; note = 2'-O-Methyl-adenosine
  modified_base 48: mod_base = OTHER; note = 2'-O-Methyl-adenosine
  modified_base 50: mod_base = OTHER; note = 2'-O-Methyl-uridine
  modified_base 52: mod_base = OTHER; note = 2'-O-Methyl-adenosine
  modified_base 53: mod_base = OTHER; note = 2'-O-Methyl-guanosine
  modified_base 54: mod_base = OTHER; note = 2'-O-Methyl-guanosine
  modified_base 55: mod_base = OTHER; note = 2'-O-Methyl-cytidine
  modified_base 56: mod_base = OTHER; note = 2'-O-Methyl-uridine
  modified_base 57: mod_base = OTHER; note = 2'-O-Methyl-adenosine
  modified_base 60: mod_base = OTHER; note = 2'-O-Methyl-cytidine
  modified_base 61: mod_base = OTHER; note = 2'-O-Methyl-cytidine
  modified_base 64: mod_base = OTHER; note = uridine phosphorothioate
  modified_base 66: mod_base = OTHER; note = 2'-O-Methyl-uridine
  modified_base 67: mod_base = OTHER; note = 2'-O-Methyl-cytidine
  modified_base 70: mod_base = OTHER; note = 2'-O-Methyl-cytidine
  modified_base 71: mod_base = OTHER; note = 2'-O-Methyl-uridine
  modified_base 72: mod_base = OTHER; note = 2'-O-Methyl-uridine
  modified_base 73: mod_base = OTHER; note = 2'-O-Methyl-guanosine
  modified_base 74: mod_base = OTHER; note = 2'-O-Methyl-adenosine
  modified_base 75: mod_base = OTHER; note = 2'-O-Methyl-adenosine
  modified_base 76: mod_base = OTHER; note = 2'-O-Methyl-adenosine
  modified_base 77: mod_base = OTHER; note = 2'-O-Methyl-adenosine
  modified_base 78: mod_base = OTHER; note = 2'-O-Methyl-adenosine
  modified_base 79: mod_base = OTHER; note = 2'-O-Methyl-guanosine
  modified_base 80: mod_base = OTHER; note = 2'-O-Methyl-uridine
  modified_base 81: mod_base = OTHER; note = 2'-O-Methyl-guanosine
  modified_base 83: mod_base = OTHER; note = 2'-O-Methyl-cytidine
  modified_base 84: mod_base = OTHER; note = 2'-O-Methyl-adenosine
  modified_base 85: mod_base = OTHER; note = 2'-O-Methyl-cytidine
  modified_base 86: mod_base = OTHER; note = 2'-O-Methyl-cytidine
  modified_base 87: mod_base = OTHER; note = 2'-O-Methyl-guanosine
  modified_base 88: mod_base = OTHER; note = 2'-O-Methyl-adenosine
  modified_base 89: mod_base = OTHER; note = 2'-O-Methyl-guanosine
  modified_base 90: mod_base = OTHER; note = 2'-O-Methyl-uridine
  modified_base 91: mod_base = OTHER; note = 2'-O-Methyl-cytidine
  modified_base 92: mod_base = OTHER; note = 2'-O-Methyl-guanosine
  modified_base 93: mod_base = OTHER; note = 2'-O-Methyl-guanosine
  modified_base 94: mod_base = OTHER; note = 2'-O-Methyl-uridine
  modified_base 95: mod_base = OTHER; note = 2'-O-Methyl-guanosine
  modified_base 96: mod_base = OTHER; note = 2'-O-Methyl-cytidine
  modified_base 97: mod_base = OTHER; note = 2'-O-Methyl-uridine
  modified_base 98: mod_base = OTHER; note = 2'-O-Methyl-uridine phosphorothioate
  modified_base 99: mod_base = OTHER; note = 2'-O-Methyl-uridine phosphorothioate
  modified_base 100: mod_base = OTHER; note = 2'-O-Methyl-uridine

SEQ ID NO: 2387 - RNA, 100 nt, synthetic construct; identical to SEQ ID NO: 421
  source 1..100: mol_type = other RNA
  modified_base 1: mod_base = OTHER; note = 2'-O-Methyl-cytidine phosphorothioate
  modified_base 2: mod_base = OTHER; note = 2'-O-Methyl-cytidine phosphorothioate
  modified_base 3: mod_base = OTHER; note = 2'-O-Methyl-cytidine
  modified_base 21: mod_base = OTHER; note = 2'-O-Methyl-guanosine
  modified_base 25: mod_base = OTHER; note = uridine phosphorothioate
  modified_base 28: mod_base = OTHER; note = 2'-O-Methyl-adenosine
  modified_base 29: mod_base = OTHER; note = 2'-O-Methyl-guanosine
  modified_base 30: mod_base = OTHER; note = 2'-O-Methyl-cytidine
  modified_base 31: mod_base = OTHER; note = 2'-O-Methyl-uridine
  modified_base 32: mod_base = OTHER; note = 2'-O-Methyl-adenosine
  modified_base 34: mod_base = OTHER; note = 2'-O-Methyl-adenosine
  modified_base 35: mod_base = OTHER; note = 2'-O-Methyl-adenosine
  modified_base 36: mod_base = OTHER; note = 2'-O-Methyl-adenosine
  modified_base 37: mod_base = OTHER; note = 2'-O-Methyl-uridine
  modified_base 38: mod_base = OTHER; note = 2'-O-Methyl-adenosine
  modified_base 39: mod_base = OTHER; note = 2'-O-Methyl-guanosine
  modified_base 40: mod_base = OTHER; note = 2'-O-Methyl-cytidine
  modified_base 41: mod_base = OTHER; note = 2'-O-Methyl-adenosine
  modified_base 42: mod_base = OTHER; note = 2'-O-Methyl-adenosine
  modified_base 46: mod_base = OTHER; note = 2'-O-Methyl-adenosine
  modified_base 48: mod_base = OTHER; note = 2'-O-Methyl-adenosine
  modified_base 50: mod_base = OTHER; note = 2'-O-Methyl-uridine
  modified_base 52: mod_base = OTHER; note = 2'-O-Methyl-adenosine
  modified_base 53: mod_base = OTHER; note = 2'-O-Methyl-guanosine
  modified_base 54: mod_base = OTHER; note = 2'-O-Methyl-guanosine
  modified_base 55: mod_base = OTHER; note = 2'-O-Methyl-cytidine
  modified_base 56: mod_base = OTHER; note = 2'-O-Methyl-uridine
  modified_base 57: mod_base = OTHER; note = 2'-O-Methyl-adenosine
  modified_base 60: mod_base = OTHER; note = 2'-O-Methyl-cytidine
  modified_base 61: mod_base = OTHER; note = 2'-O-Methyl-cytidine
  modified_base 64: mod_base = OTHER; note = uridine phosphorothioate
  modified_base 66: mod_base = OTHER; note = 2'-O-Methyl-uridine
  modified_base 67: mod_base = OTHER; note = 2'-O-Methyl-cytidine
  modified_base 70: mod_base = OTHER; note = 2'-O-Methyl-cytidine
  modified_base 71: mod_base = OTHER; note = 2'-O-Methyl-uridine
  modified_base 72: mod_base = OTHER; note = 2'-O-Methyl-uridine
  modified_base 74: mod_base = OTHER; note = 2'-O-Methyl-adenosine
  modified_base 75: mod_base = OTHER; note = 2'-O-Methyl-adenosine
  modified_base 76: mod_base = OTHER; note = 2'-O-Methyl-adenosine
  modified_base 77: mod_base = OTHER; note = 2'-O-Methyl-adenosine
  modified_base 78: mod_base = OTHER; note = 2'-O-Methyl-adenosine
  modified_base 79: mod_base = OTHER; note = 2'-O-Methyl-guanosine
  modified_base 80: mod_base = OTHER; note = 2'-O-Methyl-uridine
  modified_base 81: mod_base = OTHER; note = 2'-O-Methyl-guanosine
  modified_base 83: mod_base = OTHER; note = 2'-O-Methyl-cytidine
  modified_base 84: mod_base = OTHER; note = 2'-O-Methyl-adenosine
  modified_base 85: mod_base = OTHER; note = 2'-O-Methyl-cytidine
  modified_base 86: mod_base = OTHER; note = 2'-O-Methyl-cytidine
  modified_base 87: mod_base = OTHER; note = 2'-O-Methyl-guanosine
  modified_base 88: mod_base = OTHER; note = 2'-O-Methyl-adenosine
  modified_base 89: mod_base = OTHER; note = 2'-O-Methyl-guanosine
  modified_base 90: mod_base = OTHER; note = 2'-O-Methyl-uridine
  modified_base 91: mod_base = OTHER; note = 2'-O-Methyl-cytidine
  modified_base 92: mod_base = OTHER; note = 2'-O-Methyl-guanosine
  modified_base 93: mod_base = OTHER; note = 2'-O-Methyl-guanosine
  modified_base 94: mod_base = OTHER; note = 2'-O-Methyl-uridine
  modified_base 95: mod_base = OTHER; note = 2'-O-Methyl-guanosine
  modified_base 96: mod_base = OTHER; note = 2'-O-Methyl-cytidine
  modified_base 97: mod_base = OTHER; note = 2'-O-Methyl-uridine
  modified_base 98: mod_base = OTHER; note = 2'-O-Methyl-uridine phosphorothioate
  modified_base 99: mod_base = OTHER; note = 2'-O-Methyl-uridine phosphorothioate
  modified_base 100: mod_base = OTHER; note = 2'-O-Methyl-uridine

SEQ ID NO: 2388 - RNA, 100 nt, synthetic construct; identical to SEQ ID NO: 422
  source 1..100: mol_type = other RNA
  modified_base 1: mod_base = OTHER; note = 2'-O-Methyl-guanosine phosphorothioate
  modified_base 2: mod_base = OTHER; note = 2'-O-Methyl-adenosine phosphorothioate
  modified_base 3: mod_base = OTHER; note = 2'-O-Methyl-guanosine
  modified_base 21: mod_base = OTHER; note = 2'-O-Methyl-guanosine
  modified_base 25: mod_base = OTHER; note = uridine phosphorothioate
  modified_base 28: mod_base = OTHER; note = 2'-O-Methyl-adenosine
  modified_base 29: mod_base = OTHER; note = 2'-O-Methyl-guanosine
  modified_base 30: mod_base = OTHER; note = 2'-O-Methyl-cytidine
  modified_base 31: mod_base = OTHER; note = 2'-O-Methyl-uridine
  modified_base 32: mod_base = OTHER; note = 2'-O-Methyl-adenosine
  modified_base 33: mod_base = OTHER; note = 2'-O-Methyl-guanosine
  modified_base 34: mod_base = OTHER; note = 2'-O-Methyl-adenosine
  modified_base 35: mod_base = OTHER; note = 2'-O-Methyl-adenosine
  modified_base 36: mod_base = OTHER; note = 2'-O-Methyl-adenosine
  modified_base 37: mod_base = OTHER; note = 2'-O-Methyl-uridine
  modified_base 38: mod_base = OTHER; note = 2'-O-Methyl-adenosine
  modified_base 39: mod_base = OTHER; note = 2'-O-Methyl-guanosine
  modified_base 40: mod_base = OTHER; note = 2'-O-Methyl-cytidine
  modified_base 41: mod_base = OTHER; note = 2'-O-Methyl-adenosine
  modified_base 42: mod_base = OTHER; note = 2'-O-Methyl-adenosine
  modified_base 46: mod_base = OTHER; note = 2'-O-Methyl-adenosine
  modified_base 48: mod_base = OTHER; note = 2'-O-Methyl-adenosine
  modified_base 50: mod_base = OTHER; note = 2'-O-Methyl-uridine
  modified_base 52: mod_base = OTHER; note = 2'-O-Methyl-adenosine
  modified_base 53: mod_base = OTHER; note = 2'-O-Methyl-guanosine
  modified_base 54: mod_base = OTHER; note = 2'-O-Methyl-guanosine
  modified_base 55: mod_base = OTHER; note = 2'-O-Methyl-cytidine
  modified_base 56: mod_base = OTHER; note = 2'-O-Methyl-uridine
  modified_base 57: mod_base = OTHER; note = 2'-O-Methyl-adenosine
  modified_base 60: mod_base = OTHER; note = 2'-O-Methyl-cytidine
  modified_base 61: mod_base = OTHER; note = 2'-O-Methyl-cytidine
  modified_base 64: mod_base = OTHER; note = uridine phosphorothioate
  modified_base 66: mod_base = OTHER; note = 2'-O-Methyl-uridine
  modified_base 67: mod_base = OTHER; note = 2'-O-Methyl-cytidine
  modified_base 70: mod_base = OTHER; note = 2'-O-Methyl-cytidine
  modified_base 71: mod_base = OTHER; note = 2'-O-Methyl-uridine
  modified_base 72: mod_base = OTHER; note = 2'-O-Methyl-uridine
  modified_base 73: mod_base = OTHER; note = 2'-O-Methyl-guanosine
  modified_base 74: mod_base = OTHER; note = 2'-O-Methyl-adenosine
  modified_base 75: mod_base = OTHER; note = 2'-O-Methyl-adenosine
  modified_base 76: mod_base = OTHER; note = 2'-O-Methyl-adenosine
  modified_base 77: mod_base = OTHER; note = 2'-O-Methyl-adenosine
  modified_base 78: mod_base = OTHER; note = 2'-O-Methyl-adenosine
  modified_base 79: mod_base = OTHER; note = 2'-O-Methyl-guanosine
  modified_base 80: mod_base = OTHER; note = 2'-O-Methyl-uridine
  modified_base 81: mod_base = OTHER; note = 2'-O-Methyl-guanosine
  modified_base 83: mod_base = OTHER; note = 2'-O-Methyl-cytidine
  modified_base 84: mod_base = OTHER; note = 2'-O-Methyl-adenosine
  modified_base 85: mod_base = OTHER; note = 2'-O-Methyl-cytidine
  modified_base 86: mod_base = OTHER; note = 2'-O-Methyl-cytidine
  modified_base 87: mod_base = OTHER; note = 2'-O-Methyl-guanosine
  modified_base 88: mod_base = OTHER; note = 2'-O-Methyl-adenosine
  modified_base 89: mod_base = OTHER; note = 2'-O-Methyl-guanosine
  modified_base 90: mod_base = OTHER; note = 2'-O-Methyl-uridine
  modified_base 91: mod_base = OTHER; note = 2'-O-Methyl-cytidine
  modified_base 92: mod_base = OTHER; note = 2'-O-Methyl-guanosine
  modified_base 93: mod_base = OTHER; note = 2'-O-Methyl-guanosine
  modified_base 94: mod_base = OTHER; note = 2'-O-Methyl-uridine
  modified_base 95: mod_base = OTHER; note = 2'-O-Methyl-guanosine
  modified_base 96: mod_base = OTHER; note = 2'-O-Methyl-cytidine
  modified_base 97: mod_base = OTHER; note = 2'-O-Methyl-uridine
  modified_base 98: mod_base = OTHER; note = 2'-O-Methyl-uridine phosphorothioate
  modified_base 99: mod_base = OTHER; note = 2'-O-Methyl-uridine phosphorothioate
  modified_base 100: mod_base = OTHER; note = 2'-O-Methyl-uridine

SEQ ID NO: 2389 - RNA, 100 nt, synthetic construct; identical to SEQ ID NO: 422
  source 1..100: mol_type = other RNA
  modified_base 1: mod_base = OTHER; note = 2'-O-Methyl-guanosine phosphorothioate
  modified_base 2: mod_base = OTHER; note = 2'-O-Methyl-adenosine phosphorothioate
  modified_base 3: mod_base = OTHER; note = 2'-O-Methyl-guanosine
  modified_base 21: mod_base = OTHER; note = 2'-O-Methyl-guanosine
  modified_base 25: mod_base = OTHER; note = uridine phosphorothioate
  modified_base 28: mod_base = OTHER; note = 2'-O-Methyl-adenosine
  modified_base 29: mod_base = OTHER; note = 2'-O-Methyl-guanosine
  modified_base 30: mod_base = OTHER; note = 2'-O-Methyl-cytidine
  modified_base 31: mod_base = OTHER; note = 2'-O-Methyl-uridine
  modified_base 32: mod_base = OTHER; note = 2'-O-Methyl-adenosine
  modified_base 34: mod_base = OTHER; note = 2'-O-Methyl-adenosine
  modified_base 35: mod_base = OTHER; note = 2'-O-Methyl-adenosine
  modified_base 36: mod_base = OTHER; note = 2'-O-Methyl-adenosine
  modified_base 37: mod_base = OTHER; note = 2'-O-Methyl-uridine
  modified_base 38: mod_base = OTHER; note = 2'-O-Methyl-adenosine
  modified_base 39: mod_base = OTHER; note = 2'-O-Methyl-guanosine
  modified_base 40: mod_base = OTHER; note = 2'-O-Methyl-cytidine
  modified_base 41: mod_base = OTHER; note = 2'-O-Methyl-adenosine
  modified_base 42: mod_base = OTHER; note = 2'-O-Methyl-adenosine
  modified_base 46: mod_base = OTHER; note = 2'-O-Methyl-adenosine
  modified_base 48: mod_base = OTHER; note = 2'-O-Methyl-adenosine
  modified_base 50: mod_base = OTHER; note = 2'-O-Methyl-uridine
  modified_base 52: mod_base = OTHER; note = 2'-O-Methyl-adenosine
  modified_base 53: mod_base = OTHER; note = 2'-O-Methyl-guanosine
  modified_base 54: mod_base = OTHER; note = 2'-O-Methyl-guanosine
  modified_base 55: mod_base = OTHER; note = 2'-O-Methyl-cytidine
  modified_base 56: mod_base = OTHER; note = 2'-O-Methyl-uridine
  modified_base 57: mod_base = OTHER; note = 2'-O-Methyl-adenosine
  modified_base 60: mod_base = OTHER; note = 2'-O-Methyl-cytidine
  modified_base 61: mod_base = OTHER; note = 2'-O-Methyl-cytidine
  modified_base 64: mod_base = OTHER; note = uridine phosphorothioate
  modified_base 66: mod_base = OTHER; note = 2'-O-Methyl-uridine
  modified_base 67: mod_base = OTHER; note = 2'-O-Methyl-cytidine
  modified_base 70: mod_base = OTHER; note = 2'-O-Methyl-cytidine
  modified_base 71: mod_base = OTHER; note = 2'-O-Methyl-uridine
  modified_base 72: mod_base = OTHER; note = 2'-O-Methyl-uridine
  modified_base 74: mod_base = OTHER; note = 2'-O-Methyl-adenosine
  modified_base 75: mod_base = OTHER; note = 2'-O-Methyl-adenosine
  modified_base 76: mod_base = OTHER; note = 2'-O-Methyl-adenosine
  modified_base 77: mod_base = OTHER; note = 2'-O-Methyl-adenosine
  modified_base 78: mod_base = OTHER; note = 2'-O-Methyl-adenosine
  modified_base 79: mod_base = OTHER; note = 2'-O-Methyl-guanosine
  modified_base 80: mod_base = OTHER; note = 2'-O-Methyl-uridine
  modified_base 81: mod_base = OTHER; note = 2'-O-Methyl-guanosine
  modified_base 83: mod_base = OTHER; note = 2'-O-Methyl-cytidine
  modified_base 84: mod_base = OTHER; note = 2'-O-Methyl-adenosine
  modified_base 85: mod_base = OTHER; note = 2'-O-Methyl-cytidine
  modified_base 86: mod_base = OTHER; note = 2'-O-Methyl-cytidine
  modified_base 87: mod_base = OTHER; note = 2'-O-Methyl-guanosine
  modified_base 88: mod_base = OTHER; note = 2'-O-Methyl-adenosine
  modified_base 89: mod_base = OTHER; note = 2'-O-Methyl-guanosine
  modified_base 90: mod_base = OTHER; note = 2'-O-Methyl-uridine
  modified_base 91: mod_base = OTHER; note = 2'-O-Methyl-cytidine
  modified_base 92: mod_base = OTHER; note = 2'-O-Methyl-guanosine
  modified_base 93: mod_base = OTHER; note = 2'-O-Methyl-guanosine
  modified_base 94: mod_base = OTHER; note = 2'-O-Methyl-uridine
  modified_base 95: mod_base = OTHER; note = 2'-O-Methyl-guanosine
  modified_base 96: mod_base = OTHER; note = 2'-O-Methyl-cytidine
  modified_base 97: mod_base = OTHER; note = 2'-O-Methyl-uridine
  modified_base 98: mod_base = OTHER; note = 2'-O-Methyl-uridine phosphorothioate
  modified_base 99: mod_base = OTHER; note = 2'-O-Methyl-uridine phosphorothioate
  modified_base 100: mod_base = OTHER; note = 2'-O-Methyl-uridine

SEQ ID NO: 2390 - RNA, 100 nt, synthetic construct; identical to SEQ ID NO: 55
  source 1..100: mol_type = other RNA
  modified_base 1: mod_base = OTHER; note = 2'-O-Methyl-cytidine phosphorothioate
  modified_base 2: mod_base = OTHER; note = 2'-O-Methyl-adenosine phosphorothioate
  modified_base 3: mod_base = OTHER; note = 2'-O-Methyl-guanosine
  modified_base 21: mod_base = OTHER; note = 2'-O-Methyl-guanosine
  modified_base 25: mod_base = OTHER; note = uridine phosphorothioate
  modified_base 28: mod_base = OTHER; note = 2'-O-Methyl-adenosine
  modified_base 29: mod_base = OTHER; note = 2'-O-Methyl-guanosine
  modified_base 30: mod_base = OTHER; note = 2'-O-Methyl-cytidine
  modified_base 31: mod_base = OTHER; note = 2'-O-Methyl-uridine
  modified_base 32: mod_base = OTHER; note = 2'-O-Methyl-adenosine
  modified_base 33: mod_base = OTHER; note = 2'-O-Methyl-guanosine
  modified_base 34: mod_base = OTHER; note = 2'-O-Methyl-adenosine
  modified_base 35: mod_base = OTHER; note = 2'-O-Methyl-adenosine
  modified_base 36: mod_base = OTHER; note = 2'-O-Methyl-adenosine
  modified_base 37: mod_base = OTHER; note = 2'-O-Methyl-uridine
  modified_base 38: mod_base = OTHER; note = 2'-O-Methyl-adenosine
  modified_base 39: mod_base = OTHER; note = 2'-O-Methyl-guanosine
  modified_base 40: mod_base = OTHER; note = 2'-O-Methyl-cytidine
  modified_base 41: mod_base = OTHER; note = 2'-O-Methyl-adenosine
  modified_base 42: mod_base = OTHER; note = 2'-O-Methyl-adenosine
  modified_base 46: mod_base = OTHER; note = 2'-O-Methyl-adenosine
  modified_base 48: mod_base = OTHER; note = 2'-O-Methyl-adenosine
  modified_base 50: mod_base = OTHER; note = 2'-O-Methyl-uridine
  modified_base 52: mod_base = OTHER; note = 2'-O-Methyl-adenosine
  modified_base 53: mod_base = OTHER; note = 2'-O-Methyl-guanosine
  modified_base 54: mod_base = OTHER; note = 2'-O-Methyl-guanosine
  modified_base 57: mod_base = OTHER; note = 2'-O-Methyl-adenosine
  modified_base 61: mod_base = OTHER; note = 2'-O-Methyl-cytidine
  modified_base 64: mod_base = OTHER; note = uridine phosphorothioate
  modified_base 66: mod_base = OTHER; note = 2'-O-Methyl-uridine
  modified_base 67: mod_base = OTHER; note = 2'-O-Methyl-cytidine
  modified_base 70: mod_base = OTHER; note = 2'-O-Methyl-cytidine
  modified_base 71: mod_base = OTHER; note = 2'-O-Methyl-uridine
  modified_base 72: mod_base = OTHER; note = 2'-O-Methyl-uridine
  modified_base 74: mod_base = OTHER; note = 2'-O-Methyl-adenosine
  modified_base 75: mod_base = OTHER; note = 2'-O-Methyl-adenosine
  modified_base 76: mod_base = OTHER; note = 2'-O-Methyl-adenosine
  modified_base 77: mod_base = OTHER; note = 2'-O-Methyl-adenosine
  modified_base 78: mod_base = OTHER; note = 2'-O-Methyl-adenosine
  modified_base 79: mod_base = OTHER; note = 2'-O-Methyl-guanosine
  modified_base 80: mod_base = OTHER; note = 2'-O-Methyl-uridine
  modified_base 82: mod_base = OTHER; note = 2'-O-Methyl-guanosine
  modified_base 83: mod_base = OTHER; note = 2'-O-Methyl-cytidine
  modified_base 84: mod_base = OTHER; note = 2'-O-Methyl-adenosine
  modified_base 85: mod_base = OTHER; note = 2'-O-Methyl-cytidine
  modified_base 86: mod_base = OTHER; note = 2'-O-Methyl-cytidine
  modified_base 87: mod_base = OTHER; note = 2'-O-Methyl-guanosine
  modified_base 89: mod_base = OTHER; note = 2'-O-Methyl-guanosine
  modified_base 92: mod_base = OTHER; note = 2'-O-Methyl-guanosine
  modified_base 93: mod_base = OTHER; note = 2'-O-Methyl-guanosine
  modified_base 94: mod_base = OTHER; note = 2'-O-Methyl-uridine
  modified_base 95: mod_base = OTHER; note = 2'-O-Methyl-guanosine
  modified_base 96: mod_base = OTHER; note = 2'-O-Methyl-cytidine
  modified_base 97: mod_base = OTHER; note = 2'-O-Methyl-uridine
  modified_base 98: mod_base = OTHER; note = 2'-O-Methyl-uridine phosphorothioate
  modified_base 99: mod_base = OTHER; note = 2'-O-Methyl-uridine phosphorothioate
  modified_base 100: mod_base = OTHER; note = 2'-O-Methyl-uridine

SEQ ID NO: 2391 - RNA, 100 nt, synthetic construct; identical to SEQ ID NO: 55
  source 1..100: mol_type = other RNA
  modified_base 1: mod_base = OTHER; note = 2'-O-Methyl-cytidine phosphorothioate
  modified_base 2: mod_base = OTHER; note = 2'-O-Methyl-adenosine phosphorothioate
  modified_base 3: mod_base = OTHER; note = 2'-O-Methyl-guanosine
  modified_base 21: mod_base = OTHER; note = 2'-O-Methyl-guanosine
  modified_base 25: mod_base = OTHER; note = uridine phosphorothioate
  modified_base 28: mod_base = OTHER; note = 2'-O-Methyl-adenosine
  modified_base 29: mod_base = OTHER; note = 2'-O-Methyl-guanosine
  modified_base 30: mod_base = OTHER; note = 2'-O-Methyl-cytidine
  modified_base 31: mod_base = OTHER; note = 2'-O-Methyl-uridine
  modified_base 32: mod_base = OTHER; note = 2'-O-Methyl-adenosine
  modified_base 33: mod_base = OTHER; note = 2'-O-Methyl-guanosine
  modified_base 34: mod_base = OTHER; note = 2'-O-Methyl-adenosine
  modified_base 35: mod_base = OTHER; note = 2'-O-Methyl-adenosine
  modified_base 36: mod_base = OTHER; note = 2'-O-Methyl-adenosine
  modified_base 37: mod_base = OTHER; note = 2'-O-Methyl-uridine
  modified_base 38: mod_base = OTHER; note = 2'-O-Methyl-adenosine
  modified_base 39: mod_base = OTHER; note = 2'-O-Methyl-guanosine
  modified_base 40: mod_base = OTHER; note = 2'-O-Methyl-cytidine
  modified_base 41: mod_base = OTHER; note = 2'-O-Methyl-adenosine
  modified_base 42: mod_base = OTHER; note = 2'-O-Methyl-adenosine
  modified_base 46: mod_base = OTHER; note = 2'-O-Methyl-adenosine
  modified_base 48: mod_base = OTHER; note = 2'-O-Methyl-adenosine
  modified_base 50: mod_base = OTHER; note = 2'-O-Methyl-uridine
  modified_base 52: mod_base = OTHER; note = 2'-O-Methyl-adenosine
  modified_base 53: mod_base = OTHER; note = 2'-O-Methyl-guanosine
  modified_base 54: mod_base = OTHER; note = 2'-O-Methyl-guanosine
  modified_base 55: mod_base = OTHER; note = 2'-O-Methyl-cytidine
  modified_base 56: mod_base = OTHER; note = 2'-O-Methyl-uridine
  modified_base 57: mod_base = OTHER; note = 2'-O-Methyl-adenosine
  modified_base 60: mod_base = OTHER; note = 2'-O-Methyl-cytidine
  modified_base 61: mod_base = OTHER; note = 2'-O-Methyl-cytidine
  modified_base 64: mod_base = OTHER; note = uridine phosphorothioate
  modified_base 66: mod_base = OTHER; note = 2'-O-Methyl-uridine
  modified_base 67: mod_base = OTHER; note = 2'-O-Methyl-cytidine
  modified_base 70: mod_base = OTHER; note = 2'-O-Methyl-cytidine
  modified_base 71: mod_base = OTHER; note = 2'-O-Methyl-uridine
  modified_base 72: mod_base = OTHER; note = 2'-O-Methyl-uridine
  modified_base 74: mod_base = OTHER; note = 2'-O-Methyl-adenosine
  modified_base 75: mod_base = OTHER; note = 2'-O-Methyl-adenosine
  modified_base 76: mod_base = OTHER; note = 2'-O-Methyl-adenosine
  modified_base 77: mod_base = OTHER; note = 2'-O-Methyl-adenosine
  modified_base 78: mod_base = OTHER; note = 2'-O-Methyl-adenosine
  modified_base 79: mod_base = OTHER; note = 2'-O-Methyl-guanosine
  modified_base 80: mod_base = OTHER; note = 2'-O-Methyl-uridine
  modified_base 82: mod_base = OTHER; note = 2'-O-Methyl-guanosine
  modified_base 83: mod_base = OTHER; note = 2'-O-Methyl-cytidine
  modified_base 84: mod_base = OTHER; note = 2'-O-Methyl-adenosine
  modified_base 85: mod_base = OTHER; note = 2'-O-Methyl-cytidine
  modified_base 86: mod_base = OTHER; note = 2'-O-Methyl-cytidine
  modified_base 87: mod_base = OTHER; note = 2'-O-Methyl-guanosine
  modified_base 89: mod_base = OTHER; note = 2'-O-Methyl-guanosine
  modified_base 92: mod_base = OTHER; note = 2'-O-Methyl-guanosine
  modified_base 93: mod_base = OTHER; note = 2'-O-Methyl-guanosine
  modified_base 94: mod_base = OTHER; note = 2'-O-Methyl-uridine
  modified_base 95: mod_base = OTHER; note = 2'-O-Methyl-guanosine
  modified_base 96: mod_base = OTHER; note = 2'-O-Methyl-cytidine
  modified_base 97: mod_base = OTHER; note = 2'-O-Methyl-uridine
  modified_base 98: mod_base = OTHER; note = 2'-O-Methyl-uridine phosphorothioate
  modified_base 99: mod_base = OTHER; note = 2'-O-Methyl-uridine phosphorothioate
  modified_base 100: mod_base = OTHER; note = 2'-O-Methyl-uridine

SEQ ID NO: 2392 - RNA, 100 nt, synthetic construct; identical to SEQ ID NO: 55
  source 1..100: mol_type = other RNA
  modified_base 1: mod_base = OTHER; note = 2'-O-Methyl-cytidine phosphorothioate
  modified_base 2: mod_base = OTHER; note = 2'-O-Methyl-adenosine phosphorothioate
  modified_base 3: mod_base = OTHER; note = 2'-O-Methyl-guanosine
  modified_base 21: mod_base = OTHER; note = 2'-O-Methyl-guanosine
  modified_base 25: mod_base = OTHER; note = uridine phosphorothioate
  modified_base 28: mod_base = OTHER; note = 2'-O-Methyl-adenosine
  modified_base 29: mod_base = OTHER; note = 2'-O-Methyl-guanosine
  modified_base 30: mod_base = OTHER; note = 2'-O-Methyl-cytidine
  modified_base 31: mod_base = OTHER; note = 2'-O-Methyl-uridine
  modified_base 32: mod_base = OTHER; note = 2'-O-Methyl-adenosine
  modified_base 33: mod_base = OTHER; note = 2'-O-Methyl-guanosine
  modified_base 34: mod_base = OTHER; note = 2'-O-Methyl-adenosine
  modified_base 35: mod_base = OTHER; note = 2'-O-Methyl-adenosine
  modified_base 36: mod_base = OTHER; note = 2'-O-Methyl-adenosine
  modified_base 37: mod_base = OTHER; note = 2'-O-Methyl-uridine
  modified_base 38: mod_base = OTHER; note = 2'-O-Methyl-adenosine
  modified_base 39: mod_base = OTHER; note = 2'-O-Methyl-guanosine
  modified_base 40: mod_base = OTHER; note = 2'-O-Methyl-cytidine
  modified_base 41: mod_base = OTHER; note = 2'-O-Methyl-adenosine
  modified_base 42: mod_base = OTHER; note = 2'-O-Methyl-adenosine
  modified_base 46: mod_base = OTHER; note = 2'-O-Methyl-adenosine
  modified_base 48: mod_base = OTHER; note = 2'-O-Methyl-adenosine
  modified_base 50: mod_base = OTHER; note = 2'-O-Methyl-uridine
  modified_base 52: mod_base = OTHER; note = 2'-O-Methyl-adenosine
  modified_base 53: mod_base = OTHER; note = 2'-O-Methyl-guanosine
  modified_base 54: mod_base = OTHER; note = 2'-O-Methyl-guanosine
  modified_base 57: mod_base = OTHER; note = 2'-O-Methyl-adenosine
  modified_base 61: mod_base = OTHER; note = 2'-O-Methyl-cytidine
  modified_base 64: mod_base = OTHER; note = uridine phosphorothioate
  modified_base 66: mod_base = OTHER; note = 2'-O-Methyl-uridine
  modified_base 67: mod_base = OTHER; note = 2'-O-Methyl-cytidine
  modified_base 70: mod_base = OTHER; note = 2'-O-Methyl-cytidine
  modified_base 71: mod_base = OTHER; note = 2'-O-Methyl-uridine
  modified_base 72: mod_base = OTHER; note = 2'-O-Methyl-uridine
  modified_base 73: mod_base = OTHER; note = 2'-O-Methyl-guanosine
  modified_base 74: mod_base = OTHER; note = 2'-O-Methyl-adenosine
  modified_base 75: mod_base = OTHER; note = 2'-O-Methyl-adenosine
  modified_base 76: mod_base = OTHER; note = 2'-O-Methyl-adenosine
  modified_base 77: mod_base = OTHER; note = 2'-O-Methyl-adenosine
  modified_base 78: mod_base = OTHER; note = 2'-O-Methyl-adenosine
  modified_base 79: mod_base = OTHER; note = 2'-O-Methyl-guanosine
  modified_base 80: mod_base = OTHER; note = 2'-O-Methyl-uridine
  modified_base 82: mod_base = OTHER; note = 2'-O-Methyl-guanosine
  modified_base 83: mod_base = OTHER; note = 2'-O-Methyl-cytidine
  modified_base 84: mod_base = OTHER; note = 2'-O-Methyl-adenosine
  modified_base 85: mod_base = OTHER; note = 2'-O-Methyl-cytidine
  modified_base 86: mod_base = OTHER; note = 2'-O-Methyl-cytidine
  modified_base 87: mod_base = OTHER; note = 2'-O-Methyl-guanosine
  modified_base 89: mod_base = OTHER; note = 2'-O-Methyl-guanosine
  modified_base 92: mod_base = OTHER; note = 2'-O-Methyl-guanosine
  modified_base 93: mod_base = OTHER; note = 2'-O-Methyl-guanosine
  modified_base 94: mod_base = OTHER; note = 2'-O-Methyl-uridine
  modified_base 95: mod_base = OTHER; note = 2'-O-Methyl-guanosine
  modified_base 96: mod_base = OTHER; note = 2'-O-Methyl-cytidine
  modified_base 97: mod_base = OTHER; note = 2'-O-Methyl-uridine
  modified_base 98: mod_base = OTHER; note = 2'-O-Methyl-uridine phosphorothioate
  modified_base 99: mod_base = OTHER; note = 2'-O-Methyl-uridine phosphorothioate
  modified_base 100: mod_base = OTHER; note = 2'-O-Methyl-uridine

SEQ ID NO: 2393 - RNA, 100 nt, synthetic construct; identical to SEQ ID NO: 55
  source 1..100: mol_type = other RNA
  modified_base 1: mod_base = OTHER; note = 2'-O-Methyl-cytidine phosphorothioate
  modified_base 2: mod_base = OTHER; note = 2'-O-Methyl-adenosine phosphorothioate
  modified_base 3: mod_base = OTHER; note = 2'-O-Methyl-guanosine
  modified_base 21: mod_base = OTHER; note = 2'-O-Methyl-guanosine
  modified_base 25: mod_base = OTHER; note = uridine phosphorothioate
  modified_base 28: mod_base = OTHER; note = 2'-O-Methyl-adenosine
  modified_base 29: mod_base = OTHER; note = 2'-O-Methyl-guanosine
  modified_base 30: mod_base = OTHER; note = 2'-O-Methyl-cytidine
  modified_base 31: mod_base = OTHER; note = 2'-O-Methyl-uridine
  modified_base 32: mod_base = OTHER; note = 2'-O-Methyl-adenosine
  modified_base 33: mod_base = OTHER; note = 2'-O-Methyl-guanosine
  modified_base 34: mod_base = OTHER; note = 2'-O-Methyl-adenosine
  modified_base 35: mod_base = OTHER; note = 2'-O-Methyl-adenosine
  modified_base 36: mod_base = OTHER; note = 2'-O-Methyl-adenosine
  modified_base 37: mod_base = OTHER; note = 2'-O-Methyl-uridine
  modified_base 38: mod_base = OTHER; note = 2'-O-Methyl-adenosine
  modified_base 39: mod_base = OTHER; note = 2'-O-Methyl-guanosine
  modified_base 40: mod_base = OTHER; note = 2'-O-Methyl-cytidine
  modified_base 41: mod_base = OTHER; note = 2'-O-Methyl-adenosine
  modified_base 42: mod_base = OTHER; note = 2'-O-Methyl-adenosine
  modified_base 46: mod_base = OTHER; note = 2'-O-Methyl-adenosine
  modified_base 48: mod_base = OTHER; note = 2'-O-Methyl-adenosine
  modified_base 50: mod_base = OTHER; note = 2'-O-Methyl-uridine
  modified_base 52: mod_base = OTHER; note = 2'-O-Methyl-adenosine
  modified_base 53: mod_base = OTHER; note = 2'-O-Methyl-guanosine
  modified_base 54: mod_base = OTHER; note = 2'-O-Methyl-guanosine
  modified_base 57: mod_base = OTHER; note = 2'-O-Methyl-adenosine
  modified_base 61: mod_base = OTHER; note = 2'-O-Methyl-cytidine
  modified_base 64: mod_base = OTHER; note = uridine phosphorothioate
  modified_base 66: mod_base = OTHER; note = 2'-O-Methyl-uridine
  modified_base 67: mod_base = OTHER; note = 2'-O-Methyl-cytidine
  modified_base 70: mod_base = OTHER; note = 2'-O-Methyl-cytidine
  modified_base 71: mod_base = OTHER; note = 2'-O-Methyl-uridine
  modified_base 72: mod_base = OTHER; note = 2'-O-Methyl-uridine
  modified_base 73: mod_base = OTHER; note = 2'-O-Methyl-guanosine
  modified_base 74: mod_base = OTHER; note = 2'-O-Methyl-adenosine
  modified_base 75: mod_base = OTHER; note = 2'-O-Methyl-adenosine
  modified_base 76: mod_base = OTHER; note = 2'-O-Methyl-adenosine
  modified_base 77: mod_base = OTHER; note = 2'-O-Methyl-adenosine
  modified_base 78: mod_base = OTHER; note = 2'-O-Methyl-adenosine
  modified_base 79: mod_base = OTHER; note = 2'-O-Methyl-guanosine
  modified_base 80: mod_base = OTHER; note = 2'-O-Methyl-uridine
  modified_base 82: mod_base = OTHER; note = 2'-O-Methyl-guanosine
  modified_base 83: mod_base = OTHER; note = 2'-O-Methyl-cytidine
  modified_base 84: mod_base = OTHER; note = 2'-O-Methyl-adenosine
  modified_base 85: mod_base = OTHER; note = 2'-O-Methyl-cytidine
  modified_base 86: mod_base = OTHER; note = 2'-O-Methyl-cytidine
  modified_base 87: mod_base = OTHER; note = 2'-O-Methyl-guanosine
  modified_base 89: mod_base = OTHER; note = 2'-O-Methyl-guanosine
  modified_base 91: mod_base = OTHER; note = 2'-O-Methyl-cytidine
  modified_base 92: mod_base = OTHER; note = 2'-O-Methyl-guanosine
  modified_base 93: mod_base = OTHER; note = 2'-O-Methyl-guanosine
  modified_base 94: mod_base = OTHER; note = 2'-O-Methyl-uridine
  modified_base 95: mod_base = OTHER; note = 2'-O-Methyl-guanosine
  modified_base 96: mod_base = OTHER; note = 2'-O-Methyl-cytidine
  modified_base 97: mod_base = OTHER; note = 2'-O-Methyl-uridine
  modified_base 98: mod_base = OTHER; note = 2'-O-Methyl-uridine phosphorothioate
  modified_base 99: mod_base = OTHER; note = 2'-O-Methyl-uridine phosphorothioate
  modified_base 100: mod_base = OTHER; note = 2'-O-Methyl-uridine

SEQ ID NO: 2394 - RNA, 100 nt, synthetic construct; identical to SEQ ID NO: 55
  source 1..100: mol_type = other RNA
  modified_base 1: mod_base = OTHER; note = 2'-O-Methyl-cytidine phosphorothioate
  modified_base 2: mod_base = OTHER; note = 2'-O-Methyl-adenosine phosphorothioate
  modified_base 3: mod_base = OTHER; note = 2'-O-Methyl-guanosine
  modified_base 21: mod_base = OTHER; note = 2'-O-Methyl-guanosine
  modified_base 25: mod_base = OTHER; note = uridine phosphorothioate
  modified_base 28: mod_base = OTHER; note = 2'-O-Methyl-adenosine
  modified_base 29: mod_base = OTHER; note = 2'-O-Methyl-guanosine
  modified_base 30: mod_base = OTHER; note = 2'-O-Methyl-cytidine
  modified_base 31: mod_base = OTHER; note = 2'-O-Methyl-uridine
  modified_base 32: mod_base = OTHER; note = 2'-O-Methyl-adenosine
  modified_base 34: mod_base = OTHER; note = 2'-O-Methyl-adenosine
  modified_base 35: mod_base = OTHER; note = 2'-O-Methyl-adenosine
  modified_base 36: mod_base = OTHER; note = 2'-O-Methyl-adenosine
  modified_base 37: mod_base = OTHER; note = 2'-O-Methyl-uridine
  modified_base 38: mod_base = OTHER; note = 2'-O-Methyl-adenosine
  modified_base 39: mod_base = OTHER; note = 2'-O-Methyl-guanosine
  modified_base 40: mod_base = OTHER; note = 2'-O-Methyl-cytidine
  modified_base 41: mod_base = OTHER; note = 2'-O-Methyl-adenosine
  modified_base 42: mod_base = OTHER; note = 2'-O-Methyl-adenosine
  modified_base 46: mod_base = OTHER; note = 2'-O-Methyl-adenosine
  modified_base 48: mod_base = OTHER; note = 2'-O-Methyl-adenosine
  modified_base 50: mod_base = OTHER; note = 2'-O-Methyl-uridine
  modified_base 52: mod_base = OTHER; note = 2'-O-Methyl-adenosine
  modified_base 53: mod_base = OTHER; note = 2'-O-Methyl-guanosine
  modified_base 54: mod_base = OTHER; note = 2'-O-Methyl-guanosine
  modified_base 57: mod_base = OTHER; note = 2'-O-Methyl-adenosine
  modified_base 61: mod_base = OTHER; note = 2'-O-Methyl-cytidine
  modified_base 64: mod_base = OTHER; note = uridine phosphorothioate
  modified_base 66: mod_base = OTHER; note = 2'-O-Methyl-uridine
  modified_base 67: mod_base = OTHER; note = 2'-O-Methyl-cytidine
  modified_base 70: mod_base = OTHER; note = 2'-O-Methyl-cytidine
  modified_base 71: mod_base = OTHER; note = 2'-O-Methyl-uridine
  modified_base 72: mod_base = OTHER; note = 2'-O-Methyl-uridine
  modified_base 73: mod_base = OTHER; note = 2'-O-Methyl-guanosine
  modified_base 74: mod_base = OTHER; note = 2'-O-Methyl-adenosine
  modified_base 75: mod_base = OTHER; note = 2'-O-Methyl-adenosine
  modified_base 76: mod_base = OTHER; note = 2'-O-Methyl-adenosine
  modified_base 77: mod_base = OTHER; note = 2'-O-Methyl-adenosine
  modified_base 78: mod_base = OTHER; note = 2'-O-Methyl-adenosine
  modified_base 79: mod_base = OTHER; note = 2'-O-Methyl-guanosine
  modified_base 80: mod_base = OTHER; note = 2'-O-Methyl-uridine
  modified_base 82: mod_base = OTHER; note = 2'-O-Methyl-guanosine
  modified_base 83: mod_base = OTHER; note = 2'-O-Methyl-cytidine
  modified_base 84: mod_base = OTHER; note = 2'-O-Methyl-adenosine
  modified_base 85: mod_base = OTHER; note = 2'-O-Methyl-cytidine
  modified_base 86: mod_base = OTHER; note = 2'-O-Methyl-cytidine
  modified_base 87: mod_base = OTHER; note = 2'-O-Methyl-guanosine
  modified_base 89: mod_base = OTHER; note = 2'-O-Methyl-guanosine
  modified_base 92: mod_base = OTHER; note = 2'-O-Methyl-guanosine
  modified_base 93: mod_base = OTHER; note = 2'-O-Methyl-guanosine
  modified_base 94: mod_base = OTHER; note = 2'-O-Methyl-uridine
  modified_base 95: mod_base = OTHER; note = 2'-O-Methyl-guanosine
  modified_base 96: mod_base = OTHER; note = 2'-O-Methyl-cytidine
  modified_base 97: mod_base = OTHER; note = 2'-O-Methyl-uridine
  modified_base 98: mod_base = OTHER; note = 2'-O-Methyl-uridine phosphorothioate
  modified_base 99: mod_base = OTHER; note = 2'-O-Methyl-uridine phosphorothioate
  modified_base 100: mod_base = OTHER; note = 2'-O-Methyl-uridine

SEQ ID NO: 2395 - RNA, 100 nt, synthetic construct; identical to SEQ ID NO: 55
  source 1..100: mol_type = other RNA
  modified_base 1: mod_base = OTHER; note = 2'-O-Methyl-cytidine phosphorothioate
  modified_base 2: mod_base = OTHER; note = 2'-O-Methyl-adenosine phosphorothioate
  modified_base 3: mod_base = OTHER; note = 2'-O-Methyl-guanosine
  modified_base 21: mod_base = OTHER; note = 2'-O-Methyl-guanosine
  modified_base 25: mod_base = OTHER; note = uridine phosphorothioate
  modified_base 28: mod_base = OTHER; note = 2'-O-Methyl-adenosine
  modified_base 29: mod_base = OTHER; note = 2'-O-Methyl-guanosine
  modified_base 30: mod_base = OTHER; note = 2'-O-Methyl-cytidine
  modified_base 31: mod_base = OTHER; note = 2'-O-Methyl-uridine
  modified_base 32: mod_base = OTHER; note = 2'-O-Methyl-adenosine
  modified_base 34: mod_base = OTHER; note = 2'-O-Methyl-adenosine
  modified_base 35: mod_base = OTHER; note = 2'-O-Methyl-adenosine
  modified_base 36: mod_base = OTHER; note = 2'-O-Methyl-adenosine
  modified_base 37: mod_base = OTHER; note = 2'-O-Methyl-uridine
  modified_base 38: mod_base = OTHER; note = 2'-O-Methyl-adenosine
  modified_base 39: mod_base = OTHER; note = 2'-O-Methyl-guanosine
  modified_base 40: mod_base = OTHER; note = 2'-O-Methyl-cytidine
  modified_base 41: mod_base = OTHER; note = 2'-O-Methyl-adenosine
  modified_base 42: mod_base = OTHER; note = 2'-O-Methyl-adenosine
  modified_base 46: mod_base = OTHER; note = 2'-O-Methyl-adenosine
  modified_base 48: mod_base = OTHER; note = 2'-O-Methyl-adenosine
  modified_base 50: mod_base = OTHER; note = 2'-O-Methyl-uridine
  modified_base 52: mod_base = OTHER; note = 2'-O-Methyl-adenosine
  modified_base 53: mod_base = OTHER; note = 2'-O-Methyl-guanosine
  modified_base 54: mod_base = OTHER; note = 2'-O-Methyl-guanosine
  modified_base 57: mod_base = OTHER; note = 2'-O-Methyl-adenosine
  modified_base 61: mod_base = OTHER; note = 2'-O-Methyl-cytidine
  modified_base 64: mod_base = OTHER; note = uridine phosphorothioate
  modified_base 66: mod_base = OTHER; note = 2'-O-Methyl-uridine
  modified_base 67: mod_base = OTHER; note = 2'-O-Methyl-cytidine
  modified_base 70: mod_base = OTHER; note = 2'-O-Methyl-cytidine
  modified_base 71: mod_base = OTHER; note = 2'-O-Methyl-uridine
  modified_base 72: mod_base = OTHER; note = 2'-O-Methyl-uridine
  modified_base 73: mod_base = OTHER; note = 2'-O-Methyl-guanosine
  modified_base 74: mod_base = OTHER; note = 2'-O-Methyl-adenosine
  modified_base 75: mod_base = OTHER; note = 2'-O-Methyl-adenosine
  modified_base 76: mod_base = OTHER; note = 2'-O-Methyl-adenosine
  modified_base 77: mod_base = OTHER; note = 2'-O-Methyl-adenosine
  modified_base 78: mod_base = OTHER; note = 2'-O-Methyl-adenosine
  modified_base 79: mod_base = OTHER; note = 2'-O-Methyl-guanosine
  modified_base 80: mod_base = OTHER; note = 2'-O-Methyl-uridine
  modified_base 82: mod_base = OTHER; note = 2'-O-Methyl-guanosine
  modified_base 83: mod_base = OTHER; note = 2'-O-Methyl-cytidine
  modified_base 84: mod_base = OTHER; note = 2'-O-Methyl-adenosine
  modified_base 85: mod_base = OTHER; note = 2'-O-Methyl-cytidine
  modified_base 86: mod_base = OTHER; note = 2'-O-Methyl-cytidine
  modified_base 87: mod_base = OTHER; note = 2'-O-Methyl-guanosine
  modified_base 89: mod_base = OTHER; note = 2'-O-Methyl-guanosine
  modified_base 91: mod_base = OTHER; note = 2'-O-Methyl-cytidine
  modified_base 92: mod_base = OTHER; note = 2'-O-Methyl-guanosine
  modified_base 93: mod_base = OTHER; note = 2'-O-Methyl-guanosine
  modified_base 94: mod_base = OTHER; note = 2'-O-Methyl-uridine
  modified_base 95: mod_base = OTHER; note = 2'-O-Methyl-guanosine
  modified_base 96: mod_base = OTHER; note = 2'-O-Methyl-cytidine
  modified_base 97: mod_base = OTHER; note = 2'-O-Methyl-uridine
  modified_base 98: mod_base = OTHER; note = 2'-O-Methyl-uridine phosphorothioate
  modified_base 99: mod_base = OTHER; note = 2'-O-Methyl-uridine phosphorothioate
  modified_base 100: mod_base = OTHER; note = 2'-O-Methyl-uridine

SEQ ID NO: 2396 - RNA, 100 nt, synthetic construct; identical to SEQ ID NO: 55
  source 1..100: mol_type = other RNA
  modified_base 1: mod_base = OTHER; note = 2'-O-Methyl-cytidine phosphorothioate
  modified_base 2: mod_base = OTHER; note = 2'-O-Methyl-adenosine phosphorothioate
  modified_base 3: mod_base = OTHER; note = 2'-O-Methyl-guanosine
  modified_base 21: mod_base = OTHER; note = 2'-O-Methyl-guanosine
  modified_base 25: mod_base = OTHER; note = uridine phosphorothioate
  modified_base 28: mod_base = OTHER; note = 2'-O-Methyl-adenosine
  modified_base 29: mod_base = OTHER; note = 2'-O-Methyl-guanosine
  modified_base 30: mod_base = OTHER; note = 2'-O-Methyl-cytidine
  modified_base 31: mod_base = OTHER; note = 2'-O-Methyl-uridine
  modified_base 32: mod_base = OTHER; note = 2'-O-Methyl-adenosine
  modified_base 34: mod_base = OTHER; note = 2'-O-Methyl-adenosine
  modified_base 35: mod_base = OTHER; note = 2'-O-Methyl-adenosine
  modified_base 36: mod_base = OTHER; note = 2'-O-Methyl-adenosine
  modified_base 37: mod_base = OTHER; note = 2'-O-Methyl-uridine
  modified_base 38: mod_base = OTHER; note = 2'-O-Methyl-adenosine
  modified_base 39: mod_base = OTHER; note = 2'-O-Methyl-guanosine
  modified_base 40: mod_base = OTHER; note = 2'-O-Methyl-cytidine
  modified_base 41: mod_base = OTHER; note = 2'-O-Methyl-adenosine
  modified_base 42: mod_base = OTHER; note = 2'-O-Methyl-adenosine
  modified_base 46: mod_base = OTHER; note = 2'-O-Methyl-adenosine
  modified_base 48: mod_base = OTHER; note = 2'-O-Methyl-adenosine
  modified_base 50: mod_base = OTHER; note = 2'-O-Methyl-uridine
  modified_base 52: mod_base = OTHER; note = 2'-O-Methyl-adenosine
  modified_base 53: mod_base = OTHER; note = 2'-O-Methyl-guanosine
  modified_base 54: mod_base = OTHER; note = 2'-O-Methyl-guanosine
  modified_base 55: mod_base = OTHER; note = 2'-O-Methyl-cytidine
  modified_base 56: mod_base = OTHER; note = 2'-O-Methyl-uridine
  modified_base 57: mod_base = OTHER; note = 2'-O-Methyl-adenosine
  modified_base 60: mod_base = OTHER; note = 2'-O-Methyl-cytidine
  modified_base 61: mod_base = OTHER; note = 2'-O-Methyl-cytidine
  modified_base 64: mod_base = OTHER; note = uridine phosphorothioate
  modified_base 66: mod_base = OTHER; note = 2'-O-Methyl-uridine
  modified_base 67: mod_base = OTHER; note = 2'-O-Methyl-cytidine
  modified_base 70: mod_base = OTHER; note = 2'-O-Methyl-cytidine
  modified_base 71: mod_base = OTHER; note = 2'-O-Methyl-uridine
  modified_base 72: mod_base = OTHER; note = 2'-O-Methyl-uridine
  modified_base 74: mod_base = OTHER; note = 2'-O-Methyl-adenosine
  modified_base 75: mod_base = OTHER; note = 2'-O-Methyl-adenosine
  modified_base 76: mod_base = OTHER; note = 2'-O-Methyl-adenosine
  modified_base 77: mod_base = OTHER; note = 2'-O-Methyl-adenosine
  modified_base 78: mod_base = OTHER; note = 2'-O-Methyl-adenosine
  modified_base 79: mod_base = OTHER; note = 2'-O-Methyl-guanosine
  modified_base 80: mod_base = OTHER; note = 2'-O-Methyl-uridine
  modified_base 82: mod_base = OTHER; note = 2'-O-Methyl-guanosine
  modified_base 83: mod_base = OTHER; note = 2'-O-Methyl-cytidine
  modified_base 84: mod_base = OTHER; note = 2'-O-Methyl-adenosine
  modified_base 85: mod_base = OTHER; note = 2'-O-Methyl-cytidine
  modified_base 86: mod_base = OTHER; note = 2'-O-Methyl-cytidine
  modified_base 87: mod_base = OTHER; note = 2'-O-Methyl-guanosine
  modified_base 89: mod_base = OTHER; note = 2'-O-Methyl-guanosine
  modified_base 92: mod_base = OTHER; note = 2'-O-Methyl-guanosine
  modified_base 93: mod_base = OTHER; note = 2'-O-Methyl-guanosine
  modified_base 94: mod_base = OTHER; note = 2'-O-Methyl-uridine
  modified_base 95: mod_base = OTHER; note = 2'-O-Methyl-guanosine
  modified_base 96: mod_base = OTHER; note = 2'-O-Methyl-cytidine
  modified_base 97: mod_base = OTHER; note = 2'-O-Methyl-uridine
  modified_base 98: mod_base = OTHER; note = 2'-O-Methyl-uridine phosphorothioate
  modified_base 99: mod_base = OTHER; note = 2'-O-Methyl-uridine phosphorothioate
  modified_base 100: mod_base = OTHER; note = 2'-O-Methyl-uridine

SEQ ID NO: 2397 - RNA, 100 nt, synthetic construct; identical to SEQ ID NO: 421
  source 1..100: mol_type = other RNA
  modified_base 1: mod_base = OTHER; note = 2'-O-Methyl-cytidine phosphorothioate
  modified_base 2: mod_base = OTHER; note = 2'-O-Methyl-cytidine phosphorothioate
  modified_base 3: mod_base = OTHER; note = 2'-O-Methyl-cytidine
  modified_base 21: mod_base = OTHER; note = 2'-O-Methyl-guanosine
  modified_base 25: mod_base = OTHER; note = uridine phosphorothioate
  modified_base 28: mod_base = OTHER; note = 2'-O-Methyl-adenosine
  modified_base 29: mod_base = OTHER; note = 2'-O-Methyl-guanosine
  modified_base 30: mod_base = OTHER; note = 2'-O-Methyl-cytidine
  modified_base 31: mod_base = OTHER; note = 2'-O-Methyl-uridine
  modified_base 32: mod_base = OTHER; note = 2'-O-Methyl-adenosine
  modified_base 33: mod_base = OTHER; note = 2'-O-Methyl-guanosine
  modified_base 34: mod_base = OTHER; note = 2'-O-Methyl-adenosine
  modified_base 35: mod_base = OTHER; note = 2'-O-Methyl-adenosine
  modified_base 36: mod_base = OTHER; note = 2'-O-Methyl-adenosine
  modified_base 37: mod_base = OTHER; note = 2'-O-Methyl-uridine
  modified_base 38: mod_base = OTHER; note = 2'-O-Methyl-adenosine
  modified_base 39: mod_base = OTHER; note = 2'-O-Methyl-guanosine
  modified_base 40: mod_base = OTHER; note = 2'-O-Methyl-cytidine
  modified_base 41: mod_base = OTHER; note = 2'-O-Methyl-adenosine
  modified_base 42: mod_base = OTHER; note = 2'-O-Methyl-adenosine
  modified_base 45: mod_base = OTHER; note = uridine phosphorothioate
  modified_base 46: mod_base = OTHER; note = 2'-O-Methyl-adenosine
  modified_base 48: mod_base = OTHER; note = 2'-O-Methyl-adenosine
  modified_base 50: mod_base = OTHER; note = 2'-O-Methyl-uridine
  modified_base 52: mod_base = OTHER; note = 2'-O-Methyl-adenosine
  modified_base 53: mod_base = OTHER; note = 2'-O-Methyl-guanosine
  modified_base 54: mod_base = OTHER; note = 2'-O-Methyl-guanosine
  modified_base 55: mod_base = OTHER; note = 2'-O-Methyl-cytidine
  modified_base 56: mod_base = OTHER; note = 2'-O-Methyl-uridine
  modified_base 57: mod_base = OTHER; note = 2'-O-Methyl-adenosine
  modified_base 60: mod_base = OTHER; note = 2'-O-Methyl-cytidine
  modified_base 61: mod_base = OTHER; note = 2'-O-Methyl-cytidine
  modified_base 64: mod_base = OTHER; note = uridine phosphorothioate
  modified_base 66: mod_base = OTHER; note = 2'-O-Methyl-uridine
  modified_base 67: mod_base = OTHER; note = 2'-O-Methyl-cytidine
  modified_base 70: mod_base = OTHER; note = 2'-O-Methyl-cytidine
  modified_base 71: mod_base = OTHER; note = 2'-O-Methyl-uridine
  modified_base 72: mod_base = OTHER; note = 2'-O-Methyl-uridine
  modified_base 73: mod_base = OTHER; note = 2'-O-Methyl-guanosine
  modified_base 74: mod_base = OTHER; note = 2'-O-Methyl-adenosine
  modified_base 75: mod_base = OTHER; note = 2'-O-Methyl-adenosine
  modified_base 76: mod_base = OTHER; note = 2'-O-Methyl-adenosine
  modified_base 77: mod_base = OTHER; note = 2'-O-Methyl-adenosine
  modified_base 78: mod_base = OTHER; note = 2'-O-Methyl-adenosine
  modified_base 79: mod_base = OTHER; note = 2'-O-Methyl-guanosine
  modified_base 80: mod_base = OTHER; note = 2'-O-Methyl-uridine
  modified_base 81: mod_base = OTHER; note = 2'-O-Methyl-guanosine
  modified_base 83: mod_base = OTHER; note = 2'-O-Methyl-cytidine
  modified_base 84: mod_base = OTHER; note = 2'-O-Methyl-adenosine
  modified_base 85: mod_base = OTHER; note = 2'-O-Methyl-cytidine
  modified_base 86: mod_base = OTHER; note = 2'-O-Methyl-cytidine
  modified_base 87: mod_base = OTHER; note = 2'-O-Methyl-guanosine
  modified_base 88: mod_base = OTHER; note = 2'-O-Methyl-adenosine
  modified_base 89: mod_base = OTHER; note = 2'-O-Methyl-guanosine
  modified_base 90: mod_base = OTHER; note = 2'-O-Methyl-uridine
  modified_base 91: mod_base = OTHER; note = 2'-O-Methyl-cytidine
  modified_base 92: mod_base = OTHER; note = 2'-O-Methyl-guanosine
  modified_base 93: mod_base = OTHER; note = 2'-O-Methyl-guanosine
  modified_base 94: mod_base = OTHER; note = 2'-O-Methyl-uridine
  modified_base 95: mod_base = OTHER; note = 2'-O-Methyl-guanosine
  modified_base 96: mod_base = OTHER; note = 2'-O-Methyl-cytidine
  modified_base 97: mod_base = OTHER; note = 2'-O-Methyl-uridine
  modified_base 98: mod_base = OTHER; note = 2'-O-Methyl-uridine phosphorothioate
  modified_base 99: mod_base = OTHER; note = 2'-O-Methyl-uridine phosphorothioate
  modified_base 100: mod_base = OTHER; note = 2'-O-Methyl-uridine

SEQ ID NO: 2398 - RNA, 100 nt, synthetic construct; identical to SEQ ID NO: 421
  source 1..100: mol_type = other RNA
  modified_base 1: mod_base = OTHER; note = 2'-O-Methyl-cytidine phosphorothioate
  modified_base 2: mod_base = OTHER; note = 2'-O-Methyl-cytidine phosphorothioate
  modified_base 3: mod_base = OTHER; note = 2'-O-Methyl-cytidine
  modified_base 21: mod_base = OTHER; note = 2'-O-Methyl-guanosine
  modified_base 25: mod_base = OTHER; note = uridine phosphorothioate
  modified_base 28: mod_base = OTHER; note = 2'-O-Methyl-adenosine
  modified_base 29: mod_base = OTHER; note = 2'-O-Methyl-guanosine
  modified_base 30: mod_base = OTHER; note = 2'-O-Methyl-cytidine
  modified_base 31: mod_base = OTHER; note = 2'-O-Methyl-uridine
  modified_base 32: mod_base = OTHER; note = 2'-O-Methyl-adenosine
  modified_base 34: mod_base = OTHER; note = 2'-O-Methyl-adenosine
  modified_base 35: mod_base = OTHER; note = 2'-O-Methyl-adenosine
  modified_base 36: mod_base = OTHER; note = 2'-O-Methyl-adenosine
  modified_base 37: mod_base = OTHER; note = 2'-O-Methyl-uridine
  modified_base 38: mod_base = OTHER; note = 2'-O-Methyl-adenosine
  modified_base 39: mod_base = OTHER; note = 2'-O-Methyl-guanosine
  modified_base 40: mod_base = OTHER; note = 2'-O-Methyl-cytidine
  modified_base 41: mod_base = OTHER; note = 2'-O-Methyl-adenosine
  modified_base 42: mod_base = OTHER; note = 2'-O-Methyl-adenosine
  modified_base 45: mod_base = OTHER; note = uridine phosphorothioate
  modified_base 46: mod_base = OTHER; note = 2'-O-Methyl-adenosine
  modified_base 48: mod_base = OTHER; note = 2'-O-Methyl-adenosine
  modified_base 50: mod_base = OTHER; note = 2'-O-Methyl-uridine
  modified_base 52: mod_base = OTHER; note = 2'-O-Methyl-adenosine
  modified_base 53: mod_base = OTHER; note = 2'-O-Methyl-guanosine
  modified_base 54: mod_base = OTHER; note = 2'-O-Methyl-guanosine
  modified_base 55: mod_base = OTHER; note = 2'-O-Methyl-cytidine
  modified_base 56: mod_base = OTHER; note = 2'-O-Methyl-uridine
  modified_base 57: mod_base = OTHER; note = 2'-O-Methyl-adenosine
  modified_base 60: mod_base = OTHER; note = 2'-O-Methyl-cytidine
  modified_base 61: mod_base = OTHER; note = 2'-O-Methyl-cytidine
  modified_base 64: mod_base = OTHER; note = uridine phosphorothioate
  modified_base 66: mod_base = OTHER; note = 2'-O-Methyl-uridine
  modified_base 67: mod_base = OTHER; note = 2'-O-Methyl-cytidine
  modified_base 70: mod_base = OTHER; note = 2'-O-Methyl-cytidine
  modified_base 71: mod_base = OTHER; note = 2'-O-Methyl-uridine
  modified_base 72: mod_base = OTHER; note = 2'-O-Methyl-uridine
  modified_base 74: mod_base = OTHER; note = 2'-O-Methyl-adenosine
  modified_base 75: mod_base = OTHER; note = 2'-O-Methyl-adenosine
  modified_base 76: mod_base = OTHER; note = 2'-O-Methyl-adenosine
  modified_base 77: mod_base = OTHER; note = 2'-O-Methyl-adenosine
  modified_base 78: mod_base = OTHER; note = 2'-O-Methyl-adenosine
  modified_base 79: mod_base = OTHER; note = 2'-O-Methyl-guanosine
  modified_base 80: mod_base = OTHER; note = 2'-O-Methyl-uridine
  modified_base 81: mod_base = OTHER; note = 2'-O-Methyl-guanosine
  modified_base 83: mod_base = OTHER; note = 2'-O-Methyl-cytidine
  modified_base 84: mod_base = OTHER; note = 2'-O-Methyl-adenosine
  modified_base 85: mod_base = OTHER; note = 2'-O-Methyl-cytidine
  modified_base 86: mod_base = OTHER; note = 2'-O-Methyl-cytidine
  modified_base 87: mod_base = OTHER; note = 2'-O-Methyl-guanosine
  modified_base 88: mod_base = OTHER; note = 2'-O-Methyl-adenosine
  modified_base 89: mod_base = OTHER; note = 2'-O-Methyl-guanosine
  modified_base 90: mod_base = OTHER; note = 2'-O-Methyl-uridine
  modified_base 91: mod_base = OTHER; note = 2'-O-Methyl-cytidine
  modified_base 92: mod_base = OTHER; note = 2'-O-Methyl-guanosine
  modified_base 93: mod_base = OTHER; note = 2'-O-Methyl-guanosine
  modified_base 94: mod_base = OTHER; note = 2'-O-Methyl-uridine
  modified_base 95: mod_base = OTHER; note = 2'-O-Methyl-guanosine
  modified_base 96: mod_base = OTHER; note = 2'-O-Methyl-cytidine
  modified_base 97: mod_base = OTHER; note = 2'-O-Methyl-uridine
  modified_base 98: mod_base = OTHER; note = 2'-O-Methyl-uridine phosphorothioate
  modified_base 99: mod_base = OTHER; note = 2'-O-Methyl-uridine phosphorothioate
  modified_base 100: mod_base = OTHER; note = 2'-O-Methyl-uridine

SEQ ID NO: 2399 - RNA, 100 nt, synthetic construct; identical to SEQ ID NO: 422
  source 1..100: mol_type = other RNA
  modified_base 1: mod_base = OTHER; note = 2'-O-Methyl-guanosine phosphorothioate
  modified_base 2: mod_base = OTHER; note = 2'-O-Methyl-adenosine phosphorothioate
  modified_base 3: mod_base = OTHER; note = 2'-O-Methyl-guanosine
  modified_base 21: mod_base = OTHER; note = 2'-O-Methyl-guanosine
  modified_base 25: mod_base = OTHER; note = uridine phosphorothioate
  modified_base 28: mod_base = OTHER; note = 2'-O-Methyl-adenosine
  modified_base 29: mod_base = OTHER; note = 2'-O-Methyl-guanosine
  modified_base 30: mod_base = OTHER; note = 2'-O-Methyl-cytidine
  modified_base 31: mod_base = OTHER; note = 2'-O-Methyl-uridine
  modified_base 32: mod_base = OTHER; note = 2'-O-Methyl-adenosine
  modified_base 33: mod_base = OTHER; note = 2'-O-Methyl-guanosine
  modified_base 34: mod_base = OTHER; note = 2'-O-Methyl-adenosine
  modified_base 35: mod_base = OTHER; note = 2'-O-Methyl-adenosine
  modified_base 36: mod_base = OTHER; note = 2'-O-Methyl-adenosine
  modified_base 37: mod_base = OTHER; note = 2'-O-Methyl-uridine
  modified_base 38: mod_base = OTHER; note = 2'-O-Methyl-adenosine
  modified_base 39: mod_base = OTHER; note = 2'-O-Methyl-guanosine
  modified_base 40: mod_base = OTHER; note = 2'-O-Methyl-cytidine
  modified_base 41: mod_base = OTHER; note = 2'-O-Methyl-adenosine
  modified_base 42: mod_base = OTHER; note = 2'-O-Methyl-adenosine
  modified_base 45: mod_base = OTHER; note = uridine phosphorothioate
  modified_base 46: mod_base = OTHER; note = 2'-O-Methyl-adenosine
  modified_base 48: mod_base = OTHER; note = 2'-O-Methyl-adenosine
  modified_base 50: mod_base = OTHER; note = 2'-O-Methyl-uridine
  modified_base 52: mod_base = OTHER; note = 2'-O-Methyl-adenosine
  modified_base 53: mod_base = OTHER; note = 2'-O-Methyl-guanosine
  modified_base 54: mod_base = OTHER; note = 2'-O-Methyl-guanosine
  modified_base 55: mod_base = OTHER; note = 2'-O-Methyl-cytidine
  modified_base 56: mod_base = OTHER; note = 2'-O-Methyl-uridine
  modified_base 57: mod_base = OTHER; note = 2'-O-Methyl-adenosine
  modified_base 60: mod_base = OTHER; note = 2'-O-Methyl-cytidine
  modified_base 61: mod_base = OTHER; note = 2'-O-Methyl-cytidine
  modified_base 64: mod_base = OTHER; note = uridine phosphorothioate
  modified_base 66: mod_base = OTHER; note = 2'-O-Methyl-uridine
  modified_base 67: mod_base = OTHER; note = 2'-O-Methyl-cytidine
  modified_base 70: mod_base = OTHER; note = 2'-O-Methyl-cytidine
  modified_base 71: mod_base = OTHER; note = 2'-O-Methyl-uridine
  modified_base 72: mod_base = OTHER; note = 2'-O-Methyl-uridine
  modified_base 73: mod_base = OTHER; note = 2'-O-Methyl-guanosine
  modified_base 74: mod_base = OTHER; note = 2'-O-Methyl-adenosine
  modified_base 75: mod_base = OTHER; note = 2'-O-Methyl-adenosine
  modified_base 76: mod_base = OTHER; note = 2'-O-Methyl-adenosine
  modified_base 77: mod_base = OTHER; note = 2'-O-Methyl-adenosine
  modified_base 78: mod_base = OTHER; note = 2'-O-Methyl-adenosine
  modified_base 79: mod_base = OTHER; note = 2'-O-Methyl-guanosine
  modified_base 80: mod_base = OTHER; note = 2'-O-Methyl-uridine
  modified_base 81: mod_base = OTHER; note = 2'-O-Methyl-guanosine
  modified_base 83: mod_base = OTHER; note = 2'-O-Methyl-cytidine
  modified_base 84: mod_base = OTHER; note = 2'-O-Methyl-adenosine
  modified_base 85: mod_base = OTHER; note = 2'-O-Methyl-cytidine
  modified_base 86: mod_base = OTHER; note = 2'-O-Methyl-cytidine
  modified_base 87: mod_base = OTHER; note = 2'-O-Methyl-guanosine
  modified_base 88: mod_base = OTHER; note = 2'-O-Methyl-adenosine
  modified_base 89: mod_base = OTHER; note = 2'-O-Methyl-guanosine
  modified_base 90: mod_base = OTHER; note = 2'-O-Methyl-uridine
  modified_base 91: mod_base = OTHER; note = 2'-O-Methyl-cytidine
  modified_base 92: mod_base = OTHER; note = 2'-O-Methyl-guanosine
  modified_base 93: mod_base = OTHER; note = 2'-O-Methyl-guanosine
  modified_base 94: mod_base = OTHER; note = 2'-O-Methyl-uridine
  modified_base 95: mod_base = OTHER; note = 2'-O-Methyl-guanosine
  modified_base 96: mod_base = OTHER; note = 2'-O-Methyl-cytidine
  modified_base 97: mod_base = OTHER; note = 2'-O-Methyl-uridine
  modified_base 98: mod_base = OTHER; note = 2'-O-Methyl-uridine phosphorothioate
  modified_base 99: mod_base = OTHER; note = 2'-O-Methyl-uridine phosphorothioate
  modified_base 100: mod_base = OTHER; note = 2'-O-Methyl-uridine

SEQ ID NO: 2400 - RNA, 100 nt, synthetic construct; identical to SEQ ID NO: 422
  source 1..100: mol_type = other RNA
  modified_base 1: mod_base = OTHER; note = 2'-O-Methyl-guanosine phosphorothioate
  modified_base 2: mod_base = OTHER; note = 2'-O-Methyl-adenosine phosphorothioate
  modified_base 3: mod_base = OTHER; note = 2'-O-Methyl-guanosine
  modified_base 21: mod_base = OTHER; note = 2'-O-Methyl-guanosine
  modified_base 25: mod_base = OTHER; note = uridine phosphorothioate
  modified_base 28: mod_base = OTHER; note = 2'-O-Methyl-adenosine
  modified_base 29: mod_base = OTHER; note = 2'-O-Methyl-guanosine
  modified_base 30: mod_base = OTHER; note = 2'-O-Methyl-cytidine
  modified_base 31: mod_base = OTHER; note = 2'-O-Methyl-uridine
  modified_base 32: mod_base = OTHER; note = 2'-O-Methyl-adenosine
  modified_base 34: mod_base = OTHER; note = 2'-O-Methyl-adenosine
  modified_base 35: mod_base = OTHER; note = 2'-O-Methyl-adenosine
  modified_base 36: mod_base = OTHER; note = 2'-O-Methyl-adenosine
  modified_base 37: mod_base = OTHER; note = 2'-O-Methyl-uridine
  modified_base 38: mod_base = OTHER; note = 2'-O-Methyl-adenosine
  modified_base 39: mod_base = OTHER; note = 2'-O-Methyl-guanosine
  modified_base 40: mod_base = OTHER; note = 2'-O-Methyl-cytidine
  modified_base 41: mod_base = OTHER; note = 2'-O-Methyl-adenosine
  modified_base 42: mod_base = OTHER; note = 2'-O-Methyl-adenosine
  modified_base 45: mod_base = OTHER; note = uridine phosphorothioate
  modified_base 46: mod_base = OTHER; note = 2'-O-Methyl-adenosine
  modified_base 48: mod_base = OTHER; note = 2'-O-Methyl-adenosine
  modified_base 50: mod_base = OTHER; note = 2'-O-Methyl-uridine
  modified_base 52: mod_base = OTHER; note = 2'-O-Methyl-adenosine
  modified_base 53: mod_base = OTHER; note = 2'-O-Methyl-guanosine
  modified_base 54: mod_base = OTHER; note = 2'-O-Methyl-guanosine
  modified_base 55: mod_base = OTHER; note = 2'-O-Methyl-cytidine
  modified_base 56: mod_base = OTHER; note = 2'-O-Methyl-uridine
  modified_base 57: mod_base = OTHER; note = 2'-O-Methyl-adenosine
  modified_base 60: mod_base = OTHER; note = 2'-O-Methyl-cytidine
  modified_base 61: mod_base = OTHER; note = 2'-O-Methyl-cytidine
  modified_base 64: mod_base = OTHER; note = uridine phosphorothioate
  modified_base 66: mod_base = OTHER; note = 2'-O-Methyl-uridine
  modified_base 67: mod_base = OTHER; note = 2'-O-Methyl-cytidine
  modified_base 70: mod_base = OTHER; note = 2'-O-Methyl-cytidine
  modified_base 71: mod_base = OTHER; note = 2'-O-Methyl-uridine
  modified_base 72: mod_base = OTHER; note = 2'-O-Methyl-uridine
  modified_base 74: mod_base = OTHER; note = 2'-O-Methyl-adenosine
  modified_base 75: mod_base = OTHER; note = 2'-O-Methyl-adenosine
  modified_base 76: mod_base = OTHER; note = 2'-O-Methyl-adenosine
  modified_base 77: mod_base = OTHER; note = 2'-O-Methyl-adenosine
  modified_base 78: mod_base = OTHER; note = 2'-O-Methyl-adenosine
  modified_base 79: mod_base = OTHER; note = 2'-O-Methyl-guanosine
  modified_base 80: mod_base = OTHER; note = 2'-O-Methyl-uridine
  modified_base 81: mod_base = OTHER; note = 2'-O-Methyl-guanosine
  modified_base 83: mod_base = OTHER; note = 2'-O-Methyl-cytidine
  modified_base 84: mod_base = OTHER; note = 2'-O-Methyl-adenosine
  modified_base 85: mod_base = OTHER; note = 2'-O-Methyl-cytidine
  modified_base 86: mod_base = OTHER; note = 2'-O-Methyl-cytidine
  modified_base 87: mod_base = OTHER; note = 2'-O-Methyl-guanosine
  modified_base 88: mod_base = OTHER; note = 2'-O-Methyl-adenosine
  modified_base 89: mod_base = OTHER; note = 2'-O-Methyl-guanosine
  modified_base 90: mod_base = OTHER; note = 2'-O-Methyl-uridine
  modified_base 91: mod_base = OTHER; note = 2'-O-Methyl-cytidine
  modified_base 92: mod_base = OTHER; note = 2'-O-Methyl-guanosine
  modified_base 93: mod_base = OTHER; note = 2'-O-Methyl-guanosine
  modified_base 94: mod_base = OTHER; note = 2'-O-Methyl-uridine
  modified_base 95: mod_base = OTHER; note = 2'-O-Methyl-guanosine
  modified_base 96: mod_base = OTHER; note = 2'-O-Methyl-cytidine
  modified_base 97: mod_base = OTHER; note = 2'-O-Methyl-uridine
  modified_base 98: mod_base = OTHER; note = 2'-O-Methyl-uridine phosphorothioate
  modified_base 99: mod_base = OTHER; note = 2'-O-Methyl-uridine phosphorothioate
  modified_base 100: mod_base = OTHER; note = 2'-O-Methyl-uridine

SEQ ID NO: 2401 - RNA, 100 nt, synthetic construct; identical to SEQ ID NO: 55
  source 1..100: mol_type = other RNA
  modified_base 1: mod_base = OTHER; note = 2'-O-Methyl-cytidine phosphorothioate
  modified_base 2: mod_base = OTHER; note = 2'-O-Methyl-adenosine phosphorothioate
  modified_base 3: mod_base = OTHER; note = 2'-O-Methyl-guanosine
  modified_base 21: mod_base = OTHER; note = 2'-O-Methyl-guanosine
  modified_base 25: mod_base = OTHER; note = uridine phosphorothioate
  modified_base 28: mod_base = OTHER; note = 2'-O-Methyl-adenosine
  modified_base 29: mod_base = OTHER; note = 2'-O-Methyl-guanosine
  modified_base 30: mod_base = OTHER; note = 2'-O-Methyl-cytidine
  modified_base 31: mod_base = OTHER; note = 2'-O-Methyl-uridine
  modified_base 32: mod_base = OTHER; note = 2'-O-Methyl-adenosine
  modified_base 33: mod_base = OTHER; note = 2'-O-Methyl-guanosine
  modified_base 34: mod_base = OTHER; note = 2'-O-Methyl-adenosine
  modified_base 35: mod_base = OTHER; note = 2'-O-Methyl-adenosine
  modified_base 36: mod_base = OTHER; note = 2'-O-Methyl-adenosine
  modified_base 37: mod_base = OTHER; note = 2'-O-Methyl-uridine
  modified_base 38: mod_base = OTHER; note = 2'-O-Methyl-adenosine
  modified_base 39: mod_base = OTHER; note = 2'-O-Methyl-guanosine
  modified_base 40: mod_base = OTHER; note = 2'-O-Methyl-cytidine
  modified_base 41: mod_base = OTHER; note = 2'-O-Methyl-adenosine
  modified_base 42: mod_base = OTHER; note = 2'-O-Methyl-adenosine
  modified_base 45: mod_base = OTHER; note = uridine phosphorothioate
  modified_base 46: mod_base = OTHER; note = 2'-O-Methyl-adenosine
  modified_base 48: mod_base = OTHER; note = 2'-O-Methyl-adenosine
  modified_base 50: mod_base = OTHER; note = 2'-O-Methyl-uridine
  modified_base 52: mod_base = OTHER; note = 2'-O-Methyl-adenosine
  modified_base 53: mod_base = OTHER; note = 2'-O-Methyl-guanosine
  modified_base 54: mod_base = OTHER; note = 2'-O-Methyl-guanosine
  modified_base 57: mod_base = OTHER; note = 2'-O-Methyl-adenosine
  modified_base 61: mod_base = OTHER; note = 2'-O-Methyl-cytidine
  modified_base 64: mod_base = OTHER; note = uridine phosphorothioate
  modified_base 66: mod_base = OTHER; note = 2'-O-Methyl-uridine
  modified_base 67: mod_base = OTHER; note = 2'-O-Methyl-cytidine
  modified_base 70: mod_base = OTHER; note = 2'-O-Methyl-cytidine
  modified_base 71: mod_base = OTHER; note = 2'-O-Methyl-uridine
  modified_base 72: mod_base = OTHER; note = 2'-O-Methyl-uridine
  modified_base 74: mod_base = OTHER; note = 2'-O-Methyl-adenosine
  modified_base 75: mod_base = OTHER; note = 2'-O-Methyl-adenosine
  modified_base 76: mod_base = OTHER; note = 2'-O-Methyl-adenosine
  modified_base 77: mod_base = OTHER; note = 2'-O-Methyl-adenosine
  modified_base 78: mod_base = OTHER; note = 2'-O-Methyl-adenosine
  modified_base 79: mod_base = OTHER; note = 2'-O-Methyl-guanosine
  modified_base 80: mod_base = OTHER; note = 2'-O-Methyl-uridine
  modified_base 82: mod_base = OTHER; note = 2'-O-Methyl-guanosine
  modified_base 83: mod_base = OTHER; note = 2'-O-Methyl-cytidine
  modified_base 84: mod_base = OTHER; note = 2'-O-Methyl-adenosine
  modified_base 85: mod_base = OTHER; note = 2'-O-Methyl-cytidine
  modified_base 86: mod_base = OTHER; note = 2'-O-Methyl-cytidine
  modified_base 87: mod_base = OTHER; note = 2'-O-Methyl-guanosine
  modified_base 89: mod_base = OTHER; note = 2'-O-Methyl-guanosine
  modified_base 92: mod_base = OTHER; note = 2'-O-Methyl-guanosine
  modified_base 93: mod_base = OTHER; note = 2'-O-Methyl-guanosine
  modified_base 94: mod_base = OTHER; note = 2'-O-Methyl-uridine
  modified_base 95: mod_base = OTHER; note = 2'-O-Methyl-guanosine
  modified_base 96: mod_base = OTHER; note = 2'-O-Methyl-cytidine
  modified_base 97: mod_base = OTHER; note = 2'-O-Methyl-uridine
  modified_base 98: mod_base = OTHER; note = 2'-O-Methyl-uridine phosphorothioate
  modified_base 99: mod_base = OTHER; note = 2'-O-Methyl-uridine phosphorothioate
  modified_base 100: mod_base = OTHER; note = 2'-O-Methyl-uridine

SEQ ID NO: 2402 - RNA, 100 nt, synthetic construct; identical to SEQ ID NO: 55
  source 1..100: mol_type = other RNA
  modified_base 1: mod_base = OTHER; note = 2'-O-Methyl-cytidine phosphorothioate
  modified_base 2: mod_base = OTHER; note = 2'-O-Methyl-adenosine phosphorothioate
  modified_base 3: mod_base = OTHER; note = 2'-O-Methyl-guanosine
  modified_base 21: mod_base = OTHER; note = 2'-O-Methyl-guanosine
  modified_base 25: mod_base = OTHER; note = uridine phosphorothioate
  modified_base 28: mod_base = OTHER; note = 2'-O-Methyl-adenosine
  modified_base 29: mod_base = OTHER; note = 2'-O-Methyl-guanosine
  modified_base 30: mod_base = OTHER; note = 2'-O-Methyl-cytidine
  modified_base 31: mod_base = OTHER; note = 2'-O-Methyl-uridine
  modified_base 32: mod_base = OTHER; note = 2'-O-Methyl-adenosine
  modified_base 33: mod_base = OTHER; note = 2'-O-Methyl-guanosine
  modified_base 34: mod_base = OTHER; note = 2'-O-Methyl-adenosine
  modified_base 35: mod_base = OTHER; note = 2'-O-Methyl-adenosine
  modified_base 36: mod_base = OTHER; note = 2'-O-Methyl-adenosine
  modified_base 37: mod_base = OTHER; note = 2'-O-Methyl-uridine
  modified_base 38: mod_base = OTHER; note = 2'-O-Methyl-adenosine
  modified_base 39: mod_base = OTHER; note = 2'-O-Methyl-guanosine
  modified_base 40: mod_base = OTHER; note = 2'-O-Methyl-cytidine
  modified_base 41: mod_base = OTHER; note = 2'-O-Methyl-adenosine
  modified_base 42: mod_base = OTHER; note = 2'-O-Methyl-adenosine
  modified_base 45: mod_base = OTHER; note = uridine phosphorothioate
  modified_base 46: mod_base = OTHER; note = 2'-O-Methyl-adenosine
  modified_base 48: mod_base = OTHER; note = 2'-O-Methyl-adenosine
  modified_base 50: mod_base = OTHER; note = 2'-O-Methyl-uridine
  modified_base 52: mod_base = OTHER; note = 2'-O-Methyl-adenosine
  modified_base 53: mod_base = OTHER; note = 2'-O-Methyl-guanosine
  modified_base 54: mod_base = OTHER; note = 2'-O-Methyl-guanosine
  modified_base 55: mod_base = OTHER; note = 2'-O-Methyl-cytidine
  modified_base 56: mod_base = OTHER; note = 2'-O-Methyl-uridine
  modified_base 57: mod_base = OTHER; note = 2'-O-Methyl-adenosine
  modified_base 60: mod_base = OTHER; note = 2'-O-Methyl-cytidine
  modified_base 61: mod_base = OTHER; note = 2'-O-Methyl-cytidine
  modified_base 64: mod_base = OTHER; note = uridine phosphorothioate
  modified_base 66: mod_base = OTHER; note = 2'-O-Methyl-uridine
  modified_base 67: mod_base = OTHER; note = 2'-O-Methyl-cytidine
  modified_base 70: mod_base = OTHER; note = 2'-O-Methyl-cytidine
  modified_base 71: mod_base = OTHER; note = 2'-O-Methyl-uridine
  modified_base 72: mod_base = OTHER; note = 2'-O-Methyl-uridine
  modified_base 74: mod_base = OTHER; note = 2'-O-Methyl-adenosine
  modified_base 75: mod_base = OTHER; note = 2'-O-Methyl-adenosine
  modified_base 76: mod_base = OTHER; note = 2'-O-Methyl-adenosine
  modified_base 77: mod_base = OTHER; note = 2'-O-Methyl-adenosine
  modified_base 78: mod_base = OTHER; note = 2'-O-Methyl-adenosine
  modified_base 79: mod_base = OTHER; note = 2'-O-Methyl-guanosine
  modified_base 80: mod_base = OTHER; note = 2'-O-Methyl-uridine
  modified_base 82: mod_base = OTHER; note = 2'-O-Methyl-guanosine
  modified_base 83: mod_base = OTHER; note = 2'-O-Methyl-cytidine
  modified_base 84: mod_base = OTHER; note = 2'-O-Methyl-adenosine
  modified_base 85: mod_base = OTHER; note = 2'-O-Methyl-cytidine
  modified_base 86: mod_base = OTHER; note = 2'-O-Methyl-cytidine
  modified_base 87: mod_base = OTHER; note = 2'-O-Methyl-guanosine
  modified_base 89: mod_base = OTHER; note = 2'-O-Methyl-guanosine
  modified_base 92: mod_base = OTHER; note = 2'-O-Methyl-guanosine
  modified_base 93: mod_base = OTHER; note = 2'-O-Methyl-guanosine
  modified_base 94: mod_base = OTHER; note = 2'-O-Methyl-uridine
  modified_base 95: mod_base = OTHER; note = 2'-O-Methyl-guanosine
  modified_base 96: mod_base = OTHER; note = 2'-O-Methyl-cytidine
  modified_base 97: mod_base = OTHER; note = 2'-O-Methyl-uridine
  modified_base 98: mod_base = OTHER; note = 2'-O-Methyl-uridine phosphorothioate
  modified_base 99: mod_base = OTHER; note = 2'-O-Methyl-uridine phosphorothioate
  modified_base 100: mod_base = OTHER; note = 2'-O-Methyl-uridine

SEQ ID NO: 2403 - RNA, 100 nt, synthetic construct; identical to SEQ ID NO: 55
  source 1..100: mol_type = other RNA
  modified_base 1: mod_base = OTHER; note = 2'-O-Methyl-cytidine phosphorothioate
  modified_base 2: mod_base = OTHER; note = 2'-O-Methyl-adenosine phosphorothioate
  modified_base 3: mod_base = OTHER; note = 2'-O-Methyl-guanosine
  modified_base 21: mod_base = OTHER; note = 2'-O-Methyl-guanosine
  modified_base 25: mod_base = OTHER; note = uridine phosphorothioate
  modified_base 28: mod_base = OTHER; note = 2'-O-Methyl-adenosine
  modified_base 29: mod_base = OTHER; note = 2'-O-Methyl-guanosine
  modified_base 30: mod_base = OTHER; note = 2'-O-Methyl-cytidine
  modified_base 31: mod_base = OTHER; note = 2'-O-Methyl-uridine
  modified_base 32: mod_base = OTHER; note = 2'-O-Methyl-adenosine
  modified_base 33: mod_base = OTHER; note = 2'-O-Methyl-guanosine
  modified_base 34: mod_base = OTHER; note = 2'-O-Methyl-adenosine
  modified_base 35: mod_base = OTHER; note = 2'-O-Methyl-adenosine
  modified_base 36: mod_base = OTHER; note = 2'-O-Methyl-adenosine
  modified_base 37: mod_base = OTHER; note = 2'-O-Methyl-uridine
  modified_base 38: mod_base = OTHER; note = 2'-O-Methyl-adenosine
  modified_base 39: mod_base = OTHER; note = 2'-O-Methyl-guanosine
  modified_base 40: mod_base = OTHER; note = 2'-O-Methyl-cytidine
  modified_base 41: mod_base = OTHER; note = 2'-O-Methyl-adenosine
  modified_base 42: mod_base = OTHER; note = 2'-O-Methyl-adenosine
  modified_base 45: mod_base = OTHER; note = uridine phosphorothioate
  modified_base 46: mod_base = OTHER; note = 2'-O-Methyl-adenosine
  modified_base 48: mod_base = OTHER; note = 2'-O-Methyl-adenosine
  modified_base 50: mod_base = OTHER; note = 2'-O-Methyl-uridine
  modified_base 52: mod_base = OTHER; note = 2'-O-Methyl-adenosine
  modified_base 53: mod_base = OTHER; note = 2'-O-Methyl-guanosine
  modified_base 54: mod_base = OTHER; note = 2'-O-Methyl-guanosine
  modified_base 57: mod_base = OTHER; note = 2'-O-Methyl-adenosine
  modified_base 61: mod_base = OTHER; note = 2'-O-Methyl-cytidine
  modified_base 64: mod_base = OTHER; note = uridine phosphorothioate
  modified_base 66: mod_base = OTHER; note = 2'-O-Methyl-uridine
  modified_base 67: mod_base = OTHER; note = 2'-O-Methyl-cytidine
  modified_base 70: mod_base = OTHER; note = 2'-O-Methyl-cytidine
  modified_base 71: mod_base = OTHER; note = 2'-O-Methyl-uridine
  modified_base 72: mod_base = OTHER; note = 2'-O-Methyl-uridine
  modified_base 73: mod_base = OTHER; note = 2'-O-Methyl-guanosine
  modified_base 74: mod_base = OTHER; note = 2'-O-Methyl-adenosine
  modified_base 75: mod_base = OTHER; note = 2'-O-Methyl-adenosine
  modified_base 76: mod_base = OTHER; note = 2'-O-Methyl-adenosine
  modified_base 77: mod_base = OTHER; note = 2'-O-Methyl-adenosine
  modified_base 78: mod_base = OTHER; note = 2'-O-Methyl-adenosine
  modified_base 79: mod_base = OTHER; note = 2'-O-Methyl-guanosine
  modified_base 80: mod_base = OTHER; note = 2'-O-Methyl-uridine
  modified_base 82: mod_base = OTHER; note = 2'-O-Methyl-guanosine
  modified_base 83: mod_base = OTHER; note = 2'-O-Methyl-cytidine
  modified_base 84: mod_base = OTHER; note = 2'-O-Methyl-adenosine
  modified_base 85: mod_base = OTHER; note = 2'-O-Methyl-cytidine
  modified_base 86: mod_base = OTHER; note = 2'-O-Methyl-cytidine
  modified_base 87: mod_base = OTHER; note = 2'-O-Methyl-guanosine
  modified_base 89: mod_base = OTHER; note = 2'-O-Methyl-guanosine
  modified_base 92: mod_base = OTHER; note = 2'-O-Methyl-guanosine
  modified_base 93: mod_base = OTHER; note = 2'-O-Methyl-guanosine
  modified_base 94: mod_base = OTHER; note = 2'-O-Methyl-uridine
  modified_base 95: mod_base = OTHER; note = 2'-O-Methyl-guanosine
  modified_base 96: mod_base = OTHER; note = 2'-O-Methyl-cytidine
  modified_base 97: mod_base = OTHER; note = 2'-O-Methyl-uridine
  modified_base 98: mod_base = OTHER; note = 2'-O-Methyl-uridine phosphorothioate
  modified_base 99: mod_base = OTHER; note = 2'-O-Methyl-uridine phosphorothioate
  modified_base 100: mod_base = OTHER; note = 2'-O-Methyl-uridine

SEQ ID NO: 2404 - RNA, 100 nt, synthetic construct; identical to SEQ ID NO: 55
  source 1..100: mol_type = other RNA
  modified_base 1: mod_base = OTHER; note = 2'-O-Methyl-cytidine phosphorothioate
  modified_base 2: mod_base = OTHER; note = 2'-O-Methyl-adenosine phosphorothioate
  modified_base 3: mod_base = OTHER; note = 2'-O-Methyl-guanosine
  modified_base 21: mod_base = OTHER; note = 2'-O-Methyl-guanosine
  modified_base 25: mod_base = OTHER; note = uridine phosphorothioate
  modified_base 28: mod_base = OTHER; note = 2'-O-Methyl-adenosine
  modified_base 29: mod_base = OTHER; note = 2'-O-Methyl-guanosine
  modified_base 30: mod_base = OTHER; note = 2'-O-Methyl-cytidine
  modified_base 31: mod_base = OTHER; note = 2'-O-Methyl-uridine
  modified_base 32: mod_base = OTHER; note = 2'-O-Methyl-adenosine
  modified_base 33: mod_base = OTHER; note = 2'-O-Methyl-guanosine
  modified_base 34: mod_base = OTHER; note = 2'-O-Methyl-adenosine
  modified_base 35: mod_base = OTHER; note = 2'-O-Methyl-adenosine
  modified_base 36: mod_base = OTHER; note = 2'-O-Methyl-adenosine
  modified_base 37: mod_base = OTHER; note = 2'-O-Methyl-uridine
  modified_base 38: mod_base = OTHER; note = 2'-O-Methyl-adenosine
  modified_base 39: mod_base = OTHER; note = 2'-O-Methyl-guanosine
  modified_base 40: mod_base = OTHER; note = 2'-O-Methyl-cytidine
  modified_base 41: mod_base = OTHER; note = 2'-O-Methyl-adenosine
  modified_base 42: mod_base = OTHER; note = 2'-O-Methyl-adenosine
  modified_base 45: mod_base = OTHER; note = uridine phosphorothioate
  modified_base 46: mod_base = OTHER; note = 2'-O-Methyl-adenosine
  modified_base 48: mod_base = OTHER; note = 2'-O-Methyl-adenosine
  modified_base 50: mod_base = OTHER; note = 2'-O-Methyl-uridine
  modified_base 52: mod_base = OTHER; note = 2'-O-Methyl-adenosine
  modified_base 53: mod_base = OTHER; note = 2'-O-Methyl-guanosine
  modified_base 54: mod_base = OTHER; note = 2'-O-Methyl-guanosine
  modified_base 57: mod_base = OTHER; note = 2'-O-Methyl-adenosine
  modified_base 61: mod_base = OTHER; note = 2'-O-Methyl-cytidine
  modified_base 64: mod_base = OTHER; note = uridine phosphorothioate
  modified_base 66: mod_base = OTHER; note = 2'-O-Methyl-uridine
  modified_base 67: mod_base = OTHER; note = 2'-O-Methyl-cytidine
  modified_base 70: mod_base = OTHER; note = 2'-O-Methyl-cytidine
  modified_base 71: mod_base = OTHER; note = 2'-O-Methyl-uridine
  modified_base 72: mod_base = OTHER; note = 2'-O-Methyl-uridine
  modified_base 73: mod_base = OTHER; note = 2'-O-Methyl-guanosine
  modified_base 74: mod_base = OTHER; note = 2'-O-Methyl-adenosine
  modified_base 75: mod_base = OTHER; note = 2'-O-Methyl-adenosine
  modified_base 76: mod_base = OTHER; note = 2'-O-Methyl-adenosine
  modified_base 77: mod_base = OTHER; note = 2'-O-Methyl-adenosine
  modified_base 78: mod_base = OTHER; note = 2'-O-Methyl-adenosine
  modified_base 79: mod_base = OTHER; note = 2'-O-Methyl-guanosine
  modified_base 80: mod_base = OTHER; note = 2'-O-Methyl-uridine
  modified_base 82: mod_base = OTHER; note = 2'-O-Methyl-guanosine
  modified_base 83: mod_base = OTHER; note = 2'-O-Methyl-cytidine
  modified_base 84: mod_base = OTHER; note = 2'-O-Methyl-adenosine
  modified_base 85: mod_base = OTHER; note = 2'-O-Methyl-cytidine
  modified_base 86: mod_base = OTHER; note = 2'-O-Methyl-cytidine
  modified_base 87: mod_base = OTHER; note = 2'-O-Methyl-guanosine
  modified_base 89: mod_base = OTHER; note = 2'-O-Methyl-guanosine
  modified_base 91: mod_base = OTHER; note = 2'-O-Methyl-cytidine
  modified_base 92: mod_base = OTHER; note = 2'-O-Methyl-guanosine
  modified_base 93: mod_base = OTHER; note = 2'-O-Methyl-guanosine
  modified_base 94: mod_base = OTHER; note = 2'-O-Methyl-uridine
  modified_base 95: mod_base = OTHER; note = 2'-O-Methyl-guanosine
  modified_base 96: mod_base = OTHER; note = 2'-O-Methyl-cytidine
  modified_base 97: mod_base = OTHER; note = 2'-O-Methyl-uridine
  modified_base 98: mod_base = OTHER; note = 2'-O-Methyl-uridine phosphorothioate
  modified_base 99: mod_base = OTHER; note = 2'-O-Methyl-uridine phosphorothioate
  modified_base 100: mod_base = OTHER; note = 2'-O-Methyl-uridine

SEQ ID NO: 2405 - RNA, 100 nt, synthetic construct; identical to SEQ ID NO: 55
  source 1..100: mol_type = other RNA
  modified_base 1: mod_base = OTHER; note = 2'-O-Methyl-cytidine phosphorothioate
  modified_base 2: mod_base = OTHER; note = 2'-O-Methyl-adenosine phosphorothioate
  modified_base 3: mod_base = OTHER; note = 2'-O-Methyl-guanosine
  modified_base 21: mod_base = OTHER; note = 2'-O-Methyl-guanosine
  modified_base 25: mod_base = OTHER; note = uridine phosphorothioate
  modified_base 28: mod_base = OTHER; note = 2'-O-Methyl-adenosine
  modified_base 29: mod_base = OTHER; note = 2'-O-Methyl-guanosine
  modified_base 30: mod_base = OTHER; note = 2'-O-Methyl-cytidine
  modified_base 31: mod_base = OTHER; note = 2'-O-Methyl-uridine
  modified_base 32: mod_base = OTHER; note = 2'-O-Methyl-adenosine
  modified_base 34: mod_base = OTHER; note = 2'-O-Methyl-adenosine
  modified_base 35: mod_base = OTHER; note = 2'-O-Methyl-adenosine
  modified_base 36: mod_base = OTHER; note = 2'-O-Methyl-adenosine
  modified_base 37: mod_base = OTHER; note = 2'-O-Methyl-uridine
  modified_base 38: mod_base = OTHER; note = 2'-O-Methyl-adenosine
  modified_base 39: mod_base = OTHER; note = 2'-O-Methyl-guanosine
  modified_base 40: mod_base = OTHER; note = 2'-O-Methyl-cytidine
  modified_base 41: mod_base = OTHER; note = 2'-O-Methyl-adenosine
  modified_base 42: mod_base = OTHER; note = 2'-O-Methyl-adenosine
  modified_base 45: mod_base = OTHER; note = uridine phosphorothioate
  modified_base 46: mod_base = OTHER; note = 2'-O-Methyl-adenosine
  modified_base 48: mod_base = OTHER; note = 2'-O-Methyl-adenosine
  modified_base 50: mod_base = OTHER; note = 2'-O-Methyl-uridine
  modified_base 52: mod_base = OTHER; note = 2'-O-Methyl-adenosine
  modified_base 53: mod_base = OTHER; note = 2'-O-Methyl-guanosine
  modified_base 54: mod_base = OTHER; note = 2'-O-Methyl-guanosine
  modified_base 57: mod_base = OTHER; note = 2'-O-Methyl-adenosine
  modified_base 61: mod_base = OTHER; note = 2'-O-Methyl-cytidine
  modified_base 64: mod_base = OTHER; note = uridine phosphorothioate
  modified_base 66: mod_base = OTHER; note = 2'-O-Methyl-uridine
  modified_base 67: mod_base = OTHER; note = 2'-O-Methyl-cytidine
  modified_base 70: mod_base = OTHER; note = 2'-O-Methyl-cytidine
  modified_base 71: mod_base = OTHER; note = 2'-O-Methyl-uridine
  modified_base 72: mod_base = OTHER; note = 2'-O-Methyl-uridine
  modified_base 73: mod_base = OTHER; note = 2'-O-Methyl-guanosine
  modified_base 74: mod_base = OTHER; note = 2'-O-Methyl-adenosine
  modified_base 75: mod_base = OTHER; note = 2'-O-Methyl-adenosine
  modified_base 76: mod_base = OTHER; note = 2'-O-Methyl-adenosine
  modified_base 77: mod_base = OTHER; note = 2'-O-Methyl-adenosine
  modified_base 78: mod_base = OTHER; note = 2'-O-Methyl-adenosine
  modified_base 79: mod_base = OTHER; note = 2'-O-Methyl-guanosine
  modified_base 80: mod_base = OTHER; note = 2'-O-Methyl-uridine
  modified_base 82: mod_base = OTHER; note = 2'-O-Methyl-guanosine
  modified_base 83: mod_base = OTHER; note = 2'-O-Methyl-cytidine
  modified_base 84: mod_base = OTHER; note = 2'-O-Methyl-adenosine
  modified_base 85: mod_base = OTHER; note = 2'-O-Methyl-cytidine
  modified_base 86: mod_base = OTHER; note = 2'-O-Methyl-cytidine
  modified_base 87: mod_base = OTHER; note = 2'-O-Methyl-guanosine
  modified_base 89: mod_base = OTHER; note = 2'-O-Methyl-guanosine
  modified_base 92: mod_base = OTHER; note = 2'-O-Methyl-guanosine
  modified_base 93: mod_base = OTHER; note = 2'-O-Methyl-guanosine
  modified_base 94: mod_base = OTHER; note = 2'-O-Methyl-uridine
  modified_base 95: mod_base = OTHER; note = 2'-O-Methyl-guanosine
  modified_base 96: mod_base = OTHER; note = 2'-O-Methyl-cytidine
  modified_base 97: mod_base = OTHER; note = 2'-O-Methyl-uridine
  modified_base 98: mod_base = OTHER; note = 2'-O-Methyl-uridine phosphorothioate
  modified_base 99: mod_base = OTHER; note = 2'-O-Methyl-uridine phosphorothioate
  modified_base 100: mod_base = OTHER; note = 2'-O-Methyl-uridine

SEQ ID NO: 2406 - RNA, 100 nt, synthetic construct; identical to SEQ ID NO: 55
  source 1..100: mol_type = other RNA
  modified_base 1: mod_base = OTHER; note = 2'-O-Methyl-cytidine phosphorothioate
  modified_base 2: mod_base = OTHER; note = 2'-O-Methyl-adenosine phosphorothioate
  modified_base 3: mod_base = OTHER; note = 2'-O-Methyl-guanosine
  modified_base 21: mod_base = OTHER; note = 2'-O-Methyl-guanosine
  modified_base 25: mod_base = OTHER; note = uridine phosphorothioate
  modified_base 28: mod_base = OTHER; note = 2'-O-Methyl-adenosine
  modified_base 29: mod_base = OTHER; note = 2'-O-Methyl-guanosine
  modified_base 30: mod_base = OTHER; note = 2'-O-Methyl-cytidine
  modified_base 31: mod_base = OTHER; note = 2'-O-Methyl-uridine
  modified_base 32: mod_base = OTHER; note = 2'-O-Methyl-adenosine
  modified_base 34: mod_base = OTHER; note = 2'-O-Methyl-adenosine
  modified_base 35: mod_base = OTHER; note = 2'-O-Methyl-adenosine
  modified_base 36: mod_base = OTHER; note = 2'-O-Methyl-adenosine
  modified_base 37: mod_base = OTHER; note = 2'-O-Methyl-uridine
  modified_base 38: mod_base = OTHER; note = 2'-O-Methyl-adenosine
  modified_base 39: mod_base = OTHER; note = 2'-O-Methyl-guanosine
  modified_base 40: mod_base = OTHER; note = 2'-O-Methyl-cytidine
  modified_base 41: mod_base = OTHER; note = 2'-O-Methyl-adenosine
  modified_base 42: mod_base = OTHER; note = 2'-O-Methyl-adenosine
  modified_base 45: mod_base = OTHER; note = uridine phosphorothioate
  modified_base 46: mod_base = OTHER; note = 2'-O-Methyl-adenosine
  modified_base 48: mod_base = OTHER; note = 2'-O-Methyl-adenosine
  modified_base 50: mod_base = OTHER; note = 2'-O-Methyl-uridine
  modified_base 52: mod_base = OTHER; note = 2'-O-Methyl-adenosine
  modified_base 53: mod_base = OTHER; note = 2'-O-Methyl-guanosine
  modified_base 54: mod_base = OTHER; note = 2'-O-Methyl-guanosine
  modified_base 57: mod_base = OTHER; note = 2'-O-Methyl-adenosine
  modified_base 61: mod_base = OTHER; note = 2'-O-Methyl-cytidine
  modified_base 64: mod_base = OTHER; note = uridine phosphorothioate
  modified_base 66: mod_base = OTHER; note = 2'-O-Methyl-uridine
  modified_base 67: mod_base = OTHER; note = 2'-O-Methyl-cytidine
  modified_base 70: mod_base = OTHER; note = 2'-O-Methyl-cytidine
  modified_base 71: mod_base = OTHER; note = 2'-O-Methyl-uridine
  modified_base 72: mod_base = OTHER; note = 2'-O-Methyl-uridine
  modified_base 73: mod_base = OTHER; note = 2'-O-Methyl-guanosine
  modified_base 74: mod_base = OTHER; note = 2'-O-Methyl-adenosine
  modified_base 75: mod_base = OTHER; note = 2'-O-Methyl-adenosine
  modified_base 76: mod_base = OTHER; note = 2'-O-Methyl-adenosine
  modified_base 77: mod_base = OTHER; note = 2'-O-Methyl-adenosine
  modified_base 78: mod_base = OTHER; note = 2'-O-Methyl-adenosine
  modified_base 79: mod_base = OTHER; note = 2'-O-Methyl-guanosine
  modified_base 80: mod_base = OTHER; note = 2'-O-Methyl-uridine
  modified_base 82: mod_base = OTHER; note = 2'-O-Methyl-guanosine
  modified_base 83: mod_base = OTHER; note = 2'-O-Methyl-cytidine
  modified_base 84: mod_base = OTHER; note = 2'-O-Methyl-adenosine
  modified_base 85: mod_base = OTHER; note = 2'-O-Methyl-cytidine
  modified_base 86: mod_base = OTHER; note = 2'-O-Methyl-cytidine
  modified_base 87: mod_base = OTHER; note = 2'-O-Methyl-guanosine
  modified_base 89: mod_base = OTHER; note = 2'-O-Methyl-guanosine
  modified_base 91: mod_base = OTHER; note = 2'-O-Methyl-cytidine
  modified_base 92: mod_base = OTHER; note = 2'-O-Methyl-guanosine
  modified_base 93: mod_base = OTHER; note = 2'-O-Methyl-guanosine
  modified_base 94: mod_base = OTHER; note = 2'-O-Methyl-uridine
  modified_base 95: mod_base = OTHER; note = 2'-O-Methyl-guanosine
  modified_base 96: mod_base = OTHER; note = 2'-O-Methyl-cytidine
  modified_base 97: mod_base = OTHER; note = 2'-O-Methyl-uridine
  modified_base 98: mod_base = OTHER; note = 2'-O-Methyl-uridine phosphorothioate
  modified_base 99: mod_base = OTHER; note = 2'-O-Methyl-uridine phosphorothioate
  modified_base 100: mod_base = OTHER; note = 2'-O-Methyl-uridine

SEQ ID NO: 2407 - RNA, 100 nt, synthetic construct; identical to SEQ ID NO: 55
  source 1..100: mol_type = other RNA
  modified_base 1: mod_base = OTHER; note = 2'-O-Methyl-cytidine phosphorothioate
  modified_base 2: mod_base = OTHER; note = 2'-O-Methyl-adenosine phosphorothioate
  modified_base 3: mod_base = OTHER; note = 2'-O-Methyl-guanosine
  modified_base 21: mod_base = OTHER; note = 2'-O-Methyl-guanosine
  modified_base 25: mod_base = OTHER; note = uridine phosphorothioate
  modified_base 28: mod_base = OTHER; note = 2'-O-Methyl-adenosine
  modified_base 29: mod_base = OTHER; note = 2'-O-Methyl-guanosine
  modified_base 30: mod_base = OTHER; note = 2'-O-Methyl-cytidine
  modified_base 31: mod_base = OTHER; note = 2'-O-Methyl-uridine
  modified_base 32: mod_base = OTHER; note = 2'-O-Methyl-adenosine
  modified_base 34: mod_base = OTHER; note = 2'-O-Methyl-adenosine
  modified_base 35: mod_base = OTHER; note = 2'-O-Methyl-adenosine
  modified_base 36: mod_base = OTHER; note = 2'-O-Methyl-adenosine
  modified_base 37: mod_base = OTHER; note = 2'-O-Methyl-uridine
  modified_base 38: mod_base = OTHER; note = 2'-O-Methyl-adenosine
  modified_base 39: mod_base = OTHER; note = 2'-O-Methyl-guanosine
  modified_base 40: mod_base = OTHER; note = 2'-O-Methyl-cytidine
  modified_base 41: mod_base = OTHER; note = 2'-O-Methyl-adenosine
  modified_base 42: mod_base = OTHER; note = 2'-O-Methyl-adenosine
  modified_base 45: mod_base = OTHER; note = uridine phosphorothioate
  modified_base 46: mod_base = OTHER; note = 2'-O-Methyl-adenosine
  modified_base 48: mod_base = OTHER; note = 2'-O-Methyl-adenosine
  modified_base 50: mod_base = OTHER; note = 2'-O-Methyl-uridine
  modified_base 52: mod_base = OTHER; note = 2'-O-Methyl-adenosine
  modified_base 53: mod_base = OTHER; note = 2'-O-Methyl-guanosine
  modified_base 54: mod_base = OTHER; note = 2'-O-Methyl-guanosine
  modified_base 55: mod_base = OTHER; note = 2'-O-Methyl-cytidine
  modified_base 56: mod_base = OTHER; note = 2'-O-Methyl-uridine
  modified_base 57: mod_base = OTHER; note = 2'-O-Methyl-adenosine
  modified_base 60: mod_base = OTHER; note = 2'-O-Methyl-cytidine
  modified_base 61: mod_base = OTHER; note = 2'-O-Methyl-cytidine
  modified_base 64: mod_base = OTHER; note = uridine phosphorothioate
  modified_base 66: mod_base = OTHER; note = 2'-O-Methyl-uridine
  modified_base 67: mod_base = OTHER; note = 2'-O-Methyl-cytidine
  modified_base 70: mod_base = OTHER; note = 2'-O-Methyl-cytidine
  modified_base 71: mod_base = OTHER; note = 2'-O-Methyl-uridine
  modified_base 72: mod_base = OTHER; note = 2'-O-Methyl-uridine
  modified_base 74: mod_base = OTHER; note = 2'-O-Methyl-adenosine
  modified_base 75: mod_base = OTHER; note = 2'-O-Methyl-adenosine
  modified_base 76: mod_base = OTHER; note = 2'-O-Methyl-adenosine
  modified_base 77: mod_base = OTHER; note = 2'-O-Methyl-adenosine
  modified_base 78: mod_base = OTHER; note = 2'-O-Methyl-adenosine
  modified_base 79: mod_base = OTHER; note = 2'-O-Methyl-guanosine
  modified_base 80: mod_base = OTHER; note = 2'-O-Methyl-uridine
  modified_base 82: mod_base = OTHER; note = 2'-O-Methyl-guanosine
  modified_base 83: mod_base = OTHER; note = 2'-O-Methyl-cytidine
  modified_base 84: mod_base = OTHER; note = 2'-O-Methyl-adenosine
  modified_base 85: mod_base = OTHER; note = 2'-O-Methyl-cytidine
  modified_base 86: mod_base = OTHER; note = 2'-O-Methyl-cytidine
  modified_base 87: mod_base = OTHER; note = 2'-O-Methyl-guanosine
  modified_base 89: mod_base = OTHER; note = 2'-O-Methyl-guanosine
  modified_base 92: mod_base = OTHER; note = 2'-O-Methyl-guanosine
  modified_base 93: mod_base = OTHER; note = 2'-O-Methyl-guanosine
  modified_base 94: mod_base = OTHER; note = 2'-O-Methyl-uridine
  modified_base 95: mod_base = OTHER; note = 2'-O-Methyl-guanosine
  modified_base 96: mod_base = OTHER; note = 2'-O-Methyl-cytidine
  modified_base 97: mod_base = OTHER; note = 2'-O-Methyl-uridine
  modified_base 98: mod_base = OTHER; note = 2'-O-Methyl-uridine phosphorothioate
  modified_base 99: mod_base = OTHER; note = 2'-O-Methyl-uridine phosphorothioate
  modified_base 100: mod_base = OTHER; note = 2'-O-Methyl-uridine

SEQ ID NO: 2408 - RNA, 103 nt, synthetic construct; identical to SEQ ID NO: 1643
  source 1..103: mol_type = other RNA
  modified_base 1: mod_base = OTHER; note = 2'-O-Methyl-cytidine phosphorothioate
  modified_base 2: mod_base = OTHER; note = 2'-O-Methyl-cytidine phosphorothioate
  modified_base 3: mod_base = OTHER; note = 2'-O-Methyl-cytidine phosphorothioate
  modified_base 21: mod_base = OTHER; note = 2'-O-Methyl-guanosine
  modified_base 28: mod_base = OTHER; note = 2'-O-Methyl-adenosine
  modified_base 29: mod_base = OTHER; note = 2'-O-Methyl-guanosine
  modified_base 30: mod_base = OTHER; note = 2'-O-Methyl-cytidine
  modified_base 31: mod_base = OTHER; note = 2'-O-Methyl-uridine
  modified_base 32: mod_base = OTHER; note = 2'-O-Methyl-adenosine
  modified_base 34: mod_base = OTHER; note = 2'-O-Methyl-adenosine
  modified_base 35: mod_base = OTHER; note = 2'-O-Methyl-adenosine
  modified_base 36: mod_base = OTHER; note = 2'-O-Methyl-adenosine
  modified_base 37: mod_base = OTHER; note = 2'-O-Methyl-uridine
  modified_base 38: mod_base = OTHER; note = 2'-O-Methyl-adenosine
  modified_base 39: mod_base = OTHER; note = 2'-O-Methyl-guanosine
  modified_base 40: mod_base = OTHER; note = 2'-O-Methyl-cytidine
  modified_base 41: mod_base = OTHER; note = 2'-O-Methyl-adenosine
  modified_base 42: mod_base = OTHER; note = 2'-O-Methyl-adenosine
  modified_base 46: mod_base = OTHER; note = 2'-O-Methyl-adenosine
  modified_base 48: mod_base = OTHER; note = 2'-O-Methyl-adenosine
  modified_base 50: mod_base = OTHER; note = 2'-O-Methyl-uridine
  modified_base 52: mod_base = OTHER; note = 2'-O-Methyl-adenosine
  modified_base 53: mod_base = OTHER; note = 2'-O-Methyl-guanosine
  modified_base 54: mod_base = OTHER; note = 2'-O-Methyl-guanosine
  modified_base 57: mod_base = OTHER; note = 2'-O-Methyl-adenosine
  modified_base 61: mod_base = OTHER; note = 2'-O-Methyl-cytidine
  modified_base 66: mod_base = OTHER; note = 2'-O-Methyl-uridine
  modified_base 67: mod_base = OTHER; note = 2'-O-Methyl-cytidine
  modified_base 70: mod_base = OTHER; note = 2'-O-Methyl-cytidine
  modified_base 71: mod_base = OTHER; note = 2'-O-Methyl-uridine
  modified_base 72: mod_base = OTHER; note = 2'-O-Methyl-uridine
  modified_base 74: mod_base = OTHER; note = 2'-O-Methyl-adenosine
  modified_base 75: mod_base = OTHER; note = 2'-O-Methyl-adenosine
  modified_base 76: mod_base = OTHER; note = 2'-O-Methyl-adenosine
  modified_base 77: mod_base = OTHER; note = 2'-O-Methyl-adenosine
  modified_base 78: mod_base = OTHER; note = 2'-O-Methyl-adenosine
  modified_base 79: mod_base = OTHER; note = 2'-O-Methyl-guanosine
  modified_base 80: mod_base = OTHER; note = 2'-O-Methyl-uridine
  modified_base 82: mod_base = OTHER; note = 2'-O-Methyl-guanosine
  modified_base 83: mod_base = OTHER; note = 2'-O-Methyl-cytidine
  modified_base 84: mod_base = OTHER; note = 2'-O-Methyl-adenosine
  modified_base 85: mod_base = OTHER; note = 2'-O-Methyl-cytidine
  modified_base 86: mod_base = OTHER; note = 2'-O-Methyl-cytidine
  modified_base 87: mod_base = OTHER; note = 2'-O-Methyl-guanosine
  modified_base 89: mod_base = OTHER; note = 2'-O-Methyl-guanosine
  modified_base 92: mod_base = OTHER; note = 2'-O-Methyl-guanosine
  modified_base 93: mod_base = OTHER; note = 2'-O-Methyl-guanosine
  modified_base 94: mod_base = OTHER; note = 2'-O-Methyl-uridine
  modified_base 95: mod_base = OTHER; note = 2'-O-Methyl-guanosine
  modified_base 96: mod_base = OTHER; note = 2'-O-Methyl-cytidine
  modified_base 97: mod_base = OTHER; note = 2'-O-Methyl-uridine phosphorothioate
  modified_base 98: mod_base = OTHER; note = 2'-O-Methyl-uridine phosphorothioate
  modified_base 99: mod_base = OTHER; note = 2'-O-Methyl-uridine phosphorothioate
  modified_base 100: mod_base = OTHER; note = 2'-O-Methyl-uridine

SEQ ID NO: 2409 - RNA, 103 nt, synthetic construct; identical to SEQ ID NO: 1643
  source 1..103: mol_type = other RNA
  modified_base 1: mod_base = OTHER; note = 2'-O-Methyl-cytidine phosphorothioate
  modified_base 2: mod_base = OTHER; note = 2'-O-Methyl-cytidine phosphorothioate
  modified_base 3: mod_base = OTHER; note = 2'-O-Methyl-cytidine phosphorothioate
  modified_base 21: mod_base = OTHER; note = 2'-O-Methyl-guanosine
  modified_base 28: mod_base = OTHER; note = 2'-O-Methyl-adenosine
  modified_base 29: mod_base = OTHER; note = 2'-O-Methyl-guanosine
  modified_base 30: mod_base = OTHER; note = 2'-O-Methyl-cytidine
  modified_base 31: mod_base = OTHER; note = 2'-O-Methyl-uridine
  modified_base 32: mod_base = OTHER; note = 2'-O-Methyl-adenosine
  modified_base 33: mod_base = OTHER; note = 2'-O-Methyl-guanosine
  modified_base 34: mod_base = OTHER; note = 2'-O-Methyl-adenosine
  modified_base 35: mod_base = OTHER; note = 2'-O-Methyl-adenosine
  modified_base 36: mod_base = OTHER; note = 2'-O-Methyl-adenosine
  modified_base 37: mod_base = OTHER; note = 2'-O-Methyl-uridine
  modified_base 38: mod_base = OTHER; note = 2'-O-Methyl-adenosine
  modified_base 39: mod_base = OTHER; note = 2'-O-Methyl-guanosine
  modified_base 40: mod_base = OTHER; note = 2'-O-Methyl-cytidine
  modified_base 41: mod_base = OTHER; note = 2'-O-Methyl-adenosine
  modified_base 42: mod_base = OTHER; note = 2'-O-Methyl-adenosine
  modified_base 46: mod_base = OTHER; note = 2'-O-Methyl-adenosine
  modified_base 48: mod_base = OTHER; note = 2'-O-Methyl-adenosine
  modified_base 50: mod_base = OTHER; note = 2'-O-Methyl-uridine
  modified_base 52: mod_base = OTHER; note = 2'-O-Methyl-adenosine
  modified_base 53: mod_base = OTHER; note = 2'-O-Methyl-guanosine
  modified_base 54: mod_base = OTHER; note = 2'-O-Methyl-guanosine
  modified_base 55: mod_base = OTHER; note = 2'-O-Methyl-cytidine
  modified_base 56: mod_base = OTHER; note = 2'-O-Methyl-uridine
  modified_base 57: mod_base = OTHER; note = 2'-O-Methyl-adenosine
  modified_base 60: mod_base = OTHER; note = 2'-O-Methyl-cytidine
  modified_base 61: mod_base = OTHER; note = 2'-O-Methyl-cytidine
  modified_base 66: mod_base = OTHER; note = 2'-O-Methyl-uridine
  modified_base 67: mod_base = OTHER; note = 2'-O-Methyl-cytidine
  modified_base 70: mod_base = OTHER; note = 2'-O-Methyl-cytidine
  modified_base 71: mod_base = OTHER; note = 2'-O-Methyl-uridine
  modified_base 72: mod_base = OTHER; note = 2'-O-Methyl-uridine
  modified_base 73: mod_base = OTHER; note = 2'-O-Methyl-guanosine
  modified_base 74: mod_base = OTHER; note = 2'-O-Methyl-adenosine
  modified_base 75: mod_base = OTHER; note = 2'-O-Methyl-adenosine
  modified_base 76: mod_base = OTHER; note = 2'-O-Methyl-adenosine
  modified_base 77: mod_base = OTHER; note = 2'-O-Methyl-adenosine
  modified_base 78: mod_base = OTHER; note = 2'-O-Methyl-adenosine
  modified_base 79: mod_base = OTHER; note = 2'-O-Methyl-guanosine
  modified_base 80: mod_base = OTHER; note = 2'-O-Methyl-uridine
  modified_base 81: mod_base = OTHER; note = 2'-O-Methyl-guanosine
  modified_base 83: mod_base = OTHER; note = 2'-O-Methyl-cytidine
  modified_base 84: mod_base = OTHER; note = 2'-O-Methyl-adenosine
  modified_base 85: mod_base = OTHER; note = 2'-O-Methyl-cytidine
  modified_base 86: mod_base = OTHER; note = 2'-O-Methyl-cytidine
  modified_base 87: mod_base = OTHER; note = 2'-O-Methyl-guanosine
  modified_base 88: mod_base = OTHER; note = 2'-O-Methyl-adenosine
  modified_base 89: mod_base = OTHER; note = 2'-O-Methyl-guanosine
  modified_base 90: mod_base = OTHER; note = 2'-O-Methyl-uridine
  modified_base 91: mod_base = OTHER; note = 2'-O-Methyl-cytidine
  modified_base 92: mod_base = OTHER; note = 2'-O-Methyl-guanosine
  modified_base 93: mod_base = OTHER; note = 2'-O-Methyl-guanosine
  modified_base 94: mod_base = OTHER; note = 2'-O-Methyl-uridine
  modified_base 95: mod_base = OTHER; note = 2'-O-Methyl-guanosine
  modified_base 96: mod_base = OTHER; note = 2'-O-Methyl-cytidine
  modified_base 97: mod_base = OTHER; note = 2'-O-Methyl-uridine phosphorothioate
  modified_base 98: mod_base = OTHER; note = 2'-O-Methyl-uridine phosphorothioate
  modified_base 99: mod_base = OTHER; note = 2'-O-Methyl-uridine phosphorothioate
  modified_base 100: mod_base = OTHER; note = 2'-O-Methyl-uridine

SEQ ID NO: 2410 - RNA, 103 nt, synthetic construct; identical to SEQ ID NO: 1643
  source 1..103: mol_type = other RNA
  modified_base 1: mod_base = OTHER; note = 2'-O-Methyl-cytidine phosphorothioate
  modified_base 2: mod_base = OTHER; note = 2'-O-Methyl-cytidine phosphorothioate
  modified_base 3: mod_base = OTHER; note = 2'-O-Methyl-cytidine phosphorothioate
  modified_base 21: mod_base = OTHER; note = 2'-O-Methyl-guanosine
  modified_base 28: mod_base = OTHER; note = 2'-O-Methyl-adenosine
  modified_base 29: mod_base = OTHER; note = 2'-O-Methyl-guanosine
  modified_base 30: mod_base = OTHER; note = 2'-O-Methyl-cytidine
  modified_base 31: mod_base = OTHER; note = 2'-O-Methyl-uridine
  modified_base 32: mod_base = OTHER; note = 2'-O-Methyl-adenosine
  modified_base 34: mod_base = OTHER; note = 2'-O-Methyl-adenosine
  modified_base 35: mod_base = OTHER; note = 2'-O-Methyl-adenosine
  modified_base 36: mod_base = OTHER; note = 2'-O-Methyl-adenosine
  modified_base 37: mod_base = OTHER; note = 2'-O-Methyl-uridine
  modified_base 38: mod_base = OTHER; note = 2'-O-Methyl-adenosine
  modified_base 39: mod_base = OTHER; note = 2'-O-Methyl-guanosine
  modified_base 40: mod_base = OTHER; note = 2'-O-Methyl-cytidine
  modified_base 41: mod_base = OTHER; note = 2'-O-Methyl-adenosine
  modified_base 42: mod_base = OTHER; note = 2'-O-Methyl-adenosine
  modified_base 46: mod_base = OTHER; note = 2'-O-Methyl-adenosine
  modified_base 48: mod_base = OTHER; note = 2'-O-Methyl-adenosine
  modified_base 50: mod_base = OTHER; note = 2'-O-Methyl-uridine
  modified_base 52: mod_base = OTHER; note = 2'-O-Methyl-adenosine
  modified_base 53: mod_base = OTHER; note = 2'-O-Methyl-guanosine
  modified_base 54: mod_base = OTHER; note = 2'-O-Methyl-guanosine
  modified_base 55: mod_base = OTHER; note = 2'-O-Methyl-cytidine
  modified_base 56: mod_base = OTHER; note = 2'-O-Methyl-uridine
  modified_base 57: mod_base = OTHER; note = 2'-O-Methyl-adenosine
  modified_base 60: mod_base = OTHER; note = 2'-O-Methyl-cytidine
  modified_base 61: mod_base = OTHER; note = 2'-O-Methyl-cytidine
  modified_base 66: mod_base = OTHER; note = 2'-O-Methyl-uridine
  modified_base 67: mod_base = OTHER; note = 2'-O-Methyl-cytidine
  modified_base 70: mod_base = OTHER; note = 2'-O-Methyl-cytidine
  modified_base 71: mod_base = OTHER; note = 2'-O-Methyl-uridine
  modified_base 72: mod_base = OTHER; note = 2'-O-Methyl-uridine
  modified_base 74: mod_base = OTHER; note = 2'-O-Methyl-adenosine
  modified_base 75: mod_base = OTHER; note = 2'-O-Methyl-adenosine
  modified_base 76: mod_base = OTHER; note = 2'-O-Methyl-adenosine
  modified_base 77: mod_base = OTHER; note = 2'-O-Methyl-adenosine
  modified_base 78: mod_base = OTHER; note = 2'-O-Methyl-adenosine
  modified_base 79: mod_base = OTHER; note = 2'-O-Methyl-guanosine
  modified_base 80: mod_base = OTHER; note = 2'-O-Methyl-uridine
  modified_base 81: mod_base = OTHER; note = 2'-O-Methyl-guanosine
  modified_base 83: mod_base = OTHER; note = 2'-O-Methyl-cytidine
  modified_base 84: mod_base = OTHER; note = 2'-O-Methyl-adenosine
  modified_base 85: mod_base = OTHER; note = 2'-O-Methyl-cytidine
  modified_base 86: mod_base = OTHER; note = 2'-O-Methyl-cytidine
  modified_base 87: mod_base = OTHER; note = 2'-O-Methyl-guanosine
  modified_base 88: mod_base = OTHER; note = 2'-O-Methyl-adenosine
  modified_base 89: mod_base = OTHER; note = 2'-O-Methyl-guanosine
  modified_base 90: mod_base = OTHER; note = 2'-O-Methyl-uridine
  modified_base 91: mod_base = OTHER; note = 2'-O-Methyl-cytidine
  modified_base 92: mod_base = OTHER; note = 2'-O-Methyl-guanosine
  modified_base 93: mod_base = OTHER; note = 2'-O-Methyl-guanosine
  modified_base 94: mod_base = OTHER; note = 2'-O-Methyl-uridine
  modified_base 95: mod_base = OTHER; note = 2'-O-Methyl-guanosine
  modified_base 96: mod_base = OTHER; note = 2'-O-Methyl-cytidine
  modified_base 97: mod_base = OTHER; note = 2'-O-Methyl-uridine phosphorothioate
  modified_base 98: mod_base = OTHER; note = 2'-O-Methyl-uridine phosphorothioate
  modified_base 99: mod_base = OTHER; note = 2'-O-Methyl-uridine phosphorothioate
  modified_base 100: mod_base = OTHER; note = 2'-O-Methyl-uridine

SEQ ID NO: 2411 - RNA, 103 nt, synthetic construct; identical to SEQ ID NO: 1699
  source 1..103: mol_type = other RNA
  modified_base 1: mod_base = OTHER; note = 2'-O-Methyl-guanosine phosphorothioate
  modified_base 2: mod_base = OTHER; note = 2'-O-Methyl-adenosine phosphorothioate
  modified_base 3: mod_base = OTHER; note = 2'-O-Methyl-guanosine phosphorothioate
  modified_base 21: mod_base = OTHER; note = 2'-O-Methyl-guanosine
  modified_base 28: mod_base = OTHER; note = 2'-O-Methyl-adenosine
  modified_base 29: mod_base = OTHER; note = 2'-O-Methyl-guanosine
  modified_base 30: mod_base = OTHER; note = 2'-O-Methyl-cytidine
  modified_base 31: mod_base = OTHER; note = 2'-O-Methyl-uridine
  modified_base 32: mod_base = OTHER; note = 2'-O-Methyl-adenosine
  modified_base 33: mod_base = OTHER; note = 2'-O-Methyl-guanosine
  modified_base 34: mod_base = OTHER; note = 2'-O-Methyl-adenosine
  modified_base 35: mod_base = OTHER; note = 2'-O-Methyl-adenosine
  modified_base 36: mod_base = OTHER; note = 2'-O-Methyl-adenosine
  modified_base 37: mod_base = OTHER; note = 2'-O-Methyl-uridine
  modified_base 38: mod_base = OTHER; note = 2'-O-Methyl-adenosine
  modified_base 39: mod_base = OTHER; note = 2'-O-Methyl-guanosine
  modified_base 40: mod_base = OTHER; note = 2'-O-Methyl-cytidine
  modified_base 41: mod_base = OTHER; note = 2'-O-Methyl-adenosine
  modified_base 42: mod_base = OTHER; note = 2'-O-Methyl-adenosine
  modified_base 46: mod_base = OTHER; note = 2'-O-Methyl-adenosine
  modified_base 48: mod_base = OTHER; note = 2'-O-Methyl-adenosine
  modified_base 50: mod_base = OTHER; note = 2'-O-Methyl-uridine
  modified_base 52: mod_base = OTHER; note = 2'-O-Methyl-adenosine
  modified_base 53: mod_base = OTHER; note = 2'-O-Methyl-guanosine
  modified_base 54: mod_base = OTHER; note = 2'-O-Methyl-guanosine
  modified_base 55: mod_base = OTHER; note = 2'-O-Methyl-cytidine
  modified_base 56: mod_base = OTHER; note = 2'-O-Methyl-uridine
  modified_base 57: mod_base = OTHER; note = 2'-O-Methyl-adenosine
  modified_base 60: mod_base = OTHER; note = 2'-O-Methyl-cytidine
  modified_base 61: mod_base = OTHER; note = 2'-O-Methyl-cytidine
  modified_base 66: mod_base = OTHER; note = 2'-O-Methyl-uridine
  modified_base 67: mod_base = OTHER; note = 2'-O-Methyl-cytidine
  modified_base 70: mod_base = OTHER; note = 2'-O-Methyl-cytidine
  modified_base 71: mod_base = OTHER; note = 2'-O-Methyl-uridine
  modified_base 72: mod_base = OTHER; note = 2'-O-Methyl-uridine
  modified_base 73: mod_base = OTHER; note = 2'-O-Methyl-guanosine
  modified_base 74: mod_base = OTHER; note = 2'-O-Methyl-adenosine
  modified_base 75: mod_base = OTHER; note = 2'-O-Methyl-adenosine
  modified_base 76: mod_base = OTHER; note = 2'-O-Methyl-adenosine
  modified_base 77: mod_base = OTHER; note = 2'-O-Methyl-adenosine
  modified_base 78: mod_base = OTHER; note = 2'-O-Methyl-adenosine
  modified_base 79: mod_base = OTHER; note = 2'-O-Methyl-guanosine
  modified_base 80: mod_base = OTHER; note = 2'-O-Methyl-uridine
  modified_base 81: mod_base = OTHER; note = 2'-O-Methyl-guanosine
  modified_base 83: mod_base = OTHER; note = 2'-O-Methyl-cytidine
  modified_base 84: mod_base = OTHER; note = 2'-O-Methyl-adenosine
  modified_base 85: mod_base = OTHER; note = 2'-O-Methyl-cytidine
  modified_base 86: mod_base = OTHER; note = 2'-O-Methyl-cytidine
  modified_base 87: mod_base = OTHER; note = 2'-O-Methyl-guanosine
  modified_base 88: mod_base = OTHER; note = 2'-O-Methyl-adenosine
  modified_base 89: mod_base = OTHER; note = 2'-O-Methyl-guanosine
  modified_base 90: mod_base = OTHER; note = 2'-O-Methyl-uridine
  modified_base 91: mod_base = OTHER; note = 2'-O-Methyl-cytidine
  modified_base 92: mod_base = OTHER; note = 2'-O-Methyl-guanosine
  modified_base 93: mod_base = OTHER; note = 2'-O-Methyl-guanosine
  modified_base 94: mod_base = OTHER; note = 2'-O-Methyl-uridine
  modified_base 95: mod_base = OTHER; note = 2'-O-Methyl-guanosine
  modified_base 96: mod_base = OTHER; note = 2'-O-Methyl-cytidine
  modified_base 97: mod_base = OTHER; note = 2'-O-Methyl-uridine phosphorothioate
  modified_base 98: mod_base = OTHER; note = 2'-O-Methyl-uridine phosphorothioate
  modified_base 99: mod_base = OTHER; note = 2'-O-Methyl-uridine phosphorothioate
  modified_base 100: mod_base = OTHER; note = 2'-O-Methyl-uridine

SEQ ID NO: 2412 - RNA, 103 nt, synthetic construct; identical to SEQ ID NO: 1699
  source 1..103: mol_type = other RNA
  modified_base 1: mod_base = OTHER; note = 2'-O-Methyl-guanosine phosphorothioate
  modified_base 2: mod_base = OTHER; note = 2'-O-Methyl-adenosine phosphorothioate
  modified_base 3: mod_base = OTHER; note = 2'-O-Methyl-guanosine phosphorothioate
  modified_base 21: mod_base = OTHER; note = 2'-O-Methyl-guanosine
  modified_base 28: mod_base = OTHER; note = 2'-O-Methyl-adenosine
  modified_base 29: mod_base = OTHER; note = 2'-O-Methyl-guanosine
  modified_base 30: mod_base = OTHER; note = 2'-O-Methyl-cytidine
  modified_base 31: mod_base = OTHER; note = 2'-O-Methyl-uridine
  modified_base 32: mod_base = OTHER; note = 2'-O-Methyl-adenosine
  modified_base 34: mod_base = OTHER; note = 2'-O-Methyl-adenosine
  modified_base 35: mod_base = OTHER; note = 2'-O-Methyl-adenosine
  modified_base 36: mod_base = OTHER; note = 2'-O-Methyl-adenosine
  modified_base 37: mod_base = OTHER; note = 2'-O-Methyl-uridine
  modified_base 38: mod_base = OTHER; note = 2'-O-Methyl-adenosine
  modified_base 39: mod_base = OTHER; note = 2'-O-Methyl-guanosine
  modified_base 40: mod_base = OTHER; note = 2'-O-Methyl-cytidine
  modified_base 41: mod_base = OTHER; note = 2'-O-Methyl-adenosine
  modified_base 42: mod_base = OTHER; note = 2'-O-Methyl-adenosine
  modified_base 46: mod_base = OTHER; note = 2'-O-Methyl-adenosine
  modified_base 48: mod_base = OTHER; note = 2'-O-Methyl-adenosine
  modified_base 50: mod_base = OTHER; note = 2'-O-Methyl-uridine
  modified_base 52: mod_base = OTHER; note = 2'-O-Methyl-adenosine
  modified_base 53: mod_base = OTHER; note = 2'-O-Methyl-guanosine
  modified_base 54: mod_base = OTHER; note = 2'-O-Methyl-guanosine
  modified_base 55: mod_base = OTHER; note = 2'-O-Methyl-cytidine
  modified_base 56: mod_base = OTHER; note = 2'-O-Methyl-uridine
  modified_base 57: mod_base = OTHER; note = 2'-O-Methyl-adenosine
  modified_base 60: mod_base = OTHER; note = 2'-O-Methyl-cytidine
  modified_base 61: mod_base = OTHER; note = 2'-O-Methyl-cytidine
  modified_base 66: mod_base = OTHER; note = 2'-O-Methyl-uridine
  modified_base 67: mod_base = OTHER; note = 2'-O-Methyl-cytidine
  modified_base 70: mod_base = OTHER; note = 2'-O-Methyl-cytidine
  modified_base 71: mod_base = OTHER; note = 2'-O-Methyl-uridine
  modified_base 72: mod_base = OTHER; note = 2'-O-Methyl-uridine
  modified_base 74: mod_base = OTHER; note = 2'-O-Methyl-adenosine
  modified_base 75: mod_base = OTHER; note = 2'-O-Methyl-adenosine
  modified_base 76: mod_base = OTHER; note = 2'-O-Methyl-adenosine
  modified_base 77: mod_base = OTHER; note = 2'-O-Methyl-adenosine
  modified_base 78: mod_base = OTHER; note = 2'-O-Methyl-adenosine
  modified_base 79: mod_base = OTHER; note = 2'-O-Methyl-guanosine
  modified_base 80: mod_base = OTHER; note = 2'-O-Methyl-uridine
  modified_base 81: mod_base = OTHER; note = 2'-O-Methyl-guanosine
  modified_base 83: mod_base = OTHER; note = 2'-O-Methyl-cytidine
  modified_base 84: mod_base = OTHER; note = 2'-O-Methyl-adenosine
  modified_base 85: mod_base = OTHER; note = 2'-O-Methyl-cytidine
  modified_base 86: mod_base = OTHER; note = 2'-O-Methyl-cytidine
  modified_base 87: mod_base = OTHER; note = 2'-O-Methyl-guanosine
  modified_base 88: mod_base = OTHER; note = 2'-O-Methyl-adenosine
  modified_base 89: mod_base = OTHER; note = 2'-O-Methyl-guanosine
  modified_base 90: mod_base = OTHER; note = 2'-O-Methyl-uridine
  modified_base 91: mod_base = OTHER; note = 2'-O-Methyl-cytidine
  modified_base 92: mod_base = OTHER; note = 2'-O-Methyl-guanosine
  modified_base 93: mod_base = OTHER; note = 2'-O-Methyl-guanosine
  modified_base 94: mod_base = OTHER; note = 2'-O-Methyl-uridine
  modified_base 95: mod_base = OTHER; note = 2'-O-Methyl-guanosine
  modified_base 96: mod_base = OTHER; note = 2'-O-Methyl-cytidine
  modified_base 97: mod_base = OTHER; note = 2'-O-Methyl-uridine phosphorothioate
  modified_base 98: mod_base = OTHER; note = 2'-O-Methyl-uridine phosphorothioate
  modified_base 99: mod_base = OTHER; note = 2'-O-Methyl-uridine phosphorothioate
  modified_base 100: mod_base = OTHER; note = 2'-O-Methyl-uridine

SEQ ID NO: 2413 - RNA, 103 nt, synthetic construct; identical to SEQ ID NO: 1700
  source 1..103: mol_type = other RNA
  modified_base 1: mod_base = OTHER; note = 2'-O-Methyl-cytidine phosphorothioate
  modified_base 2: mod_base = OTHER; note = 2'-O-Methyl-adenosine phosphorothioate
  modified_base 3: mod_base = OTHER; note = 2'-O-Methyl-guanosine phosphorothioate
  modified_base 21: mod_base = OTHER; note = 2'-O-Methyl-guanosine
  modified_base 28: mod_base = OTHER; note = 2'-O-Methyl-adenosine
  modified_base 29: mod_base = OTHER; note = 2'-O-Methyl-guanosine
  modified_base 30: mod_base = OTHER; note = 2'-O-Methyl-cytidine
  modified_base 31: mod_base = OTHER; note = 2'-O-Methyl-uridine
  modified_base 32: mod_base = OTHER; note = 2'-O-Methyl-adenosine
  modified_base 33: mod_base = OTHER; note = 2'-O-Methyl-guanosine
  modified_base 34: mod_base = OTHER; note = 2'-O-Methyl-adenosine
  modified_base 35: mod_base = OTHER; note = 2'-O-Methyl-adenosine
  modified_base 36: mod_base = OTHER; note = 2'-O-Methyl-adenosine
  modified_base 37: mod_base = OTHER; note = 2'-O-Methyl-uridine
  modified_base 38: mod_base = OTHER; note = 2'-O-Methyl-adenosine
  modified_base 39: mod_base = OTHER; note = 2'-O-Methyl-guanosine
  modified_base 40: mod_base = OTHER; note = 2'-O-Methyl-cytidine
  modified_base 41: mod_base = OTHER; note = 2'-O-Methyl-adenosine
  modified_base 42: mod_base = OTHER; note = 2'-O-Methyl-adenosine
  modified_base 46: mod_base = OTHER; note = 2'-O-Methyl-adenosine
  modified_base 48: mod_base = OTHER; note = 2'-O-Methyl-adenosine
  modified_base 50: mod_base = OTHER; note = 2'-O-Methyl-uridine
  modified_base 52: mod_base = OTHER; note = 2'-O-Methyl-adenosine
  modified_base 53: mod_base = OTHER; note = 2'-O-Methyl-guanosine
  modified_base 54: mod_base = OTHER; note = 2'-O-Methyl-guanosine
  modified_base 57: mod_base = OTHER; note = 2'-O-Methyl-adenosine
  modified_base 61: mod_base = OTHER; note = 2'-O-Methyl-cytidine
  modified_base 66: mod_base = OTHER; note = 2'-O-Methyl-uridine
  modified_base 67: mod_base = OTHER; note = 2'-O-Methyl-cytidine
  modified_base 70: mod_base = OTHER; note = 2'-O-Methyl-cytidine
  modified_base 71: mod_base = OTHER; note = 2'-O-Methyl-uridine
  modified_base 72: mod_base = OTHER; note = 2'-O-Methyl-uridine
  modified_base 74: mod_base = OTHER; note = 2'-O-Methyl-adenosine
  modified_base 75: mod_base = OTHER; note = 2'-O-Methyl-adenosine
  modified_base 76: mod_base = OTHER; note = 2'-O-Methyl-adenosine
  modified_base 77: mod_base = OTHER; note = 2'-O-Methyl-adenosine
  modified_base 78: mod_base = OTHER; note = 2'-O-Methyl-adenosine
  modified_base 79: mod_base = OTHER; note = 2'-O-Methyl-guanosine
  modified_base 80: mod_base = OTHER; note = 2'-O-Methyl-uridine
  modified_base 82: mod_base = OTHER; note = 2'-O-Methyl-guanosine
  modified_base 83: mod_base = OTHER; note = 2'-O-Methyl-cytidine
  modified_base 84: mod_base = OTHER; note = 2'-O-Methyl-adenosine
  modified_base 85: mod_base = OTHER; note = 2'-O-Methyl-cytidine
  modified_base 86: mod_base = OTHER; note = 2'-O-Methyl-cytidine
  modified_base 87: mod_base = OTHER; note = 2'-O-Methyl-guanosine
  modified_base 89: mod_base = OTHER; note = 2'-O-Methyl-guanosine
  modified_base 92: mod_base = OTHER; note = 2'-O-Methyl-guanosine
  modified_base 93: mod_base = OTHER; note = 2'-O-Methyl-guanosine
  modified_base 94: mod_base = OTHER; note = 2'-O-Methyl-uridine
  modified_base 95: mod_base = OTHER; note = 2'-O-Methyl-guanosine
  modified_base 96: mod_base = OTHER; note = 2'-O-Methyl-cytidine
  modified_base 97: mod_base = OTHER; note = 2'-O-Methyl-uridine phosphorothioate
  modified_base 98: mod_base = OTHER; note = 2'-O-Methyl-uridine phosphorothioate
  modified_base 99: mod_base = OTHER; note = 2'-O-Methyl-uridine phosphorothioate
  modified_base 100: mod_base = OTHER; note = 2'-O-Methyl-uridine

SEQ ID NO: 2414 - RNA, 103 nt, synthetic construct; identical to SEQ ID NO: 1700
  source 1..103: mol_type = other RNA
  modified_base 1: mod_base = OTHER; note = 2'-O-Methyl-cytidine phosphorothioate
  modified_base 2: mod_base = OTHER; note = 2'-O-Methyl-adenosine phosphorothioate
  modified_base 3: mod_base = OTHER; note = 2'-O-Methyl-guanosine phosphorothioate
  modified_base 21: mod_base = OTHER; note = 2'-O-Methyl-guanosine
  modified_base 28: mod_base = OTHER; note = 2'-O-Methyl-adenosine
  modified_base 29: mod_base = OTHER; note = 2'-O-Methyl-guanosine
  modified_base 30: mod_base = OTHER; note = 2'-O-Methyl-cytidine
  modified_base 31: mod_base = OTHER; note = 2'-O-Methyl-uridine
  modified_base 32: mod_base = OTHER; note = 2'-O-Methyl-adenosine
  modified_base 33: mod_base = OTHER; note = 2'-O-Methyl-guanosine
  modified_base 34: mod_base = OTHER; note = 2'-O-Methyl-adenosine
  modified_base 35: mod_base = OTHER; note = 2'-O-Methyl-adenosine
  modified_base 36: mod_base = OTHER; note = 2'-O-Methyl-adenosine
  modified_base 37: mod_base = OTHER; note = 2'-O-Methyl-uridine
  modified_base 38: mod_base = OTHER; note = 2'-O-Methyl-adenosine
  modified_base 39: mod_base = OTHER; note = 2'-O-Methyl-guanosine
  modified_base 40: mod_base = OTHER; note = 2'-O-Methyl-cytidine
  modified_base 41: mod_base = OTHER; note = 2'-O-Methyl-adenosine
  modified_base 42: mod_base = OTHER; note = 2'-O-Methyl-adenosine
  modified_base 46: mod_base = OTHER; note = 2'-O-Methyl-adenosine
  modified_base 48: mod_base = OTHER; note = 2'-O-Methyl-adenosine
  modified_base 50: mod_base = OTHER; note = 2'-O-Methyl-uridine
  modified_base 52: mod_base = OTHER; note = 2'-O-Methyl-adenosine
  modified_base 53: mod_base = OTHER; note = 2'-O-Methyl-guanosine
  modified_base 54: mod_base = OTHER; note = 2'-O-Methyl-guanosine
  modified_base 55: mod_base = OTHER; note = 2'-O-Methyl-cytidine
  modified_base 56: mod_base = OTHER; note = 2'-O-Methyl-uridine
  modified_base 57: mod_base = OTHER; note = 2'-O-Methyl-adenosine
  modified_base 60: mod_base = OTHER; note = 2'-O-Methyl-cytidine
  modified_base 61: mod_base = OTHER; note = 2'-O-Methyl-cytidine
  modified_base 66: mod_base = OTHER; note = 2'-O-Methyl-uridine
  modified_base 67: mod_base = OTHER; note = 2'-O-Methyl-cytidine
  modified_base 70: mod_base = OTHER; note = 2'-O-Methyl-cytidine
  modified_base 71: mod_base = OTHER; note = 2'-O-Methyl-uridine
  modified_base 72: mod_base = OTHER; note = 2'-O-Methyl-uridine
  modified_base 74: mod_base = OTHER; note = 2'-O-Methyl-adenosine
  modified_base 75: mod_base = OTHER; note = 2'-O-Methyl-adenosine
  modified_base 76: mod_base = OTHER; note = 2'-O-Methyl-adenosine
  modified_base 77: mod_base = OTHER; note = 2'-O-Methyl-adenosine
  modified_base 78: mod_base = OTHER; note = 2'-O-Methyl-adenosine
  modified_base 79: mod_base = OTHER; note = 2'-O-Methyl-guanosine
  modified_base 80: mod_base = OTHER; note = 2'-O-Methyl-uridine
  modified_base 82: mod_base = OTHER; note = 2'-O-Methyl-guanosine
  modified_base 83: mod_base = OTHER; note = 2'-O-Methyl-cytidine
  modified_base 84: mod_base = OTHER; note = 2'-O-Methyl-adenosine
  modified_base 85: mod_base = OTHER; note = 2'-O-Methyl-cytidine
  modified_base 86: mod_base = OTHER; note = 2'-O-Methyl-cytidine
  modified_base 87: mod_base = OTHER; note = 2'-O-Methyl-guanosine
  modified_base 89: mod_base = OTHER; note = 2'-O-Methyl-guanosine
  modified_base 92: mod_base = OTHER; note = 2'-O-Methyl-guanosine
  modified_base 93: mod_base = OTHER; note = 2'-O-Methyl-guanosine
  modified_base 94: mod_base = OTHER; note = 2'-O-Methyl-uridine
  modified_base 95: mod_base = OTHER; note = 2'-O-Methyl-guanosine
  modified_base 96: mod_base = OTHER; note = 2'-O-Methyl-cytidine
  modified_base 97: mod_base = OTHER; note = 2'-O-Methyl-uridine phosphorothioate
  modified_base 98: mod_base = OTHER; note = 2'-O-Methyl-uridine phosphorothioate
  modified_base 99: mod_base = OTHER; note = 2'-O-Methyl-uridine phosphorothioate
  modified_base 100: mod_base = OTHER; note = 2'-O-Methyl-uridine

SEQ ID NO: 2415 - RNA, 103 nt, synthetic construct; identical to SEQ ID NO: 1700
  source 1..103: mol_type = other RNA
  modified_base 1: mod_base = OTHER; note = 2'-O-Methyl-cytidine phosphorothioate
  modified_base 2: mod_base = OTHER; note = 2'-O-Methyl-adenosine phosphorothioate
  modified_base 3: mod_base = OTHER; note = 2'-O-Methyl-guanosine phosphorothioate
  modified_base 21: mod_base = OTHER; note = 2'-O-Methyl-guanosine
  modified_base 28: mod_base = OTHER; note = 2'-O-Methyl-adenosine
  modified_base 29: mod_base = OTHER; note = 2'-O-Methyl-guanosine
  modified_base 30: mod_base = OTHER; note = 2'-O-Methyl-cytidine
  modified_base 31: mod_base = OTHER; note = 2'-O-Methyl-uridine
  modified_base 32: mod_base = OTHER; note = 2'-O-Methyl-adenosine
  modified_base 33: mod_base = OTHER; note = 2'-O-Methyl-guanosine
  modified_base 34: mod_base = OTHER; note = 2'-O-Methyl-adenosine
  modified_base 35: mod_base = OTHER; note = 2'-O-Methyl-adenosine
  modified_base 36: mod_base = OTHER; note = 2'-O-Methyl-adenosine
  modified_base 37: mod_base = OTHER; note = 2'-O-Methyl-uridine
  modified_base 38: mod_base = OTHER; note = 2'-O-Methyl-adenosine
  modified_base 39: mod_base = OTHER; note = 2'-O-Methyl-guanosine
  modified_base 40: mod_base = OTHER; note = 2'-O-Methyl-cytidine
  modified_base 41: mod_base = OTHER; note = 2'-O-Methyl-adenosine
  modified_base 42: mod_base = OTHER; note = 2'-O-Methyl-adenosine
  modified_base 46: mod_base = OTHER; note = 2'-O-Methyl-adenosine
  modified_base 48: mod_base = OTHER; note = 2'-O-Methyl-adenosine
  modified_base 50: mod_base = OTHER; note = 2'-O-Methyl-uridine
  modified_base 52: mod_base = OTHER; note = 2'-O-Methyl-adenosine
  modified_base 53: mod_base = OTHER; note = 2'-O-Methyl-guanosine
  modified_base 54: mod_base = OTHER; note = 2'-O-Methyl-guanosine
  modified_base 57: mod_base = OTHER; note = 2'-O-Methyl-adenosine
  modified_base 61: mod_base = OTHER; note = 2'-O-Methyl-cytidine
  modified_base 66: mod_base = OTHER; note = 2'-O-Methyl-uridine
  modified_base 67: mod_base = OTHER; note = 2'-O-Methyl-cytidine
  modified_base 70: mod_base = OTHER; note = 2'-O-Methyl-cytidine
  modified_base 71: mod_base = OTHER; note = 2'-O-Methyl-uridine
  modified_base 72: mod_base = OTHER; note = 2'-O-Methyl-uridine
  modified_base 73: mod_base = OTHER; note = 2'-O-Methyl-guanosine
  modified_base 74: mod_base = OTHER; note = 2'-O-Methyl-adenosine
  modified_base 75: mod_base = OTHER; note = 2'-O-Methyl-adenosine
  modified_base 76: mod_base = OTHER; note = 2'-O-Methyl-adenosine
  modified_base 77: mod_base = OTHER; note = 2'-O-Methyl-adenosine
  modified_base 78: mod_base = OTHER; note = 2'-O-Methyl-adenosine
  modified_base 79: mod_base = OTHER; note = 2'-O-Methyl-guanosine
  modified_base 80: mod_base = OTHER; note = 2'-O-Methyl-uridine
  modified_base 82: mod_base = OTHER; note = 2'-O-Methyl-guanosine
  modified_base 83: mod_base = OTHER; note = 2'-O-Methyl-cytidine
  modified_base 84: mod_base = OTHER; note = 2'-O-Methyl-adenosine
  modified_base 85: mod_base = OTHER; note = 2'-O-Methyl-cytidine
  modified_base 86: mod_base = OTHER; note = 2'-O-Methyl-cytidine
  modified_base 87: mod_base = OTHER; note = 2'-O-Methyl-guanosine
  modified_base 89: mod_base = OTHER; note = 2'-O-Methyl-guanosine
  modified_base 92: mod_base = OTHER; note = 2'-O-Methyl-guanosine
  modified_base 93: mod_base = OTHER; note = 2'-O-Methyl-guanosine
  modified_base 94: mod_base = OTHER; note = 2'-O-Methyl-uridine
  modified_base 95: mod_base = OTHER; note = 2'-O-Methyl-guanosine
  modified_base 96: mod_base = OTHER; note = 2'-O-Methyl-cytidine
  modified_base 97: mod_base = OTHER; note = 2'-O-Methyl-uridine phosphorothioate
  modified_base 98: mod_base = OTHER; note = 2'-O-Methyl-uridine phosphorothioate
  modified_base 99: mod_base = OTHER; note = 2'-O-Methyl-uridine phosphorothioate
  modified_base 100: mod_base = OTHER; note = 2'-O-Methyl-uridine

SEQ ID NO: 2416 - RNA, 103 nt, synthetic construct; identical to SEQ ID NO: 1700
  source 1..103: mol_type = other RNA
  modified_base 1: mod_base = OTHER; note = 2'-O-Methyl-cytidine phosphorothioate
  modified_base 2: mod_base = OTHER; note = 2'-O-Methyl-adenosine phosphorothioate
  modified_base 3: mod_base = OTHER; note = 2'-O-Methyl-guanosine phosphorothioate
  modified_base 21: mod_base = OTHER; note = 2'-O-Methyl-guanosine
  modified_base 28: mod_base = OTHER; note = 2'-O-Methyl-adenosine
  modified_base 29: mod_base = OTHER; note = 2'-O-Methyl-guanosine
  modified_base 30: mod_base = OTHER; note = 2'-O-Methyl-cytidine
  modified_base 31: mod_base = OTHER; note = 2'-O-Methyl-uridine
  modified_base 32: mod_base = OTHER; note = 2'-O-Methyl-adenosine
  modified_base 33: mod_base = OTHER; note = 2'-O-Methyl-guanosine
  modified_base 34: mod_base = OTHER; note = 2'-O-Methyl-adenosine
  modified_base 35: mod_base = OTHER; note = 2'-O-Methyl-adenosine
  modified_base 36: mod_base = OTHER; note = 2'-O-Methyl-adenosine
  modified_base 37: mod_base = OTHER; note = 2'-O-Methyl-uridine
  modified_base 38: mod_base = OTHER; note = 2'-O-Methyl-adenosine
  modified_base 39: mod_base = OTHER; note = 2'-O-Methyl-guanosine
  modified_base 40: mod_base = OTHER; note = 2'-O-Methyl-cytidine
  modified_base 41: mod_base = OTHER; note = 2'-O-Methyl-adenosine
  modified_base 42: mod_base = OTHER; note = 2'-O-Methyl-adenosine
  modified_base 46: mod_base = OTHER; note = 2'-O-Methyl-adenosine
  modified_base 48: mod_base = OTHER; note = 2'-O-Methyl-adenosine
  modified_base 50: mod_base = OTHER; note = 2'-O-Methyl-uridine
  modified_base 52: mod_base = OTHER; note = 2'-O-Methyl-adenosine
  modified_base 53: mod_base = OTHER; note = 2'-O-Methyl-guanosine
  modified_base 54: mod_base = OTHER; note = 2'-O-Methyl-guanosine
  modified_base 57: mod_base = OTHER; note = 2'-O-Methyl-adenosine
  modified_base 61: mod_base = OTHER; note = 2'-O-Methyl-cytidine
  modified_base 66: mod_base = OTHER; note = 2'-O-Methyl-uridine
  modified_base 67: mod_base = OTHER; note = 2'-O-Methyl-cytidine
  modified_base 70: mod_base = OTHER; note = 2'-O-Methyl-cytidine
  modified_base 71: mod_base = OTHER; note = 2'-O-Methyl-uridine
  modified_base 72: mod_base = OTHER; note = 2'-O-Methyl-uridine
  modified_base 73: mod_base = OTHER; note = 2'-O-Methyl-guanosine
  modified_base 74: mod_base = OTHER; note = 2'-O-Methyl-adenosine
  modified_base 75: mod_base = OTHER; note = 2'-O-Methyl-adenosine
  modified_base 76: mod_base = OTHER; note = 2'-O-Methyl-adenosine
  modified_base 77: mod_base = OTHER; note = 2'-O-Methyl-adenosine
  modified_base 78: mod_base = OTHER; note = 2'-O-Methyl-adenosine
  modified_base 79: mod_base = OTHER; note = 2'-O-Methyl-guanosine
  modified_base 80: mod_base = OTHER; note = 2'-O-Methyl-uridine
  modified_base 82: mod_base = OTHER; note = 2'-O-Methyl-guanosine
  modified_base 83: mod_base = OTHER; note = 2'-O-Methyl-cytidine
  modified_base 84: mod_base = OTHER; note = 2'-O-Methyl-adenosine
  modified_base 85: mod_base = OTHER; note = 2'-O-Methyl-cytidine
  modified_base 86: mod_base = OTHER; note = 2'-O-Methyl-cytidine
  modified_base 87: mod_base = OTHER; note = 2'-O-Methyl-guanosine
  modified_base 89: mod_base = OTHER; note = 2'-O-Methyl-guanosine
  modified_base 91: mod_base = OTHER; note = 2'-O-Methyl-cytidine
  modified_base 92: mod_base = OTHER; note = 2'-O-Methyl-guanosine
  modified_base 93: mod_base = OTHER; note = 2'-O-Methyl-guanosine
  modified_base 94: mod_base = OTHER; note = 2'-O-Methyl-uridine
  modified_base 95: mod_base = OTHER; note = 2'-O-Methyl-guanosine
  modified_base 96: mod_base = OTHER; note = 2'-O-Methyl-cytidine
  modified_base 97: mod_base = OTHER; note = 2'-O-Methyl-uridine phosphorothioate
  modified_base 98: mod_base = OTHER; note = 2'-O-Methyl-uridine phosphorothioate
  modified_base 99: mod_base = OTHER; note = 2'-O-Methyl-uridine phosphorothioate
  modified_base 100: mod_base = OTHER; note = 2'-O-Methyl-uridine

SEQ ID NO: 2417 - RNA, 103 nt, synthetic construct; identical to SEQ ID NO: 1700
  source 1..103: mol_type = other RNA
  modified_base 1: mod_base = OTHER; note = 2'-O-Methyl-cytidine phosphorothioate
  modified_base 2: mod_base = OTHER; note = 2'-O-Methyl-adenosine phosphorothioate
  modified_base 3: mod_base = OTHER; note = 2'-O-Methyl-guanosine phosphorothioate
  modified_base 21: mod_base = OTHER; note = 2'-O-Methyl-guanosine
  modified_base 28: mod_base = OTHER; note = 2'-O-Methyl-adenosine
  modified_base 29: mod_base = OTHER; note = 2'-O-Methyl-guanosine
  modified_base 30: mod_base = OTHER; note = 2'-O-Methyl-cytidine
  modified_base 31: mod_base = OTHER; note = 2'-O-Methyl-uridine
  modified_base 32: mod_base = OTHER; note = 2'-O-Methyl-adenosine
  modified_base 34: mod_base = OTHER; note = 2'-O-Methyl-adenosine
  modified_base 35: mod_base = OTHER; note = 2'-O-Methyl-adenosine
  modified_base 36: mod_base = OTHER; note = 2'-O-Methyl-adenosine
  modified_base 37: mod_base = OTHER; note = 2'-O-Methyl-uridine
  modified_base 38: mod_base = OTHER; note = 2'-O-Methyl-adenosine
  modified_base 39: mod_base = OTHER; note = 2'-O-Methyl-guanosine
  modified_base 40: mod_base = OTHER; note = 2'-O-Methyl-cytidine
  modified_base 41: mod_base = OTHER; note = 2'-O-Methyl-adenosine
  modified_base 42: mod_base = OTHER; note = 2'-O-Methyl-adenosine
  modified_base 46: mod_base = OTHER; note = 2'-O-Methyl-adenosine
  modified_base 48: mod_base = OTHER; note = 2'-O-Methyl-adenosine
  modified_base 50: mod_base = OTHER; note = 2'-O-Methyl-uridine
  modified_base 52: mod_base = OTHER; note = 2'-O-Methyl-adenosine
  modified_base 53: mod_base = OTHER; note = 2'-O-Methyl-guanosine
  modified_base 54: mod_base = OTHER; note = 2'-O-Methyl-guanosine
  modified_base 57: mod_base = OTHER; note = 2'-O-Methyl-adenosine
  modified_base 61: mod_base = OTHER; note = 2'-O-Methyl-cytidine
  modified_base 66: mod_base = OTHER; note = 2'-O-Methyl-uridine
  modified_base 67: mod_base = OTHER; note = 2'-O-Methyl-cytidine
  modified_base 70: mod_base = OTHER; note = 2'-O-Methyl-cytidine
  modified_base 71: mod_base = OTHER; note = 2'-O-Methyl-uridine
  modified_base 72: mod_base = OTHER; note = 2'-O-Methyl-uridine
  modified_base 73: mod_base = OTHER; note = 2'-O-Methyl-guanosine
  modified_base 74: mod_base = OTHER; note = 2'-O-Methyl-adenosine
  modified_base 75: mod_base = OTHER; note = 2'-O-Methyl-adenosine
  modified_base 76: mod_base = OTHER; note = 2'-O-Methyl-adenosine
  modified_base 77: mod_base = OTHER; note = 2'-O-Methyl-adenosine
  modified_base 78: mod_base = OTHER; note = 2'-O-Methyl-adenosine
  modified_base 79: mod_base = OTHER; note = 2'-O-Methyl-guanosine
  modified_base 80: mod_base = OTHER; note = 2'-O-Methyl-uridine
  modified_base 82: mod_base = OTHER; note = 2'-O-Methyl-guanosine
  modified_base 83: mod_base = OTHER; note = 2'-O-Methyl-cytidine
  modified_base 84: mod_base = OTHER; note = 2'-O-Methyl-adenosine
  modified_base 85: mod_base = OTHER; note = 2'-O-Methyl-cytidine
  modified_base 86: mod_base = OTHER; note = 2'-O-Methyl-cytidine
  modified_base 87: mod_base = OTHER; note = 2'-O-Methyl-guanosine
  modified_base 89: mod_base = OTHER; note = 2'-O-Methyl-guanosine
  modified_base 92: mod_base = OTHER; note = 2'-O-Methyl-guanosine
  modified_base 93: mod_base = OTHER; note = 2'-O-Methyl-guanosine
  modified_base 94: mod_base = OTHER; note = 2'-O-Methyl-uridine
  modified_base 95: mod_base = OTHER; note = 2'-O-Methyl-guanosine
  modified_base 96: mod_base = OTHER; note = 2'-O-Methyl-cytidine
  modified_base 97: mod_base = OTHER; note = 2'-O-Methyl-uridine phosphorothioate
  modified_base 98: mod_base = OTHER; note = 2'-O-Methyl-uridine phosphorothioate
  modified_base 99: mod_base = OTHER; note = 2'-O-Methyl-uridine phosphorothioate
  modified_base 100: mod_base = OTHER; note = 2'-O-Methyl-uridine

SEQ ID NO: 2418 - RNA, 103 nt, synthetic construct; identical to SEQ ID NO: 1700
  source 1..103: mol_type = other RNA
  modified_base 1: mod_base = OTHER; note = 2'-O-Methyl-cytidine phosphorothioate
  modified_base 2: mod_base = OTHER; note = 2'-O-Methyl-adenosine phosphorothioate
  modified_base 3: mod_base = OTHER; note = 2'-O-Methyl-guanosine phosphorothioate
  modified_base 21: mod_base = OTHER; note = 2'-O-Methyl-guanosine
  modified_base 28: mod_base = OTHER; note = 2'-O-Methyl-adenosine
  modified_base 29: mod_base = OTHER; note = 2'-O-Methyl-guanosine
  modified_base 30: mod_base = OTHER; note = 2'-O-Methyl-cytidine
  modified_base 31: mod_base = OTHER; note = 2'-O-Methyl-uridine
  modified_base 32: mod_base = OTHER; note = 2'-O-Methyl-adenosine
  modified_base 34: mod_base = OTHER; note = 2'-O-Methyl-adenosine
  modified_base 35: mod_base = OTHER; note = 2'-O-Methyl-adenosine
  modified_base 36: mod_base = OTHER; note = 2'-O-Methyl-adenosine
  modified_base 37: mod_base = OTHER; note = 2'-O-Methyl-uridine
  modified_base 38: mod_base = OTHER; note = 2'-O-Methyl-adenosine
  modified_base 39: mod_base = OTHER; note = 2'-O-Methyl-guanosine
  modified_base 40: mod_base = OTHER; note = 2'-O-Methyl-cytidine
  modified_base 41: mod_base = OTHER; note = 2'-O-Methyl-adenosine
  modified_base 42: mod_base = OTHER; note = 2'-O-Methyl-adenosine
  modified_base 46: mod_base = OTHER; note = 2'-O-Methyl-adenosine
  modified_base 48: mod_base = OTHER; note = 2'-O-Methyl-adenosine
  modified_base 50: mod_base = OTHER; note = 2'-O-Methyl-uridine
  modified_base 52: mod_base = OTHER; note = 2'-O-Methyl-adenosine
  modified_base 53: mod_base = OTHER; note = 2'-O-Methyl-guanosine
  modified_base 54: mod_base = OTHER; note = 2'-O-Methyl-guanosine
  modified_base 57: mod_base = OTHER; note = 2'-O-Methyl-adenosine
  modified_base 61: mod_base = OTHER; note = 2'-O-Methyl-cytidine
  modified_base 66: mod_base = OTHER; note = 2'-O-Methyl-uridine
  modified_base 67: mod_base = OTHER; note = 2'-O-Methyl-cytidine
  modified_base 70: mod_base = OTHER; note = 2'-O-Methyl-cytidine
  modified_base 71: mod_base = OTHER; note = 2'-O-Methyl-uridine
  modified_base 72: mod_base = OTHER; note = 2'-O-Methyl-uridine
  modified_base 73: mod_base = OTHER; note = 2'-O-Methyl-guanosine
  modified_base 74: mod_base = OTHER; note = 2'-O-Methyl-adenosine
  modified_base 75: mod_base = OTHER; note = 2'-O-Methyl-adenosine
  modified_base 76: mod_base = OTHER; note = 2'-O-Methyl-adenosine
  modified_base 77: mod_base = OTHER; note = 2'-O-Methyl-adenosine
  modified_base 78: mod_base = OTHER; note = 2'-O-Methyl-adenosine
  modified_base 79: mod_base = OTHER; note = 2'-O-Methyl-guanosine
  modified_base 80: mod_base = OTHER; note = 2'-O-Methyl-uridine
  modified_base 82: mod_base = OTHER; note = 2'-O-Methyl-guanosine
  modified_base 83: mod_base = OTHER; note = 2'-O-Methyl-cytidine
  modified_base 84: mod_base = OTHER; note = 2'-O-Methyl-adenosine
  modified_base 85: mod_base = OTHER; note = 2'-O-Methyl-cytidine
  modified_base 86: mod_base = OTHER; note = 2'-O-Methyl-cytidine
  modified_base 87: mod_base = OTHER; note = 2'-O-Methyl-guanosine
  modified_base 89: mod_base = OTHER; note = 2'-O-Methyl-guanosine
  modified_base 91: mod_base = OTHER; note = 2'-O-Methyl-cytidine
  modified_base 92: mod_base = OTHER; note = 2'-O-Methyl-guanosine
  modified_base 93: mod_base = OTHER; note = 2'-O-Methyl-guanosine
  modified_base 94: mod_base = OTHER; note = 2'-O-Methyl-uridine
  modified_base 95: mod_base = OTHER; note = 2'-O-Methyl-guanosine
  modified_base 96: mod_base = OTHER; note = 2'-O-Methyl-cytidine
  modified_base 97: mod_base = OTHER; note = 2'-O-Methyl-uridine phosphorothioate
  modified_base 98: mod_base = OTHER; note = 2'-O-Methyl-uridine phosphorothioate
  modified_base 99: mod_base = OTHER; note = 2'-O-Methyl-uridine phosphorothioate
  modified_base 100: mod_base = OTHER; note = 2'-O-Methyl-uridine

SEQ ID NO: 2419 - RNA, 103 nt, synthetic construct; identical to SEQ ID NO: 1700
  source 1..103: mol_type = other RNA
  modified_base 1: mod_base = OTHER; note = 2'-O-Methyl-cytidine phosphorothioate
  modified_base 2: mod_base = OTHER; note = 2'-O-Methyl-adenosine phosphorothioate
  modified_base 3: mod_base = OTHER; note = 2'-O-Methyl-guanosine phosphorothioate
  modified_base 21: mod_base = OTHER; note = 2'-O-Methyl-guanosine
  modified_base 28: mod_base = OTHER; note = 2'-O-Methyl-adenosine
  modified_base 29: mod_base = OTHER; note = 2'-O-Methyl-guanosine
  modified_base 30: mod_base = OTHER; note = 2'-O-Methyl-cytidine
  modified_base 31: mod_base = OTHER; note = 2'-O-Methyl-uridine
  modified_base 32: mod_base = OTHER; note = 2'-O-Methyl-adenosine
  modified_base 34: mod_base = OTHER; note = 2'-O-Methyl-adenosine
  modified_base 35: mod_base = OTHER; note = 2'-O-Methyl-adenosine
  modified_base 36: mod_base = OTHER; note = 2'-O-Methyl-adenosine
  modified_base 37: mod_base = OTHER; note = 2'-O-Methyl-uridine
  modified_base 38: mod_base = OTHER; note = 2'-O-Methyl-adenosine
  modified_base 39: mod_base = OTHER; note = 2'-O-Methyl-guanosine
  modified_base 40: mod_base = OTHER; note = 2'-O-Methyl-cytidine
  modified_base 41: mod_base = OTHER; note = 2'-O-Methyl-adenosine
  modified_base 42: mod_base = OTHER; note = 2'-O-Methyl-adenosine
  modified_base 46: mod_base = OTHER; note = 2'-O-Methyl-adenosine
  modified_base 48: mod_base = OTHER; note = 2'-O-Methyl-adenosine
  modified_base 50: mod_base = OTHER; note = 2'-O-Methyl-uridine
  modified_base 52: mod_base = OTHER; note = 2'-O-Methyl-adenosine
  modified_base 53: mod_base = OTHER; note = 2'-O-Methyl-guanosine
  modified_base 54: mod_base = OTHER; note = 2'-O-Methyl-guanosine
  modified_base 55: mod_base = OTHER; note = 2'-O-Methyl-cytidine
  modified_base 56: mod_base = OTHER; note = 2'-O-Methyl-uridine
  modified_base 57: mod_base = OTHER; note = 2'-O-Methyl-adenosine
  modified_base 60: mod_base = OTHER; note = 2'-O-Methyl-cytidine
  modified_base 61: mod_base = OTHER; note = 2'-O-Methyl-cytidine
  modified_base 66: mod_base = OTHER; note = 2'-O-Methyl-uridine
  modified_base 67: mod_base = OTHER; note = 2'-O-Methyl-cytidine
  modified_base 70: mod_base = OTHER; note = 2'-O-Methyl-cytidine
  modified_base 71: mod_base = OTHER; note = 2'-O-Methyl-uridine
  modified_base 72: mod_base = OTHER; note = 2'-O-Methyl-uridine
  modified_base 74: mod_base = OTHER; note = 2'-O-Methyl-adenosine
  modified_base 75: mod_base = OTHER; note = 2'-O-Methyl-adenosine
  modified_base 76: mod_base = OTHER; note = 2'-O-Methyl-adenosine
  modified_base 77: mod_base = OTHER; note = 2'-O-Methyl-adenosine
  modified_base 78: mod_base = OTHER; note = 2'-O-Methyl-adenosine
  modified_base 79: mod_base = OTHER; note = 2'-O-Methyl-guanosine
  modified_base 80: mod_base = OTHER; note = 2'-O-Methyl-uridine
  modified_base 82: mod_base = OTHER; note = 2'-O-Methyl-guanosine
  modified_base 83: mod_base = OTHER; note = 2'-O-Methyl-cytidine
  modified_base 84: mod_base = OTHER; note = 2'-O-Methyl-adenosine
  modified_base 85: mod_base = OTHER; note = 2'-O-Methyl-cytidine
  modified_base 86: mod_base = OTHER; note = 2'-O-Methyl-cytidine
  modified_base 87: mod_base = OTHER; note = 2'-O-Methyl-guanosine
  modified_base 89: mod_base = OTHER; note = 2'-O-Methyl-guanosine
  modified_base 92: mod_base = OTHER; note = 2'-O-Methyl-guanosine
  modified_base 93: mod_base = OTHER; note = 2'-O-Methyl-guanosine
  modified_base 94: mod_base = OTHER; note = 2'-O-Methyl-uridine
  modified_base 95: mod_base = OTHER; note = 2'-O-Methyl-guanosine
  modified_base 96: mod_base = OTHER; note = 2'-O-Methyl-cytidine
  modified_base 97: mod_base = OTHER; note = 2'-O-Methyl-uridine phosphorothioate
  modified_base 98: mod_base = OTHER; note = 2'-O-Methyl-uridine phosphorothioate
  modified_base 99: mod_base = OTHER; note = 2'-O-Methyl-uridine phosphorothioate
  modified_base 100: mod_base = OTHER; note = 2'-O-Methyl-uridine

SEQ ID NO: 2420 - RNA, 103 nt, synthetic construct; identical to SEQ ID NO: 1643
  source 1..103: mol_type = other RNA
  modified_base 1: mod_base = OTHER; note = 2'-O-Methyl-cytidine phosphorothioate
  modified_base 2: mod_base = OTHER; note = 2'-O-Methyl-cytidine phosphorothioate
  modified_base 3: mod_base = OTHER; note = 2'-O-Methyl-cytidine phosphorothioate
  modified_base 21: mod_base = OTHER; note = 2'-O-Methyl-guanosine
  modified_base 28: mod_base = OTHER; note = 2'-O-Methyl-adenosine
  modified_base 29: mod_base = OTHER; note = 2'-O-Methyl-guanosine
  modified_base 30: mod_base = OTHER; note = 2'-O-Methyl-cytidine
  modified_base 31: mod_base = OTHER; note = 2'-O-Methyl-uridine
  modified_base 32: mod_base = OTHER; note = 2'-O-Methyl-adenosine
  modified_base 33: mod_base = OTHER; note = 2'-O-Methyl-guanosine
  modified_base 34: mod_base = OTHER; note = 2'-O-Methyl-adenosine
  modified_base 35: mod_base = OTHER; note = 2'-O-Methyl-adenosine
  modified_base 36: mod_base = OTHER; note = 2'-O-Methyl-adenosine
  modified_base 37: mod_base = OTHER; note = 2'-O-Methyl-uridine
  modified_base 38: mod_base = OTHER; note = 2'-O-Methyl-adenosine
  modified_base 39: mod_base = OTHER; note = 2'-O-Methyl-guanosine
  modified_base 40: mod_base = OTHER; note = 2'-O-Methyl-cytidine
  modified_base 41: mod_base = OTHER; note = 2'-O-Methyl-adenosine
  modified_base 42: mod_base = OTHER; note = 2'-O-Methyl-adenosine
  modified_base 46: mod_base = OTHER; note = 2'-O-Methyl-adenosine
  modified_base 48: mod_base = OTHER; note = 2'-O-Methyl-adenosine
  modified_base 50: mod_base = OTHER; note = 2'-O-Methyl-uridine
  modified_base 52: mod_base = OTHER; note = 2'-O-Methyl-adenosine
  modified_base 53: mod_base = OTHER; note = 2'-O-Methyl-guanosine
  modified_base 54: mod_base = OTHER; note = 2'-O-Methyl-guanosine
  modified_base 55: mod_base = OTHER; note = 2'-O-Methyl-cytidine
  modified_base 56: mod_base = OTHER; note = 2'-O-Methyl-uridine
  modified_base 57: mod_base = OTHER; note = 2'-O-Methyl-adenosine
  modified_base 60: mod_base = OTHER; note = 2'-O-Methyl-cytidine
  modified_base 61: mod_base = OTHER; note = 2'-O-Methyl-cytidine
  modified_base 64: mod_base = OTHER; note = uridine phosphorothioate
  modified_base 66: mod_base = OTHER; note = 2'-O-Methyl-uridine
  modified_base 67: mod_base = OTHER; note = 2'-O-Methyl-cytidine
  modified_base 70: mod_base = OTHER; note = 2'-O-Methyl-cytidine
  modified_base 71: mod_base = OTHER; note = 2'-O-Methyl-uridine
  modified_base 72: mod_base = OTHER; note = 2'-O-Methyl-uridine
  modified_base 73: mod_base = OTHER; note = 2'-O-Methyl-guanosine
  modified_base 74: mod_base = OTHER; note = 2'-O-Methyl-adenosine
  modified_base 75: mod_base = OTHER; note = 2'-O-Methyl-adenosine
  modified_base 76: mod_base = OTHER; note = 2'-O-Methyl-adenosine
  modified_base 77: mod_base = OTHER; note = 2'-O-Methyl-adenosine
  modified_base 78: mod_base = OTHER; note = 2'-O-Methyl-adenosine
  modified_base 79: mod_base = OTHER; note = 2'-O-Methyl-guanosine
  modified_base 80: mod_base = OTHER; note = 2'-O-Methyl-uridine
  modified_base 81: mod_base = OTHER; note = 2'-O-Methyl-guanosine
  modified_base 83: mod_base = OTHER; note = 2'-O-Methyl-cytidine
  modified_base 84: mod_base = OTHER; note = 2'-O-Methyl-adenosine
  modified_base 85: mod_base = OTHER; note = 2'-O-Methyl-cytidine
  modified_base 86: mod_base = OTHER; note = 2'-O-Methyl-cytidine
  modified_base 87: mod_base = OTHER; note = 2'-O-Methyl-guanosine
  modified_base 88: mod_base = OTHER; note = 2'-O-Methyl-adenosine
  modified_base 89: mod_base = OTHER; note = 2'-O-Methyl-guanosine
  modified_base 90: mod_base = OTHER; note = 2'-O-Methyl-uridine
  modified_base 91: mod_base = OTHER; note = 2'-O-Methyl-cytidine
  modified_base 92: mod_base = OTHER; note = 2'-O-Methyl-guanosine
  modified_base 93: mod_base = OTHER; note = 2'-O-Methyl-guanosine
  modified_base 94: mod_base = OTHER; note = 2'-O-Methyl-uridine
  modified_base 95: mod_base = OTHER; note = 2'-O-Methyl-guanosine
  modified_base 96: mod_base = OTHER; note = 2'-O-Methyl-cytidine
  modified_base 97: mod_base = OTHER; note = 2'-O-Methyl-uridine phosphorothioate
  modified_base 98: mod_base = OTHER; note = 2'-O-Methyl-uridine phosphorothioate
  modified_base 99: mod_base = OTHER; note = 2'-O-Methyl-uridine phosphorothioate
  modified_base 100: mod_base = OTHER; note = 2'-O-Methyl-uridine

SEQ ID NO: 2421 - RNA, 103 nt, synthetic construct; identical to SEQ ID NO: 1643
  source 1..103: mol_type = other RNA
  modified_base 1: mod_base = OTHER; note = 2'-O-Methyl-cytidine phosphorothioate
  modified_base 2: mod_base = OTHER; note = 2'-O-Methyl-cytidine phosphorothioate
  modified_base 3: mod_base = OTHER; note = 2'-O-Methyl-cytidine phosphorothioate
  modified_base 21: mod_base = OTHER; note = 2'-O-Methyl-guanosine
  modified_base 28: mod_base = OTHER; note = 2'-O-Methyl-adenosine
  modified_base 29: mod_base = OTHER; note = 2'-O-Methyl-guanosine
  modified_base 30: mod_base = OTHER; note = 2'-O-Methyl-cytidine
  modified_base 31: mod_base = OTHER; note = 2'-O-Methyl-uridine
  modified_base 32: mod_base = OTHER; note = 2'-O-Methyl-adenosine
  modified_base 34: mod_base = OTHER; note = 2'-O-Methyl-adenosine
  modified_base 35: mod_base = OTHER; note = 2'-O-Methyl-adenosine
  modified_base 36: mod_base = OTHER; note = 2'-O-Methyl-adenosine
  modified_base 37: mod_base = OTHER; note = 2'-O-Methyl-uridine
  modified_base 38: mod_base = OTHER; note = 2'-O-Methyl-adenosine
  modified_base 39: mod_base = OTHER; note = 2'-O-Methyl-guanosine
  modified_base 40: mod_base = OTHER; note = 2'-O-Methyl-cytidine
  modified_base 41: mod_base = OTHER; note = 2'-O-Methyl-adenosine
  modified_base 42: mod_base = OTHER; note = 2'-O-Methyl-adenosine
  modified_base 46: mod_base = OTHER; note = 2'-O-Methyl-adenosine
  modified_base 48: mod_base = OTHER; note = 2'-O-Methyl-adenosine
  modified_base 50: mod_base = OTHER; note = 2'-O-Methyl-uridine
  modified_base 52: mod_base = OTHER; note = 2'-O-Methyl-adenosine
  modified_base 53: mod_base = OTHER; note = 2'-O-Methyl-guanosine
  modified_base 54: mod_base = OTHER; note = 2'-O-Methyl-guanosine
  modified_base 55: mod_base = OTHER; note = 2'-O-Methyl-cytidine
  modified_base 56: mod_base = OTHER; note = 2'-O-Methyl-uridine
  modified_base 57: mod_base = OTHER; note = 2'-O-Methyl-adenosine
  modified_base 60: mod_base = OTHER; note = 2'-O-Methyl-cytidine
  modified_base 61: mod_base = OTHER; note = 2'-O-Methyl-cytidine
  modified_base 64: mod_base = OTHER; note = uridine phosphorothioate
  modified_base 66: mod_base = OTHER; note = 2'-O-Methyl-uridine
  modified_base 67: mod_base = OTHER; note = 2'-O-Methyl-cytidine
  modified_base 70: mod_base = OTHER; note = 2'-O-Methyl-cytidine
  modified_base 71: mod_base = OTHER; note = 2'-O-Methyl-uridine
  modified_base 72: mod_base = OTHER; note = 2'-O-Methyl-uridine
  modified_base 74: mod_base = OTHER; note = 2'-O-Methyl-adenosine
  modified_base 75: mod_base = OTHER; note = 2'-O-Methyl-adenosine
  modified_base 76: mod_base = OTHER; note = 2'-O-Methyl-adenosine
  modified_base 77: mod_base = OTHER; note = 2'-O-Methyl-adenosine
  modified_base 78: mod_base = OTHER; note = 2'-O-Methyl-adenosine
  modified_base 79: mod_base = OTHER; note = 2'-O-Methyl-guanosine
  modified_base 80: mod_base = OTHER; note = 2'-O-Methyl-uridine
  modified_base 81: mod_base = OTHER; note = 2'-O-Methyl-guanosine
  modified_base 83: mod_base = OTHER; note = 2'-O-Methyl-cytidine
  modified_base 84: mod_base = OTHER; note = 2'-O-Methyl-adenosine
  modified_base 85: mod_base = OTHER; note = 2'-O-Methyl-cytidine
  modified_base 86: mod_base = OTHER; note = 2'-O-Methyl-cytidine
  modified_base 87: mod_base = OTHER; note = 2'-O-Methyl-guanosine
  modified_base 88: mod_base = OTHER; note = 2'-O-Methyl-adenosine
  modified_base 89: mod_base = OTHER; note = 2'-O-Methyl-guanosine
  modified_base 90: mod_base = OTHER; note = 2'-O-Methyl-uridine
  modified_base 91: mod_base = OTHER; note = 2'-O-Methyl-cytidine
  modified_base 92: mod_base = OTHER; note = 2'-O-Methyl-guanosine
  modified_base 93: mod_base = OTHER; note = 2'-O-Methyl-guanosine
  modified_base 94: mod_base = OTHER; note = 2'-O-Methyl-uridine
  modified_base 95: mod_base = OTHER; note = 2'-O-Methyl-guanosine
  modified_base 96: mod_base = OTHER; note = 2'-O-Methyl-cytidine
  modified_base 97: mod_base = OTHER; note = 2'-O-Methyl-uridine phosphorothioate
  modified_base 98: mod_base = OTHER; note = 2'-O-Methyl-uridine phosphorothioate
  modified_base 99: mod_base = OTHER; note = 2'-O-Methyl-uridine phosphorothioate
  modified_base 100: mod_base = OTHER; note = 2'-O-Methyl-uridine

SEQ ID NO: 2422 - RNA, 103 nt, synthetic construct; identical to SEQ ID NO: 1699
  source 1..103: mol_type = other RNA
  modified_base 1: mod_base = OTHER; note = 2'-O-Methyl-guanosine phosphorothioate
  modified_base 2: mod_base = OTHER; note = 2'-O-Methyl-adenosine phosphorothioate
  modified_base 3: mod_base = OTHER; note = 2'-O-Methyl-guanosine phosphorothioate
  modified_base 21: mod_base = OTHER; note = 2'-O-Methyl-guanosine
  modified_base 28: mod_base = OTHER; note = 2'-O-Methyl-adenosine
  modified_base 29: mod_base = OTHER; note = 2'-O-Methyl-guanosine
  modified_base 30: mod_base = OTHER; note = 2'-O-Methyl-cytidine
  modified_base 31: mod_base = OTHER; note = 2'-O-Methyl-uridine
  modified_base 32: mod_base = OTHER; note = 2'-O-Methyl-adenosine
  modified_base 33: mod_base = OTHER; note = 2'-O-Methyl-guanosine
  modified_base 34: mod_base = OTHER; note = 2'-O-Methyl-adenosine
  modified_base 35: mod_base = OTHER; note = 2'-O-Methyl-adenosine
  modified_base 36: mod_base = OTHER; note = 2'-O-Methyl-adenosine
  modified_base 37: mod_base = OTHER; note = 2'-O-Methyl-uridine
  modified_base 38: mod_base = OTHER; note = 2'-O-Methyl-adenosine
  modified_base 39: mod_base = OTHER; note = 2'-O-Methyl-guanosine
  modified_base 40: mod_base = OTHER; note = 2'-O-Methyl-cytidine
  modified_base 41: mod_base = OTHER; note = 2'-O-Methyl-adenosine
  modified_base 42: mod_base = OTHER; note = 2'-O-Methyl-adenosine
  modified_base 46: mod_base = OTHER; note = 2'-O-Methyl-adenosine
  modified_base 48: mod_base = OTHER; note = 2'-O-Methyl-adenosine
  modified_base 50: mod_base = OTHER; note = 2'-O-Methyl-uridine
  modified_base 52: mod_base = OTHER; note = 2'-O-Methyl-adenosine
  modified_base 53: mod_base = OTHER; note = 2'-O-Methyl-guanosine
  modified_base 54: mod_base = OTHER; note = 2'-O-Methyl-guanosine
  modified_base 55: mod_base = OTHER; note = 2'-O-Methyl-cytidine
  modified_base 56: mod_base = OTHER; note = 2'-O-Methyl-uridine
  modified_base 57: mod_base = OTHER; note = 2'-O-Methyl-adenosine
  modified_base 60: mod_base = OTHER; note = 2'-O-Methyl-cytidine
  modified_base 61: mod_base = OTHER; note = 2'-O-Methyl-cytidine
  modified_base 64: mod_base = OTHER; note = uridine phosphorothioate
  modified_base 66: mod_base = OTHER; note = 2'-O-Methyl-uridine
  modified_base 67: mod_base = OTHER; note = 2'-O-Methyl-cytidine
  modified_base 70: mod_base = OTHER; note = 2'-O-Methyl-cytidine
  modified_base 71: mod_base = OTHER; note = 2'-O-Methyl-uridine
  modified_base 72: mod_base = OTHER; note = 2'-O-Methyl-uridine
  modified_base 73: mod_base = OTHER; note = 2'-O-Methyl-guanosine
  modified_base 74: mod_base = OTHER; note = 2'-O-Methyl-adenosine
  modified_base 75: mod_base = OTHER; note = 2'-O-Methyl-adenosine
  modified_base 76: mod_base = OTHER; note = 2'-O-Methyl-adenosine
  modified_base 77: mod_base = OTHER; note = 2'-O-Methyl-adenosine
  modified_base 78: mod_base = OTHER; note = 2'-O-Methyl-adenosine
  modified_base 79: mod_base = OTHER; note = 2'-O-Methyl-guanosine
  modified_base 80: mod_base = OTHER; note = 2'-O-Methyl-uridine
  modified_base 81: mod_base = OTHER; note = 2'-O-Methyl-guanosine
  modified_base 83: mod_base = OTHER; note = 2'-O-Methyl-cytidine
  modified_base 84: mod_base = OTHER; note = 2'-O-Methyl-adenosine
  modified_base 85: mod_base = OTHER; note = 2'-O-Methyl-cytidine
  modified_base 86: mod_base = OTHER; note = 2'-O-Methyl-cytidine
  modified_base 87: mod_base = OTHER; note = 2'-O-Methyl-guanosine
  modified_base 88: mod_base = OTHER; note = 2'-O-Methyl-adenosine
  modified_base 89: mod_base = OTHER; note = 2'-O-Methyl-guanosine
  modified_base 90: mod_base = OTHER; note = 2'-O-Methyl-uridine
  modified_base 91: mod_base = OTHER; note = 2'-O-Methyl-cytidine
  modified_base 92: mod_base = OTHER; note = 2'-O-Methyl-guanosine
  modified_base 93: mod_base = OTHER; note = 2'-O-Methyl-guanosine
  modified_base 94: mod_base = OTHER; note = 2'-O-Methyl-uridine
  modified_base 95: mod_base = OTHER; note = 2'-O-Methyl-guanosine
  modified_base 96: mod_base = OTHER; note = 2'-O-Methyl-cytidine
  modified_base 97: mod_base = OTHER; note = 2'-O-Methyl-uridine phosphorothioate
  modified_base 98: mod_base = OTHER; note = 2'-O-Methyl-uridine phosphorothioate
  modified_base 99: mod_base = OTHER; note = 2'-O-Methyl-uridine phosphorothioate
  modified_base 100: mod_base = OTHER; note = 2'-O-Methyl-uridine

SEQ ID NO: 2423 - RNA, 103 nt, synthetic construct; identical to SEQ ID NO: 1699
  source 1..103: mol_type = other RNA
  modified_base 1: mod_base = OTHER; note = 2'-O-Methyl-guanosine phosphorothioate
  modified_base 2: mod_base = OTHER; note = 2'-O-Methyl-adenosine phosphorothioate
  modified_base 3: mod_base = OTHER; note = 2'-O-Methyl-guanosine phosphorothioate
  modified_base 21: mod_base = OTHER; note = 2'-O-Methyl-guanosine
  modified_base 28: mod_base = OTHER; note = 2'-O-Methyl-adenosine
  modified_base 29: mod_base = OTHER; note = 2'-O-Methyl-guanosine
  modified_base 30: mod_base = OTHER; note = 2'-O-Methyl-cytidine
  modified_base 31: mod_base = OTHER; note = 2'-O-Methyl-uridine
  modified_base 32: mod_base = OTHER; note = 2'-O-Methyl-adenosine
  modified_base 34: mod_base = OTHER; note = 2'-O-Methyl-adenosine
  modified_base 35: mod_base = OTHER; note = 2'-O-Methyl-adenosine
  modified_base 36: mod_base = OTHER; note = 2'-O-Methyl-adenosine
  modified_base 37: mod_base = OTHER; note = 2'-O-Methyl-uridine
  modified_base 38: mod_base = OTHER; note = 2'-O-Methyl-adenosine
  modified_base 39: mod_base = OTHER; note = 2'-O-Methyl-guanosine
  modified_base 40: mod_base = OTHER; note = 2'-O-Methyl-cytidine
  modified_base 41: mod_base = OTHER; note = 2'-O-Methyl-adenosine
  modified_base 42: mod_base = OTHER; note = 2'-O-Methyl-adenosine
  modified_base 46: mod_base = OTHER; note = 2'-O-Methyl-adenosine
  modified_base 48: mod_base = OTHER; note = 2'-O-Methyl-adenosine
  modified_base 50: mod_base = OTHER; note = 2'-O-Methyl-uridine
  modified_base 52: mod_base = OTHER; note = 2'-O-Methyl-adenosine
  modified_base 53: mod_base = OTHER; note = 2'-O-Methyl-guanosine
  modified_base 54: mod_base = OTHER; note = 2'-O-Methyl-guanosine
  modified_base 55: mod_base = OTHER; note = 2'-O-Methyl-cytidine
  modified_base 56: mod_base = OTHER; note = 2'-O-Methyl-uridine
  modified_base 57: mod_base = OTHER; note = 2'-O-Methyl-adenosine
  modified_base 60: mod_base = OTHER; note = 2'-O-Methyl-cytidine
  modified_base 61: mod_base = OTHER; note = 2'-O-Methyl-cytidine
  modified_base 64: mod_base = OTHER; note = uridine phosphorothioate
  modified_base 66: mod_base = OTHER; note = 2'-O-Methyl-uridine
  modified_base 67: mod_base = OTHER; note = 2'-O-Methyl-cytidine
  modified_base 70: mod_base = OTHER; note = 2'-O-Methyl-cytidine
  modified_base 71: mod_base = OTHER; note = 2'-O-Methyl-uridine
  modified_base 72: mod_base = OTHER; note = 2'-O-Methyl-uridine
  modified_base 74: mod_base = OTHER; note = 2'-O-Methyl-adenosine
  modified_base 75: mod_base = OTHER; note = 2'-O-Methyl-adenosine
  modified_base 76: mod_base = OTHER; note = 2'-O-Methyl-adenosine
  modified_base 77: mod_base = OTHER; note = 2'-O-Methyl-adenosine
  modified_base 78: mod_base = OTHER; note = 2'-O-Methyl-adenosine
  modified_base 79: mod_base = OTHER; note = 2'-O-Methyl-guanosine
  modified_base 80: mod_base = OTHER; note = 2'-O-Methyl-uridine
  modified_base 81: mod_base = OTHER; note = 2'-O-Methyl-guanosine
  modified_base 83: mod_base = OTHER; note = 2'-O-Methyl-cytidine
  modified_base 84: mod_base = OTHER; note = 2'-O-Methyl-adenosine
  modified_base 85: mod_base = OTHER; note = 2'-O-Methyl-cytidine
  modified_base 86: mod_base = OTHER; note = 2'-O-Methyl-cytidine
  modified_base 87: mod_base = OTHER; note = 2'-O-Methyl-guanosine
  modified_base 88: mod_base = OTHER; note = 2'-O-Methyl-adenosine
  modified_base 89: mod_base = OTHER; note = 2'-O-Methyl-guanosine
  modified_base 90: mod_base = OTHER; note = 2'-O-Methyl-uridine
  modified_base 91: mod_base = OTHER; note = 2'-O-Methyl-cytidine
  modified_base 92: mod_base = OTHER; note = 2'-O-Methyl-guanosine
  modified_base 93: mod_base = OTHER; note = 2'-O-Methyl-guanosine
  modified_base 94: mod_base = OTHER; note = 2'-O-Methyl-uridine
  modified_base 95: mod_base = OTHER; note = 2'-O-Methyl-guanosine
  modified_base 96: mod_base = OTHER; note = 2'-O-Methyl-cytidine
  modified_base 97: mod_base = OTHER; note = 2'-O-Methyl-uridine phosphorothioate
  modified_base 98: mod_base = OTHER; note = 2'-O-Methyl-uridine phosphorothioate
  modified_base 99: mod_base = OTHER; note = 2'-O-Methyl-uridine phosphorothioate
  modified_base 100: mod_base = OTHER; note = 2'-O-Methyl-uridine

SEQ ID NO: 2424 - RNA, 103 nt, synthetic construct; identical to SEQ ID NO: 1700
  source 1..103: mol_type = other RNA
  modified_base 1: mod_base = OTHER; note = 2'-O-Methyl-cytidine phosphorothioate
  modified_base 2: mod_base = OTHER; note = 2'-O-Methyl-adenosine phosphorothioate
  modified_base 3: mod_base = OTHER; note = 2'-O-Methyl-guanosine phosphorothioate
  modified_base 21: mod_base = OTHER; note = 2'-O-Methyl-guanosine
  modified_base 28: mod_base = OTHER; note = 2'-O-Methyl-adenosine
  modified_base 29: mod_base = OTHER; note = 2'-O-Methyl-guanosine
  modified_base 30: mod_base = OTHER; note = 2'-O-Methyl-cytidine
  modified_base 31: mod_base = OTHER; note = 2'-O-Methyl-uridine
  modified_base 32: mod_base = OTHER; note = 2'-O-Methyl-adenosine
  modified_base 33: mod_base = OTHER; note = 2'-O-Methyl-guanosine
  modified_base 34: mod_base = OTHER; note = 2'-O-Methyl-adenosine
  modified_base 35: mod_base = OTHER; note = 2'-O-Methyl-adenosine
  modified_base 36: mod_base = OTHER; note = 2'-O-Methyl-adenosine
  modified_base 37: mod_base = OTHER; note = 2'-O-Methyl-uridine
  modified_base 38: mod_base = OTHER; note = 2'-O-Methyl-adenosine
  modified_base 39: mod_base = OTHER; note = 2'-O-Methyl-guanosine
  modified_base 40: mod_base = OTHER; note = 2'-O-Methyl-cytidine
  modified_base 41: mod_base = OTHER; note = 2'-O-Methyl-adenosine
  modified_base 42: mod_base = OTHER; note = 2'-O-Methyl-adenosine
  modified_base 46: mod_base = OTHER; note = 2'-O-Methyl-adenosine
  modified_base 48: mod_base = OTHER; note = 2'-O-Methyl-adenosine
  modified_base 50: mod_base = OTHER; note = 2'-O-Methyl-uridine
  modified_base 52: mod_base = OTHER; note = 2'-O-Methyl-adenosine
  modified_base 53: mod_base = OTHER; note = 2'-O-Methyl-guanosine
  modified_base 54: mod_base = OTHER; note = 2'-O-Methyl-guanosine
  modified_base 57: mod_base = OTHER; note = 2'-O-Methyl-adenosine
  modified_base 61: mod_base = OTHER; note = 2'-O-Methyl-cytidine
  modified_base 64: mod_base = OTHER; note = uridine phosphorothioate
  modified_base 66: mod_base = OTHER; note = 2'-O-Methyl-uridine
  modified_base 67: mod_base = OTHER; note = 2'-O-Methyl-cytidine
  modified_base 70: mod_base = OTHER; note = 2'-O-Methyl-cytidine
  modified_base 71: mod_base = OTHER; note = 2'-O-Methyl-uridine
  modified_base 72: mod_base = OTHER; note = 2'-O-Methyl-uridine
  modified_base 74: mod_base = OTHER; note = 2'-O-Methyl-adenosine
  modified_base 75: mod_base = OTHER; note = 2'-O-Methyl-adenosine
  modified_base 76: mod_base = OTHER; note = 2'-O-Methyl-adenosine
  modified_base 77: mod_base = OTHER; note = 2'-O-Methyl-adenosine
  modified_base 78: mod_base = OTHER; note = 2'-O-Methyl-adenosine
  modified_base 79: mod_base = OTHER; note = 2'-O-Methyl-guanosine
  modified_base 80: mod_base = OTHER; note = 2'-O-Methyl-uridine
  modified_base 82: mod_base = OTHER; note = 2'-O-Methyl-guanosine
  modified_base 83: mod_base = OTHER; note = 2'-O-Methyl-cytidine
  modified_base 84: mod_base = OTHER; note = 2'-O-Methyl-adenosine
  modified_base 85: mod_base = OTHER; note = 2'-O-Methyl-cytidine
  modified_base 86: mod_base = OTHER; note = 2'-O-Methyl-cytidine
  modified_base 87: mod_base = OTHER; note = 2'-O-Methyl-guanosine
  modified_base 89: mod_base = OTHER; note = 2'-O-Methyl-guanosine
  modified_base 92: mod_base = OTHER; note = 2'-O-Methyl-guanosine
  modified_base 93: mod_base = OTHER; note = 2'-O-Methyl-guanosine
  modified_base 94: mod_base = OTHER; note = 2'-O-Methyl-uridine
  modified_base 95: mod_base = OTHER; note = 2'-O-Methyl-guanosine
  modified_base 96: mod_base = OTHER; note = 2'-O-Methyl-cytidine
  modified_base 97: mod_base = OTHER; note = 2'-O-Methyl-uridine phosphorothioate
  modified_base 98: mod_base = OTHER; note = 2'-O-Methyl-uridine phosphorothioate
  modified_base 99: mod_base = OTHER; note = 2'-O-Methyl-uridine phosphorothioate
  modified_base 100: mod_base = OTHER; note = 2'-O-Methyl-uridine

SEQ ID NO: 2425 - RNA, 103 nt, synthetic construct; identical to SEQ ID NO: 1700
  source 1..103: mol_type = other RNA
  modified_base 1: mod_base = OTHER; note = 2'-O-Methyl-cytidine phosphorothioate
  modified_base 2: mod_base = OTHER; note = 2'-O-Methyl-adenosine phosphorothioate
  modified_base 3: mod_base = OTHER; note = 2'-O-Methyl-guanosine phosphorothioate
  modified_base 21: mod_base = OTHER; note = 2'-O-Methyl-guanosine
  modified_base 28: mod_base = OTHER; note = 2'-O-Methyl-adenosine
  modified_base 29: mod_base = OTHER; note = 2'-O-Methyl-guanosine
  modified_base 30: mod_base = OTHER; note = 2'-O-Methyl-cytidine
  modified_base 31: mod_base = OTHER; note = 2'-O-Methyl-uridine
  modified_base 32: mod_base = OTHER; note = 2'-O-Methyl-adenosine
  modified_base 33: mod_base = OTHER; note = 2'-O-Methyl-guanosine
  modified_base 34: mod_base = OTHER; note = 2'-O-Methyl-adenosine
  modified_base 35: mod_base = OTHER; note = 2'-O-Methyl-adenosine
  modified_base 36: mod_base = OTHER; note = 2'-O-Methyl-adenosine
  modified_base 37: mod_base = OTHER; note = 2'-O-Methyl-uridine
  modified_base 38: mod_base = OTHER; note = 2'-O-Methyl-adenosine
  modified_base 39: mod_base = OTHER; note = 2'-O-Methyl-guanosine
  modified_base 40: mod_base = OTHER; note = 2'-O-Methyl-cytidine
  modified_base 41: mod_base = OTHER; note = 2'-O-Methyl-adenosine
  modified_base 42: mod_base = OTHER; note = 2'-O-Methyl-adenosine
  modified_base 46: mod_base = OTHER; note = 2'-O-Methyl-adenosine
  modified_base 48: mod_base = OTHER; note = 2'-O-Methyl-adenosine
  modified_base 50: mod_base = OTHER; note = 2'-O-Methyl-uridine
  modified_base 52: mod_base = OTHER; note = 2'-O-Methyl-adenosine
  modified_base 53: mod_base = OTHER; note = 2'-O-Methyl-guanosine
  modified_base 54: mod_base = OTHER; note = 2'-O-Methyl-guanosine
  modified_base 55: mod_base = OTHER; note = 2'-O-Methyl-cytidine
  modified_base 56: mod_base = OTHER; note = 2'-O-Methyl-uridine
  modified_base 57: mod_base = OTHER; note = 2'-O-Methyl-adenosine
  modified_base 60: mod_base = OTHER; note = 2'-O-Methyl-cytidine
  modified_base 61: mod_base = OTHER; note = 2'-O-Methyl-cytidine
  modified_base 64: mod_base = OTHER; note = uridine phosphorothioate
  modified_base 66: mod_base = OTHER; note = 2'-O-Methyl-uridine
  modified_base 67: mod_base = OTHER; note = 2'-O-Methyl-cytidine
  modified_base 70: mod_base = OTHER; note = 2'-O-Methyl-cytidine
  modified_base 71: mod_base = OTHER; note = 2'-O-Methyl-uridine
  modified_base 72: mod_base = OTHER; note = 2'-O-Methyl-uridine
  modified_base 74: mod_base = OTHER; note = 2'-O-Methyl-adenosine
  modified_base 75: mod_base = OTHER; note = 2'-O-Methyl-adenosine
  modified_base 76: mod_base = OTHER; note = 2'-O-Methyl-adenosine
  modified_base 77: mod_base = OTHER; note = 2'-O-Methyl-adenosine
  modified_base 78: mod_base = OTHER; note = 2'-O-Methyl-adenosine
  modified_base 79: mod_base = OTHER; note = 2'-O-Methyl-guanosine
  modified_base 80: mod_base = OTHER; note = 2'-O-Methyl-uridine
  modified_base 82: mod_base = OTHER; note = 2'-O-Methyl-guanosine
  modified_base 83: mod_base = OTHER; note = 2'-O-Methyl-cytidine
  modified_base 84: mod_base = OTHER; note = 2'-O-Methyl-adenosine
  modified_base 85: mod_base = OTHER; note = 2'-O-Methyl-cytidine
  modified_base 86: mod_base = OTHER; note = 2'-O-Methyl-cytidine
  modified_base 87: mod_base = OTHER; note = 2'-O-Methyl-guanosine
  modified_base 89: mod_base = OTHER; note = 2'-O-Methyl-guanosine
  modified_base 92: mod_base = OTHER; note = 2'-O-Methyl-guanosine
  modified_base 93: mod_base = OTHER; note = 2'-O-Methyl-guanosine
  modified_base 94: mod_base = OTHER; note = 2'-O-Methyl-uridine
  modified_base 95: mod_base = OTHER; note = 2'-O-Methyl-guanosine
  modified_base 96: mod_base = OTHER; note = 2'-O-Methyl-cytidine
  modified_base 97: mod_base = OTHER; note = 2'-O-Methyl-uridine phosphorothioate
  modified_base 98: mod_base = OTHER; note = 2'-O-Methyl-uridine phosphorothioate
  modified_base 99: mod_base = OTHER; note = 2'-O-Methyl-uridine phosphorothioate
  modified_base 100: mod_base = OTHER; note = 2'-O-Methyl-uridine

SEQ ID NO: 2426 - RNA, 103 nt, synthetic construct; identical to SEQ ID NO: 1700
  source 1..103: mol_type = other RNA
  modified_base 1: mod_base = OTHER; note = 2'-O-Methyl-cytidine phosphorothioate
  modified_base 2: mod_base = OTHER; note = 2'-O-Methyl-adenosine phosphorothioate
  modified_base 3: mod_base = OTHER; note = 2'-O-Methyl-guanosine phosphorothioate
  modified_base 21: mod_base = OTHER; note = 2'-O-Methyl-guanosine
  modified_base 28: mod_base = OTHER; note = 2'-O-Methyl-adenosine
  modified_base 29: mod_base = OTHER; note = 2'-O-Methyl-guanosine
  modified_base 30: mod_base = OTHER; note = 2'-O-Methyl-cytidine
  modified_base 31: mod_base = OTHER; note = 2'-O-Methyl-uridine
  modified_base 32: mod_base = OTHER; note = 2'-O-Methyl-adenosine
  modified_base 33: mod_base = OTHER; note = 2'-O-Methyl-guanosine
  modified_base 34: mod_base = OTHER; note = 2'-O-Methyl-adenosine
  modified_base 35: mod_base = OTHER; note = 2'-O-Methyl-adenosine
  modified_base 36: mod_base = OTHER; note = 2'-O-Methyl-adenosine
  modified_base 37: mod_base = OTHER; note = 2'-O-Methyl-uridine
  modified_base 38: mod_base = OTHER; note = 2'-O-Methyl-adenosine
  modified_base 39: mod_base = OTHER; note = 2'-O-Methyl-guanosine
  modified_base 40: mod_base = OTHER; note = 2'-O-Methyl-cytidine
  modified_base 41: mod_base = OTHER; note = 2'-O-Methyl-adenosine
  modified_base 42: mod_base = OTHER; note = 2'-O-Methyl-adenosine
  modified_base 46: mod_base = OTHER; note = 2'-O-Methyl-adenosine
  modified_base 48: mod_base = OTHER; note = 2'-O-Methyl-adenosine
  modified_base 50: mod_base = OTHER; note = 2'-O-Methyl-uridine
  modified_base 52: mod_base = OTHER; note = 2'-O-Methyl-adenosine
  modified_base 53: mod_base = OTHER; note = 2'-O-Methyl-guanosine
  modified_base 54: mod_base = OTHER; note = 2'-O-Methyl-guanosine
  modified_base 57: mod_base = OTHER; note = 2'-O-Methyl-adenosine
  modified_base 61: mod_base = OTHER; note = 2'-O-Methyl-cytidine
  modified_base 64: mod_base = OTHER; note = uridine phosphorothioate
  modified_base 66: mod_base = OTHER; note = 2'-O-Methyl-uridine
  modified_base 67: mod_base = OTHER; note = 2'-O-Methyl-cytidine
  modified_base 70: mod_base = OTHER; note = 2'-O-Methyl-cytidine
  modified_base 71: mod_base = OTHER; note = 2'-O-Methyl-uridine
  modified_base 72: mod_base = OTHER; note = 2'-O-Methyl-uridine
  modified_base 73: mod_base = OTHER; note = 2'-O-Methyl-guanosine
  modified_base 74: mod_base = OTHER; note = 2'-O-Methyl-adenosine
  modified_base 75: mod_base = OTHER; note = 2'-O-Methyl-adenosine
  modified_base 76: mod_base = OTHER; note = 2'-O-Methyl-adenosine
  modified_base 77: mod_base = OTHER; note = 2'-O-Methyl-adenosine
  modified_base 78: mod_base = OTHER; note = 2'-O-Methyl-adenosine
  modified_base 79: mod_base = OTHER; note = 2'-O-Methyl-guanosine
  modified_base 80: mod_base = OTHER; note = 2'-O-Methyl-uridine
  modified_base 82: mod_base = OTHER; note = 2'-O-Methyl-guanosine
  modified_base 83: mod_base = OTHER; note = 2'-O-Methyl-cytidine
  modified_base 84: mod_base = OTHER; note = 2'-O-Methyl-adenosine
  modified_base 85: mod_base = OTHER; note = 2'-O-Methyl-cytidine
  modified_base 86: mod_base = OTHER; note = 2'-O-Methyl-cytidine
  modified_base 87: mod_base = OTHER; note = 2'-O-Methyl-guanosine
  modified_base 89: mod_base = OTHER; note = 2'-O-Methyl-guanosine
  modified_base 92: mod_base = OTHER; note = 2'-O-Methyl-guanosine
  modified_base 93: mod_base = OTHER; note = 2'-O-Methyl-guanosine
  modified_base 94: mod_base = OTHER; note = 2'-O-Methyl-uridine
  modified_base 95: mod_base = OTHER; note = 2'-O-Methyl-guanosine
  modified_base 96: mod_base = OTHER; note = 2'-O-Methyl-cytidine
  modified_base 97: mod_base = OTHER; note = 2'-O-Methyl-uridine phosphorothioate
  modified_base 98: mod_base = OTHER; note = 2'-O-Methyl-uridine phosphorothioate
  modified_base 99: mod_base = OTHER; note = 2'-O-Methyl-uridine phosphorothioate
  modified_base 100: mod_base = OTHER; note = 2'-O-Methyl-uridine

SEQ ID NO: 2427 - RNA, 103 nt, synthetic construct; identical to SEQ ID NO: 1700
  source 1..103: mol_type = other RNA
  modified_base 1: mod_base = OTHER; note = 2'-O-Methyl-cytidine phosphorothioate
  modified_base 2: mod_base = OTHER; note = 2'-O-Methyl-adenosine phosphorothioate
  modified_base 3: mod_base = OTHER; note = 2'-O-Methyl-guanosine phosphorothioate
  modified_base 21: mod_base = OTHER; note = 2'-O-Methyl-guanosine
  modified_base 28: mod_base = OTHER; note = 2'-O-Methyl-adenosine
  modified_base 29: mod_base = OTHER; note = 2'-O-Methyl-guanosine
  modified_base 30: mod_base = OTHER; note = 2'-O-Methyl-cytidine
  modified_base 31: mod_base = OTHER; note = 2'-O-Methyl-uridine
  modified_base 32: mod_base = OTHER; note = 2'-O-Methyl-adenosine
  modified_base 33: mod_base = OTHER; note = 2'-O-Methyl-guanosine
  modified_base 34: mod_base = OTHER; note = 2'-O-Methyl-adenosine
  modified_base 35: mod_base = OTHER; note = 2'-O-Methyl-adenosine
  modified_base 36: mod_base = OTHER; note = 2'-O-Methyl-adenosine
  modified_base 37: mod_base = OTHER; note = 2'-O-Methyl-uridine
  modified_base 38: mod_base = OTHER; note = 2'-O-Methyl-adenosine
  modified_base 39: mod_base = OTHER; note = 2'-O-Methyl-guanosine
  modified_base 40: mod_base = OTHER; note = 2'-O-Methyl-cytidine
  modified_base 41: mod_base = OTHER; note = 2'-O-Methyl-adenosine
  modified_base 42: mod_base = OTHER; note = 2'-O-Methyl-adenosine
  modified_base 46: mod_base = OTHER; note = 2'-O-Methyl-adenosine
  modified_base 48: mod_base = OTHER; note = 2'-O-Methyl-adenosine
  modified_base 50: mod_base = OTHER; note = 2'-O-Methyl-uridine
  modified_base 52: mod_base = OTHER; note = 2'-O-Methyl-adenosine
  modified_base 53: mod_base = OTHER; note = 2'-O-Methyl-guanosine
  modified_base 54: mod_base = OTHER; note = 2'-O-Methyl-guanosine
  modified_base 57: mod_base = OTHER; note = 2'-O-Methyl-adenosine
  modified_base 61: mod_base = OTHER; note = 2'-O-Methyl-cytidine
  modified_base 64: mod_base = OTHER; note = uridine phosphorothioate
  modified_base 66: mod_base = OTHER; note = 2'-O-Methyl-uridine
  modified_base 67: mod_base = OTHER; note = 2'-O-Methyl-cytidine
  modified_base 70: mod_base = OTHER; note = 2'-O-Methyl-cytidine
  modified_base 71: mod_base = OTHER; note = 2'-O-Methyl-uridine
  modified_base 72: mod_base = OTHER; note = 2'-O-Methyl-uridine
  modified_base 73: mod_base = OTHER; note = 2'-O-Methyl-guanosine
  modified_base 74: mod_base = OTHER; note = 2'-O-Methyl-adenosine
  modified_base 75: mod_base = OTHER; note = 2'-O-Methyl-adenosine
  modified_base 76: mod_base = OTHER; note = 2'-O-Methyl-adenosine
  modified_base 77: mod_base = OTHER; note = 2'-O-Methyl-adenosine
  modified_base 78: mod_base = OTHER; note = 2'-O-Methyl-adenosine
  modified_base 79: mod_base = OTHER; note = 2'-O-Methyl-guanosine
  modified_base 80: mod_base = OTHER; note = 2'-O-Methyl-uridine
  modified_base 82: mod_base = OTHER; note = 2'-O-Methyl-guanosine
  modified_base 83: mod_base = OTHER; note = 2'-O-Methyl-cytidine
  modified_base 84: mod_base = OTHER; note = 2'-O-Methyl-adenosine
  modified_base 85: mod_base = OTHER; note = 2'-O-Methyl-cytidine
  modified_base 86: mod_base = OTHER; note = 2'-O-Methyl-cytidine
  modified_base 87: mod_base = OTHER; note = 2'-O-Methyl-guanosine
  modified_base 89: mod_base = OTHER; note = 2'-O-Methyl-guanosine
  modified_base 91: mod_base = OTHER; note = 2'-O-Methyl-cytidine
  modified_base 92: mod_base = OTHER; note = 2'-O-Methyl-guanosine
  modified_base 93: mod_base = OTHER; note = 2'-O-Methyl-guanosine
  modified_base 94: mod_base = OTHER; note = 2'-O-Methyl-uridine
  modified_base 95: mod_base = OTHER; note = 2'-O-Methyl-guanosine
  modified_base 96: mod_base = OTHER; note = 2'-O-Methyl-cytidine
  modified_base 97: mod_base = OTHER; note = 2'-O-Methyl-uridine phosphorothioate
  modified_base 98: mod_base = OTHER; note = 2'-O-Methyl-uridine phosphorothioate
  modified_base 99: mod_base = OTHER; note = 2'-O-Methyl-uridine phosphorothioate
  modified_base 100: mod_base = OTHER; note = 2'-O-Methyl-uridine

SEQ ID NO: 2428 - RNA, 103 nt, synthetic construct; identical to SEQ ID NO: 1700
  source 1..103: mol_type = other RNA
  modified_base 1: mod_base = OTHER; note = 2'-O-Methyl-cytidine phosphorothioate
  modified_base 2: mod_base = OTHER; note = 2'-O-Methyl-adenosine phosphorothioate
  modified_base 3: mod_base = OTHER; note = 2'-O-Methyl-guanosine phosphorothioate
  modified_base 21: mod_base = OTHER; note = 2'-O-Methyl-guanosine
  modified_base 28: mod_base = OTHER; note = 2'-O-Methyl-adenosine
  modified_base 29: mod_base = OTHER; note = 2'-O-Methyl-guanosine
  modified_base 30: mod_base = OTHER; note = 2'-O-Methyl-cytidine
  modified_base 31: mod_base = OTHER; note = 2'-O-Methyl-uridine
  modified_base 32: mod_base = OTHER; note = 2'-O-Methyl-adenosine
  modified_base 34: mod_base = OTHER; note = 2'-O-Methyl-adenosine
  modified_base 35: mod_base = OTHER; note = 2'-O-Methyl-adenosine
  modified_base 36: mod_base = OTHER; note = 2'-O-Methyl-adenosine
  modified_base 37: mod_base = OTHER; note = 2'-O-Methyl-uridine
  modified_base 38: mod_base = OTHER; note = 2'-O-Methyl-adenosine
  modified_base 39: mod_base = OTHER; note = 2'-O-Methyl-guanosine
  modified_base 40: mod_base = OTHER; note = 2'-O-Methyl-cytidine
  modified_base 41: mod_base = OTHER; note = 2'-O-Methyl-adenosine
  modified_base 42: mod_base = OTHER; note = 2'-O-Methyl-adenosine
  modified_base 46: mod_base = OTHER; note = 2'-O-Methyl-adenosine
  modified_base 48: mod_base = OTHER; note = 2'-O-Methyl-adenosine
  modified_base 50: mod_base = OTHER; note = 2'-O-Methyl-uridine
  modified_base 52: mod_base = OTHER; note = 2'-O-Methyl-adenosine
  modified_base 53: mod_base = OTHER; note = 2'-O-Methyl-guanosine
  modified_base 54: mod_base = OTHER; note = 2'-O-Methyl-guanosine
  modified_base 57: mod_base = OTHER; note = 2'-O-Methyl-adenosine
  modified_base 61: mod_base = OTHER; note = 2'-O-Methyl-cytidine
  modified_base 64: mod_base = OTHER; note = uridine phosphorothioate
  modified_base 66: mod_base = OTHER; note = 2'-O-Methyl-uridine
  modified_base 67: mod_base = OTHER; note = 2'-O-Methyl-cytidine
  modified_base 70: mod_base = OTHER; note = 2'-O-Methyl-cytidine
  modified_base 71: mod_base = OTHER; note = 2'-O-Methyl-uridine
  modified_base 72: mod_base = OTHER; note = 2'-O-Methyl-uridine
  modified_base 73: mod_base = OTHER; note = 2'-O-Methyl-guanosine
  modified_base 74: mod_base = OTHER; note = 2'-O-Methyl-adenosine
  modified_base 75: mod_base = OTHER; note = 2'-O-Methyl-adenosine
  modified_base 76: mod_base = OTHER; note = 2'-O-Methyl-adenosine
  modified_base 77: mod_base = OTHER; note = 2'-O-Methyl-adenosine
  modified_base 78: mod_base = OTHER; note = 2'-O-Methyl-adenosine
  modified_base 79: mod_base = OTHER; note = 2'-O-Methyl-guanosine
  modified_base 80: mod_base = OTHER; note = 2'-O-Methyl-uridine
  modified_base 82: mod_base = OTHER; note = 2'-O-Methyl-guanosine
  modified_base 83: mod_base = OTHER; note = 2'-O-Methyl-cytidine
  modified_base 84: mod_base = OTHER; note = 2'-O-Methyl-adenosine
  modified_base 85: mod_base = OTHER; note = 2'-O-Methyl-cytidine
  modified_base 86: mod_base = OTHER; note = 2'-O-Methyl-cytidine
  modified_base 87: mod_base = OTHER; note = 2'-O-Methyl-guanosine
  modified_base 89: mod_base = OTHER; note = 2'-O-Methyl-guanosine
  modified_base 92: mod_base = OTHER; note = 2'-O-Methyl-guanosine
  modified_base 93: mod_base = OTHER; note = 2'-O-Methyl-guanosine
  modified_base 94: mod_base = OTHER; note = 2'-O-Methyl-uridine
  modified_base 95: mod_base = OTHER; note = 2'-O-Methyl-guanosine
  modified_base 96: mod_base = OTHER; note = 2'-O-Methyl-cytidine
  modified_base 97: mod_base = OTHER; note = 2'-O-Methyl-uridine phosphorothioate
  modified_base 98: mod_base = OTHER; note = 2'-O-Methyl-uridine phosphorothioate
  modified_base 99: mod_base = OTHER; note = 2'-O-Methyl-uridine phosphorothioate
  modified_base 100: mod_base = OTHER; note = 2'-O-Methyl-uridine

SEQ ID NO: 2429 - RNA, 103 nt, synthetic construct; identical to SEQ ID NO: 1700
  source 1..103: mol_type = other RNA
  modified_base 1: mod_base = OTHER; note = 2'-O-Methyl-cytidine phosphorothioate
  modified_base 2: mod_base = OTHER; note = 2'-O-Methyl-adenosine phosphorothioate
  modified_base 3: mod_base = OTHER; note = 2'-O-Methyl-guanosine phosphorothioate
  modified_base 21: mod_base = OTHER; note = 2'-O-Methyl-guanosine
  modified_base 28: mod_base = OTHER; note = 2'-O-Methyl-adenosine
  modified_base 29: mod_base = OTHER; note = 2'-O-Methyl-guanosine
  modified_base 30: mod_base = OTHER; note = 2'-O-Methyl-cytidine
  modified_base 31: mod_base = OTHER; note = 2'-O-Methyl-uridine
  modified_base 32: mod_base = OTHER; note = 2'-O-Methyl-adenosine
  modified_base 34: mod_base = OTHER; note = 2'-O-Methyl-adenosine
  modified_base 35: mod_base = OTHER; note = 2'-O-Methyl-adenosine
  modified_base 36: mod_base = OTHER; note = 2'-O-Methyl-adenosine
  modified_base 37: mod_base = OTHER; note = 2'-O-Methyl-uridine
  modified_base 38: mod_base = OTHER; note = 2'-O-Methyl-adenosine
  modified_base 39: mod_base = OTHER; note = 2'-O-Methyl-guanosine
  modified_base 40: mod_base = OTHER; note = 2'-O-Methyl-cytidine
  modified_base 41: mod_base = OTHER; note = 2'-O-Methyl-adenosine
  modified_base 42: mod_base = OTHER; note = 2'-O-Methyl-adenosine
  modified_base 46: mod_base = OTHER; note = 2'-O-Methyl-adenosine
  modified_base 48: mod_base = OTHER; note = 2'-O-Methyl-adenosine
  modified_base 50: mod_base = OTHER; note = 2'-O-Methyl-uridine
  modified_base 52: mod_base = OTHER; note = 2'-O-Methyl-adenosine
  modified_base 53: mod_base = OTHER; note = 2'-O-Methyl-guanosine
  modified_base 54: mod_base = OTHER; note = 2'-O-Methyl-guanosine
  modified_base 57: mod_base = OTHER; note = 2'-O-Methyl-adenosine
  modified_base 61: mod_base = OTHER; note = 2'-O-Methyl-cytidine
  modified_base 64: mod_base = OTHER; note = uridine phosphorothioate
  modified_base 66: mod_base = OTHER; note = 2'-O-Methyl-uridine
  modified_base 67: mod_base = OTHER; note = 2'-O-Methyl-cytidine
  modified_base 70: mod_base = OTHER; note = 2'-O-Methyl-cytidine
  modified_base 71: mod_base = OTHER; note = 2'-O-Methyl-uridine
  modified_base 72: mod_base = OTHER; note = 2'-O-Methyl-uridine
  modified_base 73: mod_base = OTHER; note = 2'-O-Methyl-guanosine
  modified_base 74: mod_base = OTHER; note = 2'-O-Methyl-adenosine
  modified_base 75: mod_base = OTHER; note = 2'-O-Methyl-adenosine
  modified_base 76: mod_base = OTHER; note = 2'-O-Methyl-adenosine
  modified_base 77: mod_base = OTHER; note = 2'-O-Methyl-adenosine
  modified_base 78: mod_base = OTHER; note = 2'-O-Methyl-adenosine
  modified_base 79: mod_base = OTHER; note = 2'-O-Methyl-guanosine
  modified_base 80: mod_base = OTHER; note = 2'-O-Methyl-uridine
  modified_base 82: mod_base = OTHER; note = 2'-O-Methyl-guanosine
  modified_base 83: mod_base = OTHER; note = 2'-O-Methyl-cytidine
  modified_base 84: mod_base = OTHER; note = 2'-O-Methyl-adenosine
  modified_base 85: mod_base = OTHER; note = 2'-O-Methyl-cytidine
  modified_base 86: mod_base = OTHER; note = 2'-O-Methyl-cytidine
  modified_base 87: mod_base = OTHER; note = 2'-O-Methyl-guanosine
  modified_base 89: mod_base = OTHER; note = 2'-O-Methyl-guanosine
  modified_base 91: mod_base = OTHER; note = 2'-O-Methyl-cytidine
  modified_base 92: mod_base = OTHER; note = 2'-O-Methyl-guanosine
  modified_base 93: mod_base = OTHER; note = 2'-O-Methyl-guanosine
  modified_base 94: mod_base = OTHER; note = 2'-O-Methyl-uridine
  modified_base 95: mod_base = OTHER; note = 2'-O-Methyl-guanosine
  modified_base 96: mod_base = OTHER; note = 2'-O-Methyl-cytidine
  modified_base 97: mod_base = OTHER; note = 2'-O-Methyl-uridine phosphorothioate
  modified_base 98: mod_base = OTHER; note = 2'-O-Methyl-uridine phosphorothioate
  modified_base 99: mod_base = OTHER; note = 2'-O-Methyl-uridine phosphorothioate
  modified_base 100: mod_base = OTHER; note = 2'-O-Methyl-uridine

SEQ ID NO: 2430 - RNA, 103 nt, synthetic construct; identical to SEQ ID NO: 1700
  source 1..103: mol_type = other RNA
  modified_base 1: mod_base = OTHER; note = 2'-O-Methyl-cytidine phosphorothioate
  modified_base 2: mod_base = OTHER; note = 2'-O-Methyl-adenosine phosphorothioate
  modified_base 3: mod_base = OTHER; note = 2'-O-Methyl-guanosine phosphorothioate
  modified_base 21: mod_base = OTHER; note = 2'-O-Methyl-guanosine
  modified_base 28: mod_base = OTHER; note = 2'-O-Methyl-adenosine
  modified_base 29: mod_base = OTHER; note = 2'-O-Methyl-guanosine
  modified_base 30: mod_base = OTHER; note = 2'-O-Methyl-cytidine
  modified_base 31: mod_base = OTHER; note = 2'-O-Methyl-uridine
  modified_base 32: mod_base = OTHER; note = 2'-O-Methyl-adenosine
  modified_base 34: mod_base = OTHER; note = 2'-O-Methyl-adenosine
  modified_base 35: mod_base = OTHER; note = 2'-O-Methyl-adenosine
  modified_base 36: mod_base = OTHER; note = 2'-O-Methyl-adenosine
  modified_base 37: mod_base = OTHER; note = 2'-O-Methyl-uridine
  modified_base 38: mod_base = OTHER; note = 2'-O-Methyl-adenosine
  modified_base 39: mod_base = OTHER; note = 2'-O-Methyl-guanosine
  modified_base 40: mod_base = OTHER; note = 2'-O-Methyl-cytidine
  modified_base 41: mod_base = OTHER; note = 2'-O-Methyl-adenosine
  modified_base 42: mod_base = OTHER; note = 2'-O-Methyl-adenosine
  modified_base 46: mod_base = OTHER; note = 2'-O-Methyl-adenosine
  modified_base 48: mod_base = OTHER; note = 2'-O-Methyl-adenosine
  modified_base 50: mod_base = OTHER; note = 2'-O-Methyl-uridine
  modified_base 52: mod_base = OTHER; note = 2'-O-Methyl-adenosine
  modified_base 53: mod_base = OTHER; note = 2'-O-Methyl-guanosine
  modified_base 54: mod_base = OTHER; note = 2'-O-Methyl-guanosine
  modified_base 55: mod_base = OTHER; note = 2'-O-Methyl-cytidine
  modified_base 56: mod_base = OTHER; note = 2'-O-Methyl-uridine
  modified_base 57: mod_base = OTHER; note = 2'-O-Methyl-adenosine
  modified_base 60: mod_base = OTHER; note = 2'-O-Methyl-cytidine
  modified_base 61: mod_base = OTHER; note = 2'-O-Methyl-cytidine
  modified_base 64: mod_base = OTHER; note = uridine phosphorothioate
  modified_base 66: mod_base = OTHER; note = 2'-O-Methyl-uridine
  modified_base 67: mod_base = OTHER; note = 2'-O-Methyl-cytidine
  modified_base 70: mod_base = OTHER; note = 2'-O-Methyl-cytidine
  modified_base 71: mod_base = OTHER; note = 2'-O-Methyl-uridine
  modified_base 72: mod_base = OTHER; note = 2'-O-Methyl-uridine
  modified_base 74: mod_base = OTHER; note = 2'-O-Methyl-adenosine
  modified_base 75: mod_base = OTHER; note = 2'-O-Methyl-adenosine
  modified_base 76: mod_base = OTHER; note = 2'-O-Methyl-adenosine
  modified_base 77: mod_base = OTHER; note = 2'-O-Methyl-adenosine
  modified_base 78: mod_base = OTHER; note = 2'-O-Methyl-adenosine
  modified_base 79: mod_base = OTHER; note = 2'-O-Methyl-guanosine
  modified_base 80: mod_base = OTHER; note = 2'-O-Methyl-uridine
  modified_base 82: mod_base = OTHER; note = 2'-O-Methyl-guanosine
  modified_base 83: mod_base = OTHER; note = 2'-O-Methyl-cytidine
  modified_base 84: mod_base = OTHER; note = 2'-O-Methyl-adenosine
  modified_base 85: mod_base = OTHER; note = 2'-O-Methyl-cytidine
  modified_base 86: mod_base = OTHER; note = 2'-O-Methyl-cytidine
  modified_base 87: mod_base = OTHER; note = 2'-O-Methyl-guanosine
  modified_base 89: mod_base = OTHER; note = 2'-O-Methyl-guanosine
  modified_base 92: mod_base = OTHER; note = 2'-O-Methyl-guanosine
  modified_base 93: mod_base = OTHER; note = 2'-O-Methyl-guanosine
  modified_base 94: mod_base = OTHER; note = 2'-O-Methyl-uridine
  modified_base 95: mod_base = OTHER; note = 2'-O-Methyl-guanosine
  modified_base 96: mod_base = OTHER; note = 2'-O-Methyl-cytidine
  modified_base 97: mod_base = OTHER; note = 2'-O-Methyl-uridine phosphorothioate
  modified_base 98: mod_base = OTHER; note = 2'-O-Methyl-uridine phosphorothioate
  modified_base 99: mod_base = OTHER; note = 2'-O-Methyl-uridine phosphorothioate
  modified_base 100: mod_base = OTHER; note = 2'-O-Methyl-uridine

SEQ ID NO: 2431 - RNA, 103 nt, synthetic construct; identical to SEQ ID NO: 1643
  source 1..103: mol_type = other RNA
  modified_base 1: mod_base = OTHER; note = 2'-O-Methyl-cytidine phosphorothioate
  modified_base 2: mod_base = OTHER; note = 2'-O-Methyl-cytidine phosphorothioate
  modified_base 3: mod_base = OTHER; note = 2'-O-Methyl-cytidine phosphorothioate
  modified_base 21: mod_base = OTHER; note = 2'-O-Methyl-guanosine
  modified_base 28: mod_base = OTHER; note = 2'-O-Methyl-adenosine
  modified_base 29: mod_base = OTHER; note = 2'-O-Methyl-guanosine
  modified_base 30: mod_base = OTHER; note = 2'-O-Methyl-cytidine
  modified_base 31: mod_base = OTHER; note = 2'-O-Methyl-uridine
  modified_base 32: mod_base = OTHER; note = 2'-O-Methyl-adenosine
  modified_base 33: mod_base = OTHER; note = 2'-O-Methyl-guanosine
  modified_base 34: mod_base = OTHER; note = 2'-O-Methyl-adenosine
  modified_base 35: mod_base = OTHER; note = 2'-O-Methyl-adenosine
  modified_base 36: mod_base = OTHER; note = 2'-O-Methyl-adenosine
  modified_base 37: mod_base = OTHER; note = 2'-O-Methyl-uridine
  modified_base 38: mod_base = OTHER; note = 2'-O-Methyl-adenosine
  modified_base 39: mod_base = OTHER; note = 2'-O-Methyl-guanosine
  modified_base 40: mod_base = OTHER; note = 2'-O-Methyl-cytidine
  modified_base 41: mod_base = OTHER; note = 2'-O-Methyl-adenosine
  modified_base 42: mod_base = OTHER; note = 2'-O-Methyl-adenosine
  modified_base 45: mod_base = OTHER; note = uridine phosphorothioate
  modified_base 46: mod_base = OTHER; note = 2'-O-Methyl-adenosine
  modified_base 48: mod_base = OTHER; note = 2'-O-Methyl-adenosine
  modified_base 50: mod_base = OTHER; note = 2'-O-Methyl-uridine
  modified_base 52: mod_base = OTHER; note = 2'-O-Methyl-adenosine
  modified_base 53: mod_base = OTHER; note = 2'-O-Methyl-guanosine
  modified_base 54: mod_base = OTHER; note = 2'-O-Methyl-guanosine
  modified_base 55: mod_base = OTHER; note = 2'-O-Methyl-cytidine
  modified_base 56: mod_base = OTHER; note = 2'-O-Methyl-uridine
  modified_base 57: mod_base = OTHER; note = 2'-O-Methyl-adenosine
  modified_base 60: mod_base = OTHER; note = 2'-O-Methyl-cytidine
  modified_base 61: mod_base = OTHER; note = 2'-O-Methyl-cytidine
  modified_base 66: mod_base = OTHER; note = 2'-O-Methyl-uridine
  modified_base 67: mod_base = OTHER; note = 2'-O-Methyl-cytidine
  modified_base 70: mod_base = OTHER; note = 2'-O-Methyl-cytidine
  modified_base 71: mod_base = OTHER; note = 2'-O-Methyl-uridine
  modified_base 72: mod_base = OTHER; note = 2'-O-Methyl-uridine
  modified_base 73: mod_base = OTHER; note = 2'-O-Methyl-guanosine
  modified_base 74: mod_base = OTHER; note = 2'-O-Methyl-adenosine
  modified_base 75: mod_base = OTHER; note = 2'-O-Methyl-adenosine
  modified_base 76: mod_base = OTHER; note = 2'-O-Methyl-adenosine
  modified_base 77: mod_base = OTHER; note = 2'-O-Methyl-adenosine
  modified_base 78: mod_base = OTHER; note = 2'-O-Methyl-adenosine
  modified_base 79: mod_base = OTHER; note = 2'-O-Methyl-guanosine
  modified_base 80: mod_base = OTHER; note = 2'-O-Methyl-uridine
  modified_base 81: mod_base = OTHER; note = 2'-O-Methyl-guanosine
  modified_base 83: mod_base = OTHER; note = 2'-O-Methyl-cytidine
  modified_base 84: mod_base = OTHER; note = 2'-O-Methyl-adenosine
  modified_base 85: mod_base = OTHER; note = 2'-O-Methyl-cytidine
  modified_base 86: mod_base = OTHER; note = 2'-O-Methyl-cytidine
  modified_base 87: mod_base = OTHER; note = 2'-O-Methyl-guanosine
  modified_base 88: mod_base = OTHER; note = 2'-O-Methyl-adenosine
  modified_base 89: mod_base = OTHER; note = 2'-O-Methyl-guanosine
  modified_base 90: mod_base = OTHER; note = 2'-O-Methyl-uridine
  modified_base 91: mod_base = OTHER; note = 2'-O-Methyl-cytidine
  modified_base 92: mod_base = OTHER; note = 2'-O-Methyl-guanosine
  modified_base 93: mod_base = OTHER; note = 2'-O-Methyl-guanosine
  modified_base 94: mod_base = OTHER; note = 2'-O-Methyl-uridine
  modified_base 95: mod_base = OTHER; note = 2'-O-Methyl-guanosine
  modified_base 96: mod_base = OTHER; note = 2'-O-Methyl-cytidine
  modified_base 97: mod_base = OTHER; note = 2'-O-Methyl-uridine phosphorothioate
  modified_base 98: mod_base = OTHER; note = 2'-O-Methyl-uridine phosphorothioate
  modified_base 99: mod_base = OTHER; note = 2'-O-Methyl-uridine phosphorothioate
  modified_base 100: mod_base = OTHER; note = 2'-O-Methyl-uridine

SEQ ID NO: 2432 - RNA, 103 nt, synthetic construct; identical to SEQ ID NO: 1643
  source 1..103: mol_type = other RNA
  modified_base 1: mod_base = OTHER; note = 2'-O-Methyl-cytidine phosphorothioate
  modified_base 2: mod_base = OTHER; note = 2'-O-Methyl-cytidine phosphorothioate
  modified_base 3: mod_base = OTHER; note = 2'-O-Methyl-cytidine phosphorothioate
  modified_base 21: mod_base = OTHER; note = 2'-O-Methyl-guanosine
  modified_base 28: mod_base = OTHER; note = 2'-O-Methyl-adenosine
  modified_base 29: mod_base = OTHER; note = 2'-O-Methyl-guanosine
  modified_base 30: mod_base = OTHER; note = 2'-O-Methyl-cytidine
  modified_base 31: mod_base = OTHER; note = 2'-O-Methyl-uridine
  modified_base 32: mod_base = OTHER; note = 2'-O-Methyl-adenosine
  modified_base 34: mod_base = OTHER; note = 2'-O-Methyl-adenosine
  modified_base 35: mod_base = OTHER; note = 2'-O-Methyl-adenosine
  modified_base 36: mod_base = OTHER; note = 2'-O-Methyl-adenosine
  modified_base 37: mod_base = OTHER; note = 2'-O-Methyl-uridine
  modified_base 38: mod_base = OTHER; note = 2'-O-Methyl-adenosine
  modified_base 39: mod_base = OTHER; note = 2'-O-Methyl-guanosine
  modified_base 40: mod_base = OTHER; note = 2'-O-Methyl-cytidine
  modified_base 41: mod_base = OTHER; note = 2'-O-Methyl-adenosine
  modified_base 42: mod_base = OTHER; note = 2'-O-Methyl-adenosine
  modified_base 45: mod_base = OTHER; note = uridine phosphorothioate
  modified_base 46: mod_base = OTHER; note = 2'-O-Methyl-adenosine
  modified_base 48: mod_base = OTHER; note = 2'-O-Methyl-adenosine
  modified_base 50: mod_base = OTHER; note = 2'-O-Methyl-uridine
  modified_base 52: mod_base = OTHER; note = 2'-O-Methyl-adenosine
  modified_base 53: mod_base = OTHER; note = 2'-O-Methyl-guanosine
  modified_base 54: mod_base = OTHER; note = 2'-O-Methyl-guanosine
  modified_base 55: mod_base = OTHER; note = 2'-O-Methyl-cytidine
  modified_base 56: mod_base = OTHER; note = 2'-O-Methyl-uridine
  modified_base 57: mod_base = OTHER; note = 2'-O-Methyl-adenosine
  modified_base 60: mod_base = OTHER; note = 2'-O-Methyl-cytidine
  modified_base 61: mod_base = OTHER; note = 2'-O-Methyl-cytidine
  modified_base 66: mod_base = OTHER; note = 2'-O-Methyl-uridine
  modified_base 67: mod_base = OTHER; note = 2'-O-Methyl-cytidine
  modified_base 70: mod_base = OTHER; note = 2'-O-Methyl-cytidine
  modified_base 71: mod_base = OTHER; note = 2'-O-Methyl-uridine
  modified_base 72: mod_base = OTHER; note = 2'-O-Methyl-uridine
  modified_base 74: mod_base = OTHER; note = 2'-O-Methyl-adenosine
  modified_base 75: mod_base = OTHER; note = 2'-O-Methyl-adenosine
  modified_base 76: mod_base = OTHER; note = 2'-O-Methyl-adenosine
  modified_base 77: mod_base = OTHER; note = 2'-O-Methyl-adenosine
  modified_base 78: mod_base = OTHER; note = 2'-O-Methyl-adenosine
  modified_base 79: mod_base = OTHER; note = 2'-O-Methyl-guanosine
  modified_base 80: mod_base = OTHER; note = 2'-O-Methyl-uridine
  modified_base 81: mod_base = OTHER; note = 2'-O-Methyl-guanosine
  modified_base 83: mod_base = OTHER; note = 2'-O-Methyl-cytidine
  modified_base 84: mod_base = OTHER; note = 2'-O-Methyl-adenosine
  modified_base 85: mod_base = OTHER; note = 2'-O-Methyl-cytidine
  modified_base 86: mod_base = OTHER; note = 2'-O-Methyl-cytidine
  modified_base 87: mod_base = OTHER; note = 2'-O-Methyl-guanosine
  modified_base 88: mod_base = OTHER; note = 2'-O-Methyl-adenosine
  modified_base 89: mod_base = OTHER; note = 2'-O-Methyl-guanosine
  modified_base 90: mod_base = OTHER; note = 2'-O-Methyl-uridine
  modified_base 91: mod_base = OTHER; note = 2'-O-Methyl-cytidine
  modified_base 92: mod_base = OTHER; note = 2'-O-Methyl-guanosine
  modified_base 93: mod_base = OTHER; note = 2'-O-Methyl-guanosine
  modified_base 94: mod_base = OTHER; note = 2'-O-Methyl-uridine
  modified_base 95: mod_base = OTHER; note = 2'-O-Methyl-guanosine
  modified_base 96: mod_base = OTHER; note = 2'-O-Methyl-cytidine
  modified_base 97: mod_base = OTHER; note = 2'-O-Methyl-uridine phosphorothioate
  modified_base 98: mod_base = OTHER; note = 2'-O-Methyl-uridine phosphorothioate
  modified_base 99: mod_base = OTHER; note = 2'-O-Methyl-uridine phosphorothioate
  modified_base 100: mod_base = OTHER; note = 2'-O-Methyl-uridine

SEQ ID NO: 2433 - RNA, 103 nt, synthetic construct; identical to SEQ ID NO: 1699
  source 1..103: mol_type = other RNA
  modified_base 1: mod_base = OTHER; note = 2'-O-Methyl-guanosine phosphorothioate
  modified_base 2: mod_base = OTHER; note = 2'-O-Methyl-adenosine phosphorothioate
  modified_base 3: mod_base = OTHER; note = 2'-O-Methyl-guanosine phosphorothioate
  modified_base 21: mod_base = OTHER; note = 2'-O-Methyl-guanosine
  modified_base 28: mod_base = OTHER; note = 2'-O-Methyl-adenosine
  modified_base 29: mod_base = OTHER; note = 2'-O-Methyl-guanosine
  modified_base 30: mod_base = OTHER; note = 2'-O-Methyl-cytidine
  modified_base 31: mod_base = OTHER; note = 2'-O-Methyl-uridine
  modified_base 32: mod_base = OTHER; note = 2'-O-Methyl-adenosine
  modified_base 33: mod_base = OTHER; note = 2'-O-Methyl-guanosine
  modified_base 34: mod_base = OTHER; note = 2'-O-Methyl-adenosine
  modified_base 35: mod_base = OTHER; note = 2'-O-Methyl-adenosine
  modified_base 36: mod_base = OTHER; note = 2'-O-Methyl-adenosine
  modified_base 37: mod_base = OTHER; note = 2'-O-Methyl-uridine
  modified_base 38: mod_base = OTHER; note = 2'-O-Methyl-adenosine
  modified_base 39: mod_base = OTHER; note = 2'-O-Methyl-guanosine
  modified_base 40: mod_base = OTHER; note = 2'-O-Methyl-cytidine
  modified_base 41: mod_base = OTHER; note = 2'-O-Methyl-adenosine
  modified_base 42: mod_base = OTHER; note = 2'-O-Methyl-adenosine
  modified_base 45: mod_base = OTHER; note = uridine phosphorothioate
  modified_base 46: mod_base = OTHER; note = 2'-O-Methyl-adenosine
  modified_base 48: mod_base = OTHER; note = 2'-O-Methyl-adenosine
  modified_base 50: mod_base = OTHER; note = 2'-O-Methyl-uridine
  modified_base 52: mod_base = OTHER; note = 2'-O-Methyl-adenosine
  modified_base 53: mod_base = OTHER; note = 2'-O-Methyl-guanosine
  modified_base 54: mod_base = OTHER; note = 2'-O-Methyl-guanosine
  modified_base 55: mod_base = OTHER; note = 2'-O-Methyl-cytidine
  modified_base 56: mod_base = OTHER; note = 2'-O-Methyl-uridine
  modified_base 57: mod_base = OTHER; note = 2'-O-Methyl-adenosine
  modified_base 60: mod_base = OTHER; note = 2'-O-Methyl-cytidine
  modified_base 61: mod_base = OTHER; note = 2'-O-Methyl-cytidine
  modified_base 66: mod_base = OTHER; note = 2'-O-Methyl-uridine
  modified_base 67: mod_base = OTHER; note = 2'-O-Methyl-cytidine
  modified_base 70: mod_base = OTHER; note = 2'-O-Methyl-cytidine
  modified_base 71: mod_base = OTHER; note = 2'-O-Methyl-uridine
  modified_base 72: mod_base = OTHER; note = 2'-O-Methyl-uridine
  modified_base 73: mod_base = OTHER; note = 2'-O-Methyl-guanosine
  modified_base 74: mod_base = OTHER; note = 2'-O-Methyl-adenosine
  modified_base 75: mod_base = OTHER; note = 2'-O-Methyl-adenosine
  modified_base 76: mod_base = OTHER; note = 2'-O-Methyl-adenosine
  modified_base 77: mod_base = OTHER; note = 2'-O-Methyl-adenosine
  modified_base 78: mod_base = OTHER; note = 2'-O-Methyl-adenosine
  modified_base 79: mod_base = OTHER; note = 2'-O-Methyl-guanosine
  modified_base 80: mod_base = OTHER; note = 2'-O-Methyl-uridine
  modified_base 81: mod_base = OTHER; note = 2'-O-Methyl-guanosine
  modified_base 83: mod_base = OTHER; note = 2'-O-Methyl-cytidine
  modified_base 84: mod_base = OTHER; note = 2'-O-Methyl-adenosine
  modified_base 85: mod_base = OTHER; note = 2'-O-Methyl-cytidine
  modified_base 86: mod_base = OTHER; note = 2'-O-Methyl-cytidine
  modified_base 87: mod_base = OTHER; note = 2'-O-Methyl-guanosine
  modified_base 88: mod_base = OTHER; note = 2'-O-Methyl-adenosine
  modified_base 89: mod_base = OTHER; note = 2'-O-Methyl-guanosine
  modified_base 90: mod_base = OTHER; note = 2'-O-Methyl-uridine
  modified_base 91: mod_base = OTHER; note = 2'-O-Methyl-cytidine
  modified_base 92: mod_base = OTHER; note = 2'-O-Methyl-guanosine
  modified_base 93: mod_base = OTHER; note = 2'-O-Methyl-guanosine
  modified_base 94: mod_base = OTHER; note = 2'-O-Methyl-uridine
  modified_base 95: mod_base = OTHER; note = 2'-O-Methyl-guanosine
  modified_base 96: mod_base = OTHER; note = 2'-O-Methyl-cytidine
  modified_base 97: mod_base = OTHER; note = 2'-O-Methyl-uridine phosphorothioate
  modified_base 98: mod_base = OTHER; note = 2'-O-Methyl-uridine phosphorothioate
  modified_base 99: mod_base = OTHER; note = 2'-O-Methyl-uridine phosphorothioate
  modified_base 100: mod_base = OTHER; note = 2'-O-Methyl-uridine

SEQ ID NO: 2434 - RNA, 103 nt, synthetic construct; identical to SEQ ID NO: 1699
  source 1..103: mol_type = other RNA
  modified_base 1: mod_base = OTHER; note = 2'-O-Methyl-guanosine phosphorothioate
  modified_base 2: mod_base = OTHER; note = 2'-O-Methyl-adenosine phosphorothioate
  modified_base 3: mod_base = OTHER; note = 2'-O-Methyl-guanosine phosphorothioate
  modified_base 21: mod_base = OTHER; note = 2'-O-Methyl-guanosine
  modified_base 28: mod_base = OTHER; note = 2'-O-Methyl-adenosine
  modified_base 29: mod_base = OTHER; note = 2'-O-Methyl-guanosine
  modified_base 30: mod_base = OTHER; note = 2'-O-Methyl-cytidine
  modified_base 31: mod_base = OTHER; note = 2'-O-Methyl-uridine
  modified_base 32: mod_base = OTHER; note = 2'-O-Methyl-adenosine
  modified_base 34: mod_base = OTHER; note = 2'-O-Methyl-adenosine
  modified_base 35: mod_base = OTHER; note = 2'-O-Methyl-adenosine
  modified_base 36: mod_base = OTHER; note = 2'-O-Methyl-adenosine
  modified_base 37: mod_base = OTHER; note = 2'-O-Methyl-uridine
  modified_base 38: mod_base = OTHER; note = 2'-O-Methyl-adenosine
  modified_base 39: mod_base = OTHER; note = 2'-O-Methyl-guanosine
  modified_base 40: mod_base = OTHER; note = 2'-O-Methyl-cytidine
  modified_base 41: mod_base = OTHER; note = 2'-O-Methyl-adenosine
  modified_base 42: mod_base = OTHER; note = 2'-O-Methyl-adenosine
  modified_base 45: mod_base = OTHER; note = uridine phosphorothioate
  modified_base 46: mod_base = OTHER; note = 2'-O-Methyl-adenosine
  modified_base 48: mod_base = OTHER; note = 2'-O-Methyl-adenosine
  modified_base 50: mod_base = OTHER; note = 2'-O-Methyl-uridine
  modified_base 52: mod_base = OTHER; note = 2'-O-Methyl-adenosine
  modified_base 53: mod_base = OTHER; note = 2'-O-Methyl-guanosine
  modified_base 54: mod_base = OTHER; note = 2'-O-Methyl-guanosine
  modified_base 55: mod_base = OTHER; note = 2'-O-Methyl-cytidine
  modified_base 56: mod_base = OTHER; note = 2'-O-Methyl-uridine
  modified_base 57: mod_base = OTHER; note = 2'-O-Methyl-adenosine
  modified_base 60: mod_base = OTHER; note = 2'-O-Methyl-cytidine
  modified_base 61: mod_base = OTHER; note = 2'-O-Methyl-cytidine
  modified_base 66: mod_base = OTHER; note = 2'-O-Methyl-uridine
  modified_base 67: mod_base = OTHER; note = 2'-O-Methyl-cytidine
  modified_base 70: mod_base = OTHER; note = 2'-O-Methyl-cytidine
  modified_base 71: mod_base = OTHER; note = 2'-O-Methyl-uridine
  modified_base 72: mod_base = OTHER; note = 2'-O-Methyl-uridine
  modified_base 74: mod_base = OTHER; note = 2'-O-Methyl-adenosine
  modified_base 75: mod_base = OTHER; note = 2'-O-Methyl-adenosine
  modified_base 76: mod_base = OTHER; note = 2'-O-Methyl-adenosine
  modified_base 77: mod_base = OTHER; note = 2'-O-Methyl-adenosine
  modified_base 78: mod_base = OTHER; note = 2'-O-Methyl-adenosine
  modified_base 79: mod_base = OTHER; note = 2'-O-Methyl-guanosine
  modified_base 80: mod_base = OTHER; note = 2'-O-Methyl-uridine
  modified_base 81: mod_base = OTHER; note = 2'-O-Methyl-guanosine
  modified_base 83: mod_base = OTHER; note = 2'-O-Methyl-cytidine
  modified_base 84: mod_base = OTHER; note = 2'-O-Methyl-adenosine
  modified_base 85: mod_base = OTHER; note = 2'-O-Methyl-cytidine
  modified_base 86: mod_base = OTHER; note = 2'-O-Methyl-cytidine
  modified_base 87: mod_base = OTHER; note = 2'-O-Methyl-guanosine
  modified_base 88: mod_base = OTHER; note = 2'-O-Methyl-adenosine
  modified_base 89: mod_base = OTHER; note = 2'-O-Methyl-guanosine
  modified_base 90: mod_base = OTHER; note = 2'-O-Methyl-uridine
  modified_base 91: mod_base = OTHER; note = 2'-O-Methyl-cytidine
  modified_base 92: mod_base = OTHER; note = 2'-O-Methyl-guanosine
  modified_base 93: mod_base = OTHER; note = 2'-O-Methyl-guanosine
  modified_base 94: mod_base = OTHER; note = 2'-O-Methyl-uridine
  modified_base 95: mod_base = OTHER; note = 2'-O-Methyl-guanosine
  modified_base 96: mod_base = OTHER; note = 2'-O-Methyl-cytidine
  modified_base 97: mod_base = OTHER; note = 2'-O-Methyl-uridine phosphorothioate
  modified_base 98: mod_base = OTHER; note = 2'-O-Methyl-uridine phosphorothioate
  modified_base 99: mod_base = OTHER; note = 2'-O-Methyl-uridine phosphorothioate
  modified_base 100: mod_base = OTHER; note = 2'-O-Methyl-uridine

SEQ ID NO: 2435 - RNA, 103 nt, synthetic construct; identical to SEQ ID NO: 1700
  source 1..103: mol_type = other RNA
  modified_base 1: mod_base = OTHER; note = 2'-O-Methyl-cytidine phosphorothioate
  modified_base 2: mod_base = OTHER; note = 2'-O-Methyl-adenosine phosphorothioate
  modified_base 3: mod_base = OTHER; note = 2'-O-Methyl-guanosine phosphorothioate
  modified_base 21: mod_base = OTHER; note = 2'-O-Methyl-guanosine
  modified_base 28: mod_base = OTHER; note = 2'-O-Methyl-adenosine
  modified_base 29: mod_base = OTHER; note = 2'-O-Methyl-guanosine
  modified_base 30: mod_base = OTHER; note = 2'-O-Methyl-cytidine
  modified_base 31: mod_base = OTHER; note = 2'-O-Methyl-uridine
  modified_base 32: mod_base = OTHER; note = 2'-O-Methyl-adenosine
  modified_base 33: mod_base = OTHER; note = 2'-O-Methyl-guanosine
  modified_base 34: mod_base = OTHER; note = 2'-O-Methyl-adenosine
  modified_base 35: mod_base = OTHER; note = 2'-O-Methyl-adenosine
  modified_base 36: mod_base = OTHER; note = 2'-O-Methyl-adenosine
  modified_base 37: mod_base = OTHER; note = 2'-O-Methyl-uridine
  modified_base 38: mod_base = OTHER; note = 2'-O-Methyl-adenosine
  modified_base 39: mod_base = OTHER; note = 2'-O-Methyl-guanosine
  modified_base 40: mod_base = OTHER; note = 2'-O-Methyl-cytidine
  modified_base 41: mod_base = OTHER; note = 2'-O-Methyl-adenosine
  modified_base 42: mod_base = OTHER; note = 2'-O-Methyl-adenosine
  modified_base 45: mod_base = OTHER; note = uridine phosphorothioate
  modified_base 46: mod_base = OTHER; note = 2'-O-Methyl-adenosine
  modified_base 48: mod_base = OTHER; note = 2'-O-Methyl-adenosine
  modified_base 50: mod_base = OTHER; note = 2'-O-Methyl-uridine
  modified_base 52: mod_base = OTHER; note = 2'-O-Methyl-adenosine
  modified_base 53: mod_base = OTHER; note = 2'-O-Methyl-guanosine
  modified_base 54: mod_base = OTHER; note = 2'-O-Methyl-guanosine
  modified_base 57: mod_base = OTHER; note = 2'-O-Methyl-adenosine
  modified_base 61: mod_base = OTHER; note = 2'-O-Methyl-cytidine
  modified_base 66: mod_base = OTHER; note = 2'-O-Methyl-uridine
  modified_base 67: mod_base = OTHER; note = 2'-O-Methyl-cytidine
  modified_base 70: mod_base = OTHER; note = 2'-O-Methyl-cytidine
  modified_base 71: mod_base = OTHER; note = 2'-O-Methyl-uridine
  modified_base 72: mod_base = OTHER; note = 2'-O-Methyl-uridine
  modified_base 74: mod_base = OTHER; note = 2'-O-Methyl-adenosine
  modified_base 75: mod_base = OTHER; note = 2'-O-Methyl-adenosine
  modified_base 76: mod_base = OTHER; note = 2'-O-Methyl-adenosine
  modified_base 77: mod_base = OTHER; note = 2'-O-Methyl-adenosine
  modified_base 78: mod_base = OTHER; note = 2'-O-Methyl-adenosine
  modified_base 79: mod_base = OTHER; note = 2'-O-Methyl-guanosine
  modified_base 80: mod_base = OTHER; note = 2'-O-Methyl-uridine
  modified_base 82: mod_base = OTHER; note = 2'-O-Methyl-guanosine
  modified_base 83: mod_base = OTHER; note = 2'-O-Methyl-cytidine
  modified_base 84: mod_base = OTHER; note = 2'-O-Methyl-adenosine
  modified_base 85: mod_base = OTHER; note = 2'-O-Methyl-cytidine
  modified_base 86: mod_base = OTHER; note = 2'-O-Methyl-cytidine
  modified_base 87: mod_base = OTHER; note = 2'-O-Methyl-guanosine
  modified_base 89: mod_base = OTHER; note = 2'-O-Methyl-guanosine
  modified_base 92: mod_base = OTHER; note = 2'-O-Methyl-guanosine
  modified_base 93: mod_base = OTHER; note = 2'-O-Methyl-guanosine
  modified_base 94: mod_base = OTHER; note = 2'-O-Methyl-uridine
  modified_base 95: mod_base = OTHER; note = 2'-O-Methyl-guanosine
  modified_base 96: mod_base = OTHER; note = 2'-O-Methyl-cytidine
  modified_base 97: mod_base = OTHER; note = 2'-O-Methyl-uridine phosphorothioate
  modified_base 98: mod_base = OTHER; note = 2'-O-Methyl-uridine phosphorothioate
  modified_base 99: mod_base = OTHER; note = 2'-O-Methyl-uridine phosphorothioate
  modified_base 100: mod_base = OTHER; note = 2'-O-Methyl-uridine

SEQ ID NO: 2436 - RNA, 103 nt, synthetic construct; identical to SEQ ID NO: 1700
  source 1..103: mol_type = other RNA
  modified_base 1: mod_base = OTHER; note = 2'-O-Methyl-cytidine phosphorothioate
  modified_base 2: mod_base = OTHER; note = 2'-O-Methyl-adenosine phosphorothioate
  modified_base 3: mod_base = OTHER; note = 2'-O-Methyl-guanosine phosphorothioate
  modified_base 21: mod_base = OTHER; note = 2'-O-Methyl-guanosine
  modified_base 28: mod_base = OTHER; note = 2'-O-Methyl-adenosine
  modified_base 29: mod_base = OTHER; note = 2'-O-Methyl-guanosine
  modified_base 30: mod_base = OTHER; note = 2'-O-Methyl-cytidine
  modified_base 31: mod_base = OTHER; note = 2'-O-Methyl-uridine
  modified_base 32: mod_base = OTHER; note = 2'-O-Methyl-adenosine
  modified_base 33: mod_base = OTHER; note = 2'-O-Methyl-guanosine
  modified_base 34: mod_base = OTHER; note = 2'-O-Methyl-adenosine
  modified_base 35: mod_base = OTHER; note = 2'-O-Methyl-adenosine
  modified_base 36: mod_base = OTHER; note = 2'-O-Methyl-adenosine
  modified_base 37: mod_base = OTHER; note = 2'-O-Methyl-uridine
  modified_base 38: mod_base = OTHER; note = 2'-O-Methyl-adenosine
  modified_base 39: mod_base = OTHER; note = 2'-O-Methyl-guanosine
  modified_base 40: mod_base = OTHER; note = 2'-O-Methyl-cytidine
  modified_base 41: mod_base = OTHER; note = 2'-O-Methyl-adenosine
  modified_base 42: mod_base = OTHER; note = 2'-O-Methyl-adenosine
  modified_base 45: mod_base = OTHER; note = uridine phosphorothioate
  modified_base 46: mod_base = OTHER; note = 2'-O-Methyl-adenosine
  modified_base 48: mod_base = OTHER; note = 2'-O-Methyl-adenosine
  modified_base 50: mod_base = OTHER; note = 2'-O-Methyl-uridine
  modified_base 52: mod_base = OTHER; note = 2'-O-Methyl-adenosine
  modified_base 53: mod_base = OTHER; note = 2'-O-Methyl-guanosine
  modified_base 54: mod_base = OTHER; note = 2'-O-Methyl-guanosine
  modified_base 55: mod_base = OTHER; note = 2'-O-Methyl-cytidine
  modified_base 56: mod_base = OTHER; note = 2'-O-Methyl-uridine
  modified_base 57: mod_base = OTHER; note = 2'-O-Methyl-adenosine
  modified_base 60: mod_base = OTHER; note = 2'-O-Methyl-cytidine
  modified_base 61: mod_base = OTHER; note = 2'-O-Methyl-cytidine
  modified_base 66: mod_base = OTHER; note = 2'-O-Methyl-uridine
  modified_base 67: mod_base = OTHER; note = 2'-O-Methyl-cytidine
  modified_base 70: mod_base = OTHER; note = 2'-O-Methyl-cytidine
  modified_base 71: mod_base = OTHER; note = 2'-O-Methyl-uridine
  modified_base 72: mod_base = OTHER; note = 2'-O-Methyl-uridine
  modified_base 74: mod_base = OTHER; note = 2'-O-Methyl-adenosine
  modified_base 75: mod_base = OTHER; note = 2'-O-Methyl-adenosine
  modified_base 76: mod_base = OTHER; note = 2'-O-Methyl-adenosine
  modified_base 77: mod_base = OTHER; note = 2'-O-Methyl-adenosine
  modified_base 78: mod_base = OTHER; note = 2'-O-Methyl-adenosine
  modified_base 79: mod_base = OTHER; note = 2'-O-Methyl-guanosine
  modified_base 80: mod_base = OTHER; note = 2'-O-Methyl-uridine
  modified_base 82: mod_base = OTHER; note = 2'-O-Methyl-guanosine
  modified_base 83: mod_base = OTHER; note = 2'-O-Methyl-cytidine
  modified_base 84: mod_base = OTHER; note = 2'-O-Methyl-adenosine
  modified_base 85: mod_base = OTHER; note = 2'-O-Methyl-cytidine
  modified_base 86: mod_base = OTHER; note = 2'-O-Methyl-cytidine
  modified_base 87: mod_base = OTHER; note = 2'-O-Methyl-guanosine
  modified_base 89: mod_base = OTHER; note = 2'-O-Methyl-guanosine
  modified_base 92: mod_base = OTHER; note = 2'-O-Methyl-guanosine
  modified_base 93: mod_base = OTHER; note = 2'-O-Methyl-guanosine
  modified_base 94: mod_base = OTHER; note = 2'-O-Methyl-uridine
  modified_base 95: mod_base = OTHER; note = 2'-O-Methyl-guanosine
  modified_base 96: mod_base = OTHER; note = 2'-O-Methyl-cytidine
  modified_base 97: mod_base = OTHER; note = 2'-O-Methyl-uridine phosphorothioate
  modified_base 98: mod_base = OTHER; note = 2'-O-Methyl-uridine phosphorothioate
  modified_base 99: mod_base = OTHER; note = 2'-O-Methyl-uridine phosphorothioate
  modified_base 100: mod_base = OTHER; note = 2'-O-Methyl-uridine

SEQ ID NO: 2437 - RNA, 103 nt, synthetic construct; identical to SEQ ID NO: 1700
  source 1..103: mol_type = other RNA
  modified_base 1: mod_base = OTHER; note = 2'-O-Methyl-cytidine phosphorothioate
  modified_base 2: mod_base = OTHER; note = 2'-O-Methyl-adenosine phosphorothioate
  modified_base 3: mod_base = OTHER; note = 2'-O-Methyl-guanosine phosphorothioate
  modified_base 21: mod_base = OTHER; note = 2'-O-Methyl-guanosine
  modified_base 28: mod_base = OTHER; note = 2'-O-Methyl-adenosine
  modified_base 29: mod_base = OTHER; note = 2'-O-Methyl-guanosine
  modified_base 30: mod_base = OTHER; note = 2'-O-Methyl-cytidine
  modified_base 31: mod_base = OTHER; note = 2'-O-Methyl-uridine
  modified_base 32: mod_base = OTHER; note = 2'-O-Methyl-adenosine
  modified_base 33: mod_base = OTHER; note = 2'-O-Methyl-guanosine
  modified_base 34: mod_base = OTHER; note = 2'-O-Methyl-adenosine
  modified_base 35: mod_base = OTHER; note = 2'-O-Methyl-adenosine
  modified_base 36: mod_base = OTHER; note = 2'-O-Methyl-adenosine
  modified_base 37: mod_base = OTHER; note = 2'-O-Methyl-uridine
  modified_base 38: mod_base = OTHER; note = 2'-O-Methyl-adenosine
  modified_base 39: mod_base = OTHER; note = 2'-O-Methyl-guanosine
  modified_base 40: mod_base = OTHER; note = 2'-O-Methyl-cytidine
  modified_base 41: mod_base = OTHER; note = 2'-O-Methyl-adenosine
  modified_base 42: mod_base = OTHER; note = 2'-O-Methyl-adenosine
  modified_base 45: mod_base = OTHER; note = uridine phosphorothioate
  modified_base 46: mod_base = OTHER; note = 2'-O-Methyl-adenosine
  modified_base 48: mod_base = OTHER; note = 2'-O-Methyl-adenosine
  modified_base 50: mod_base = OTHER; note = 2'-O-Methyl-uridine
  modified_base 52: mod_base = OTHER; note = 2'-O-Methyl-adenosine
  modified_base 53: mod_base = OTHER; note = 2'-O-Methyl-guanosine
  modified_base 54: mod_base = OTHER; note = 2'-O-Methyl-guanosine
  modified_base 57: mod_base = OTHER; note = 2'-O-Methyl-adenosine
  modified_base 61: mod_base = OTHER; note = 2'-O-Methyl-cytidine
  modified_base 66: mod_base = OTHER; note = 2'-O-Methyl-uridine
  modified_base 67: mod_base = OTHER; note = 2'-O-Methyl-cytidine
  modified_base 70: mod_base = OTHER; note = 2'-O-Methyl-cytidine
  modified_base 71: mod_base = OTHER; note = 2'-O-Methyl-uridine
  modified_base 72: mod_base = OTHER; note = 2'-O-Methyl-uridine
  modified_base 73: mod_base = OTHER; note = 2'-O-Methyl-guanosine
  modified_base 74: mod_base = OTHER; note = 2'-O-Methyl-adenosine
  modified_base 75: mod_base = OTHER; note = 2'-O-Methyl-adenosine
  modified_base 76: mod_base = OTHER; note = 2'-O-Methyl-adenosine
  modified_base 77: mod_base = OTHER; note = 2'-O-Methyl-adenosine
  modified_base 78: mod_base = OTHER; note = 2'-O-Methyl-adenosine
  modified_base 79: mod_base = OTHER; note = 2'-O-Methyl-guanosine
  modified_base 80: mod_base = OTHER; note = 2'-O-Methyl-uridine
  modified_base 82: mod_base = OTHER; note = 2'-O-Methyl-guanosine
  modified_base 83: mod_base = OTHER; note = 2'-O-Methyl-cytidine
  modified_base 84: mod_base = OTHER; note = 2'-O-Methyl-adenosine
  modified_base 85: mod_base = OTHER; note = 2'-O-Methyl-cytidine
  modified_base 86: mod_base = OTHER; note = 2'-O-Methyl-cytidine
  modified_base 87: mod_base = OTHER; note = 2'-O-Methyl-guanosine
  modified_base 89: mod_base = OTHER; note = 2'-O-Methyl-guanosine
  modified_base 92: mod_base = OTHER; note = 2'-O-Methyl-guanosine
  modified_base 93: mod_base = OTHER; note = 2'-O-Methyl-guanosine
  modified_base 94: mod_base = OTHER; note = 2'-O-Methyl-uridine
  modified_base 95: mod_base = OTHER; note = 2'-O-Methyl-guanosine
  modified_base 96: mod_base = OTHER; note = 2'-O-Methyl-cytidine
  modified_base 97: mod_base = OTHER; note = 2'-O-Methyl-uridine phosphorothioate
  modified_base 98: mod_base = OTHER; note = 2'-O-Methyl-uridine phosphorothioate
  modified_base 99: mod_base = OTHER; note = 2'-O-Methyl-uridine phosphorothioate
  modified_base 100: mod_base = OTHER; note = 2'-O-Methyl-uridine

SEQ ID NO: 2438 - RNA, 103 nt, synthetic construct; identical to SEQ ID NO: 1700
  source 1..103: mol_type = other RNA
  modified_base 1: mod_base = OTHER; note = 2'-O-Methyl-cytidine phosphorothioate
  modified_base 2: mod_base = OTHER; note = 2'-O-Methyl-adenosine phosphorothioate
  modified_base 3: mod_base = OTHER; note = 2'-O-Methyl-guanosine phosphorothioate
  modified_base 21: mod_base = OTHER; note = 2'-O-Methyl-guanosine
  modified_base 28: mod_base = OTHER; note = 2'-O-Methyl-adenosine
  modified_base 29: mod_base = OTHER; note = 2'-O-Methyl-guanosine
  modified_base 30: mod_base = OTHER; note = 2'-O-Methyl-cytidine
  modified_base 31: mod_base = OTHER; note = 2'-O-Methyl-uridine
  modified_base 32: mod_base = OTHER; note = 2'-O-Methyl-adenosine
  modified_base 33: mod_base = OTHER; note = 2'-O-Methyl-guanosine
  modified_base 34: mod_base = OTHER; note = 2'-O-Methyl-adenosine
  modified_base 35: mod_base = OTHER; note = 2'-O-Methyl-adenosine
  modified_base 36: mod_base = OTHER; note = 2'-O-Methyl-adenosine
  modified_base 37: mod_base = OTHER; note = 2'-O-Methyl-uridine
  modified_base 38: mod_base = OTHER; note = 2'-O-Methyl-adenosine
  modified_base 39: mod_base = OTHER; note = 2'-O-Methyl-guanosine
  modified_base 40: mod_base = OTHER; note = 2'-O-Methyl-cytidine
  modified_base 41: mod_base = OTHER; note = 2'-O-Methyl-adenosine
  modified_base 42: mod_base = OTHER; note = 2'-O-Methyl-adenosine
  modified_base 45: mod_base = OTHER; note = uridine phosphorothioate
  modified_base 46: mod_base = OTHER; note = 2'-O-Methyl-adenosine
  modified_base 48: mod_base = OTHER; note = 2'-O-Methyl-adenosine
  modified_base 50: mod_base = OTHER; note = 2'-O-Methyl-uridine
  modified_base 52: mod_base = OTHER; note = 2'-O-Methyl-adenosine
  modified_base 53: mod_base = OTHER; note = 2'-O-Methyl-guanosine
  modified_base 54: mod_base = OTHER; note = 2'-O-Methyl-guanosine
  modified_base 57: mod_base = OTHER; note = 2'-O-Methyl-adenosine
  modified_base 61: mod_base = OTHER; note = 2'-O-Methyl-cytidine
  modified_base 66: mod_base = OTHER; note = 2'-O-Methyl-uridine
  modified_base 67: mod_base = OTHER; note = 2'-O-Methyl-cytidine
  modified_base 70: mod_base = OTHER; note = 2'-O-Methyl-cytidine
  modified_base 71: mod_base = OTHER; note = 2'-O-Methyl-uridine
  modified_base 72: mod_base = OTHER; note = 2'-O-Methyl-uridine
  modified_base 73: mod_base = OTHER; note = 2'-O-Methyl-guanosine
  modified_base 74: mod_base = OTHER; note = 2'-O-Methyl-adenosine
  modified_base 75: mod_base = OTHER; note = 2'-O-Methyl-adenosine
  modified_base 76: mod_base = OTHER; note = 2'-O-Methyl-adenosine
  modified_base 77: mod_base = OTHER; note = 2'-O-Methyl-adenosine
  modified_base 78: mod_base = OTHER; note = 2'-O-Methyl-adenosine
  modified_base 79: mod_base = OTHER; note = 2'-O-Methyl-guanosine
  modified_base 80: mod_base = OTHER; note = 2'-O-Methyl-uridine
  modified_base 82: mod_base = OTHER; note = 2'-O-Methyl-guanosine
  modified_base 83: mod_base = OTHER; note = 2'-O-Methyl-cytidine
  modified_base 84: mod_base = OTHER; note = 2'-O-Methyl-adenosine
  modified_base 85: mod_base = OTHER; note = 2'-O-Methyl-cytidine
  modified_base 86: mod_base = OTHER; note = 2'-O-Methyl-cytidine
  modified_base 87: mod_base = OTHER; note = 2'-O-Methyl-guanosine
  modified_base 89: mod_base = OTHER; note = 2'-O-Methyl-guanosine
  modified_base 91: mod_base = OTHER; note = 2'-O-Methyl-cytidine
  modified_base 92: mod_base = OTHER; note = 2'-O-Methyl-guanosine
  modified_base 93: mod_base = OTHER; note = 2'-O-Methyl-guanosine
  modified_base 94: mod_base = OTHER; note = 2'-O-Methyl-uridine
  modified_base 95: mod_base = OTHER; note = 2'-O-Methyl-guanosine
  modified_base 96: mod_base = OTHER; note = 2'-O-Methyl-cytidine
  modified_base 97: mod_base = OTHER; note = 2'-O-Methyl-uridine phosphorothioate
  modified_base 98: mod_base = OTHER; note = 2'-O-Methyl-uridine phosphorothioate
  modified_base 99: mod_base = OTHER; note = 2'-O-Methyl-uridine phosphorothioate
  modified_base 100: mod_base = OTHER; note = 2'-O-Methyl-uridine

SEQ ID NO: 2439 - RNA, 103 nt, synthetic construct; identical to SEQ ID NO: 1700
  source 1..103: mol_type = other RNA
  modified_base 1: mod_base = OTHER; note = 2'-O-Methyl-cytidine phosphorothioate
  modified_base 2: mod_base = OTHER; note = 2'-O-Methyl-adenosine phosphorothioate
  modified_base 3: mod_base = OTHER; note = 2'-O-Methyl-guanosine phosphorothioate
  modified_base 21: mod_base = OTHER; note = 2'-O-Methyl-guanosine
  modified_base 28: mod_base = OTHER; note = 2'-O-Methyl-adenosine
  modified_base 29: mod_base = OTHER; note = 2'-O-Methyl-guanosine
  modified_base 30: mod_base = OTHER; note = 2'-O-Methyl-cytidine
  modified_base 31: mod_base = OTHER; note = 2'-O-Methyl-uridine
  modified_base 32: mod_base = OTHER; note = 2'-O-Methyl-adenosine
  modified_base 34: mod_base = OTHER; note = 2'-O-Methyl-adenosine
  modified_base 35: mod_base = OTHER; note = 2'-O-Methyl-adenosine
  modified_base 36: mod_base = OTHER; note = 2'-O-Methyl-adenosine
  modified_base 37: mod_base = OTHER; note = 2'-O-Methyl-uridine
  modified_base 38: mod_base = OTHER; note = 2'-O-Methyl-adenosine
  modified_base 39: mod_base = OTHER; note = 2'-O-Methyl-guanosine
  modified_base 40: mod_base = OTHER; note = 2'-O-Methyl-cytidine
  modified_base 41: mod_base = OTHER; note = 2'-O-Methyl-adenosine
  modified_base 42: mod_base = OTHER; note = 2'-O-Methyl-adenosine
  modified_base 45: mod_base = OTHER; note = uridine phosphorothioate
  modified_base 46: mod_base = OTHER; note = 2'-O-Methyl-adenosine
  modified_base 48: mod_base = OTHER; note = 2'-O-Methyl-adenosine
  modified_base 50: mod_base = OTHER; note = 2'-O-Methyl-uridine
  modified_base 52: mod_base = OTHER; note = 2'-O-Methyl-adenosine
  modified_base 53: mod_base = OTHER; note = 2'-O-Methyl-guanosine
  modified_base 54: mod_base = OTHER; note = 2'-O-Methyl-guanosine
  modified_base 57: mod_base = OTHER; note = 2'-O-Methyl-adenosine
  modified_base 61: mod_base = OTHER; note = 2'-O-Methyl-cytidine
  modified_base 66: mod_base = OTHER; note = 2'-O-Methyl-uridine
  modified_base 67: mod_base = OTHER; note = 2'-O-Methyl-cytidine
  modified_base 70: mod_base = OTHER; note = 2'-O-Methyl-cytidine
  modified_base 71: mod_base = OTHER; note = 2'-O-Methyl-uridine
  modified_base 72: mod_base = OTHER; note = 2'-O-Methyl-uridine
  modified_base 73: mod_base = OTHER; note = 2'-O-Methyl-guanosine
  modified_base 74: mod_base = OTHER; note = 2'-O-Methyl-adenosine
  modified_base 75: mod_base = OTHER; note = 2'-O-Methyl-adenosine
  modified_base 76: mod_base = OTHER; note = 2'-O-Methyl-adenosine
  modified_base 77: mod_base = OTHER; note = 2'-O-Methyl-adenosine
  modified_base 78: mod_base = OTHER; note = 2'-O-Methyl-adenosine
  modified_base 79: mod_base = OTHER; note = 2'-O-Methyl-guanosine
  modified_base 80: mod_base = OTHER; note = 2'-O-Methyl-uridine
  modified_base 82: mod_base = OTHER; note = 2'-O-Methyl-guanosine
  modified_base 83: mod_base = OTHER; note = 2'-O-Methyl-cytidine
  modified_base 84: mod_base = OTHER; note = 2'-O-Methyl-adenosine
  modified_base 85: mod_base = OTHER; note = 2'-O-Methyl-cytidine
  modified_base 86: mod_base = OTHER; note = 2'-O-Methyl-cytidine
  modified_base 87: mod_base = OTHER; note = 2'-O-Methyl-guanosine
  modified_base 89: mod_base = OTHER; note = 2'-O-Methyl-guanosine
  modified_base 92: mod_base = OTHER; note = 2'-O-Methyl-guanosine
  modified_base 93: mod_base = OTHER; note = 2'-O-Methyl-guanosine
  modified_base 94: mod_base = OTHER; note = 2'-O-Methyl-uridine
  modified_base 95: mod_base = OTHER; note = 2'-O-Methyl-guanosine
  modified_base 96: mod_base = OTHER; note = 2'-O-Methyl-cytidine
  modified_base 97: mod_base = OTHER; note = 2'-O-Methyl-uridine phosphorothioate
  modified_base 98: mod_base = OTHER; note = 2'-O-Methyl-uridine phosphorothioate
  modified_base 99: mod_base = OTHER; note = 2'-O-Methyl-uridine phosphorothioate
  modified_base 100: mod_base = OTHER; note = 2'-O-Methyl-uridine

SEQ ID NO: 2440 - RNA, 103 nt, synthetic construct; identical to SEQ ID NO: 1700
  source 1..103: mol_type = other RNA
  modified_base 1: mod_base = OTHER; note = 2'-O-Methyl-cytidine phosphorothioate
  modified_base 2: mod_base = OTHER; note = 2'-O-Methyl-adenosine phosphorothioate
  modified_base 3: mod_base = OTHER; note = 2'-O-Methyl-guanosine phosphorothioate
  modified_base 21: mod_base = OTHER; note = 2'-O-Methyl-guanosine
  modified_base 28: mod_base = OTHER; note = 2'-O-Methyl-adenosine
  modified_base 29: mod_base = OTHER; note = 2'-O-Methyl-guanosine
  modified_base 30: mod_base = OTHER; note = 2'-O-Methyl-cytidine
  modified_base 31: mod_base = OTHER; note = 2'-O-Methyl-uridine
  modified_base 32: mod_base = OTHER; note = 2'-O-Methyl-adenosine
  modified_base 34: mod_base = OTHER; note = 2'-O-Methyl-adenosine
  modified_base 35: mod_base = OTHER; note = 2'-O-Methyl-adenosine
  modified_base 36: mod_base = OTHER; note = 2'-O-Methyl-adenosine
  modified_base 37: mod_base = OTHER; note = 2'-O-Methyl-uridine
  modified_base 38: mod_base = OTHER; note = 2'-O-Methyl-adenosine
  modified_base 39: mod_base = OTHER; note = 2'-O-Methyl-guanosine
  modified_base 40: mod_base = OTHER; note = 2'-O-Methyl-cytidine
  modified_base 41: mod_base = OTHER; note = 2'-O-Methyl-adenosine
  modified_base 42: mod_base = OTHER; note = 2'-O-Methyl-adenosine
  modified_base 45: mod_base = OTHER; note = uridine phosphorothioate
  modified_base 46: mod_base = OTHER; note = 2'-O-Methyl-adenosine
  modified_base 48: mod_base = OTHER; note = 2'-O-Methyl-adenosine
  modified_base 50: mod_base = OTHER; note = 2'-O-Methyl-uridine
  modified_base 52: mod_base = OTHER; note = 2'-O-Methyl-adenosine
  modified_base 53: mod_base = OTHER; note = 2'-O-Methyl-guanosine
  modified_base 54: mod_base = OTHER; note = 2'-O-Methyl-guanosine
  modified_base 57: mod_base = OTHER; note = 2'-O-Methyl-adenosine
  modified_base 61: mod_base = OTHER; note = 2'-O-Methyl-cytidine
  modified_base 66: mod_base = OTHER; note = 2'-O-Methyl-uridine
  modified_base 67: mod_base = OTHER; note = 2'-O-Methyl-cytidine
  modified_base 70: mod_base = OTHER; note = 2'-O-Methyl-cytidine
  modified_base 71: mod_base = OTHER; note = 2'-O-Methyl-uridine
  modified_base 72: mod_base = OTHER; note = 2'-O-Methyl-uridine
  modified_base 73: mod_base = OTHER; note = 2'-O-Methyl-guanosine
  modified_base 74: mod_base = OTHER; note = 2'-O-Methyl-adenosine
  modified_base 75: mod_base = OTHER; note = 2'-O-Methyl-adenosine
  modified_base 76: mod_base = OTHER; note = 2'-O-Methyl-adenosine
  modified_base 77: mod_base = OTHER; note = 2'-O-Methyl-adenosine
  modified_base 78: mod_base = OTHER; note = 2'-O-Methyl-adenosine
  modified_base 79: mod_base = OTHER; note = 2'-O-Methyl-guanosine
  modified_base 80: mod_base = OTHER; note = 2'-O-Methyl-uridine
  modified_base 82: mod_base = OTHER; note = 2'-O-Methyl-guanosine
  modified_base 83: mod_base = OTHER; note = 2'-O-Methyl-cytidine
  modified_base 84: mod_base = OTHER; note = 2'-O-Methyl-adenosine
  modified_base 85: mod_base = OTHER; note = 2'-O-Methyl-cytidine
  modified_base 86: mod_base = OTHER; note = 2'-O-Methyl-cytidine
  modified_base 87: mod_base = OTHER; note = 2'-O-Methyl-guanosine
  modified_base 89: mod_base = OTHER; note = 2'-O-Methyl-guanosine
  modified_base 91: mod_base = OTHER; note = 2'-O-Methyl-cytidine
  modified_base 92: mod_base = OTHER; note = 2'-O-Methyl-guanosine
  modified_base 93: mod_base = OTHER; note = 2'-O-Methyl-guanosine
  modified_base 94: mod_base = OTHER; note = 2'-O-Methyl-uridine
  modified_base 95: mod_base = OTHER; note = 2'-O-Methyl-guanosine
  modified_base 96: mod_base = OTHER; note = 2'-O-Methyl-cytidine
  modified_base 97: mod_base = OTHER; note = 2'-O-Methyl-uridine phosphorothioate
  modified_base 98: mod_base = OTHER; note = 2'-O-Methyl-uridine phosphorothioate
  modified_base 99: mod_base = OTHER; note = 2'-O-Methyl-uridine phosphorothioate
  modified_base 100: mod_base = OTHER; note = 2'-O-Methyl-uridine

SEQ ID NO: 2441 - RNA, 103 nt, synthetic construct; identical to SEQ ID NO: 1700
  source 1..103: mol_type = other RNA
  modified_base 1: mod_base = OTHER; note = 2'-O-Methyl-cytidine phosphorothioate
  modified_base 2: mod_base = OTHER; note = 2'-O-Methyl-adenosine phosphorothioate
  modified_base 3: mod_base = OTHER; note = 2'-O-Methyl-guanosine phosphorothioate
  modified_base 21: mod_base = OTHER; note = 2'-O-Methyl-guanosine
  modified_base 28: mod_base = OTHER; note = 2'-O-Methyl-adenosine
  modified_base 29: mod_base = OTHER; note = 2'-O-Methyl-guanosine
  modified_base 30: mod_base = OTHER; note = 2'-O-Methyl-cytidine
  modified_base 31: mod_base = OTHER; note = 2'-O-Methyl-uridine
  modified_base 32: mod_base = OTHER; note = 2'-O-Methyl-adenosine
  modified_base 34: mod_base = OTHER; note = 2'-O-Methyl-adenosine
  modified_base 35: mod_base = OTHER; note = 2'-O-Methyl-adenosine
  modified_base 36: mod_base = OTHER; note = 2'-O-Methyl-adenosine
  modified_base 37: mod_base = OTHER; note = 2'-O-Methyl-uridine
  modified_base 38: mod_base = OTHER; note = 2'-O-Methyl-adenosine
  modified_base 39: mod_base = OTHER; note = 2'-O-Methyl-guanosine
  modified_base 40: mod_base = OTHER; note = 2'-O-Methyl-cytidine
  modified_base 41: mod_base = OTHER; note = 2'-O-Methyl-adenosine
  modified_base 42: mod_base = OTHER; note = 2'-O-Methyl-adenosine
  modified_base 45: mod_base = OTHER; note = uridine phosphorothioate
  modified_base 46: mod_base = OTHER; note = 2'-O-Methyl-adenosine
  modified_base 48: mod_base = OTHER; note = 2'-O-Methyl-adenosine
  modified_base 50: mod_base = OTHER; note = 2'-O-Methyl-uridine
  modified_base 52: mod_base = OTHER; note = 2'-O-Methyl-adenosine
  modified_base 53: mod_base = OTHER; note = 2'-O-Methyl-guanosine
  modified_base 54: mod_base = OTHER; note = 2'-O-Methyl-guanosine
  modified_base 55: mod_base = OTHER; note = 2'-O-Methyl-cytidine
  modified_base 56: mod_base = OTHER; note = 2'-O-Methyl-uridine
  modified_base 57: mod_base = OTHER; note = 2'-O-Methyl-adenosine
  modified_base 60: mod_base = OTHER; note = 2'-O-Methyl-cytidine
  modified_base 61: mod_base = OTHER; note = 2'-O-Methyl-cytidine
  modified_base 66: mod_base = OTHER; note = 2'-O-Methyl-uridine
  modified_base 67: mod_base = OTHER; note = 2'-O-Methyl-cytidine
  modified_base 70: mod_base = OTHER; note = 2'-O-Methyl-cytidine
  modified_base 71: mod_base = OTHER; note = 2'-O-Methyl-uridine
  modified_base 72: mod_base = OTHER; note = 2'-O-Methyl-uridine
  modified_base 74: mod_base = OTHER; note = 2'-O-Methyl-adenosine
  modified_base 75: mod_base = OTHER; note = 2'-O-Methyl-adenosine
  modified_base 76: mod_base = OTHER; note = 2'-O-Methyl-adenosine
  modified_base 77: mod_base = OTHER; note = 2'-O-Methyl-adenosine
  modified_base 78: mod_base = OTHER; note = 2'-O-Methyl-adenosine
  modified_base 79: mod_base = OTHER; note = 2'-O-Methyl-guanosine
  modified_base 80: mod_base = OTHER; note = 2'-O-Methyl-uridine
  modified_base 82: mod_base = OTHER; note = 2'-O-Methyl-guanosine
  modified_base 83: mod_base = OTHER; note = 2'-O-Methyl-cytidine
  modified_base 84: mod_base = OTHER; note = 2'-O-Methyl-adenosine
  modified_base 85: mod_base = OTHER; note = 2'-O-Methyl-cytidine
  modified_base 86: mod_base = OTHER; note = 2'-O-Methyl-cytidine
  modified_base 87: mod_base = OTHER; note = 2'-O-Methyl-guanosine
  modified_base 89: mod_base = OTHER; note = 2'-O-Methyl-guanosine
  modified_base 92: mod_base = OTHER; note = 2'-O-Methyl-guanosine
  modified_base 93: mod_base = OTHER; note = 2'-O-Methyl-guanosine
  modified_base 94: mod_base = OTHER; note = 2'-O-Methyl-uridine
  modified_base 95: mod_base = OTHER; note = 2'-O-Methyl-guanosine
  modified_base 96: mod_base = OTHER; note = 2'-O-Methyl-cytidine
  modified_base 97: mod_base = OTHER; note = 2'-O-Methyl-uridine phosphorothioate
  modified_base 98: mod_base = OTHER; note = 2'-O-Methyl-uridine phosphorothioate
  modified_base 99: mod_base = OTHER; note = 2'-O-Methyl-uridine phosphorothioate
  modified_base 100: mod_base = OTHER; note = 2'-O-Methyl-uridine

SEQ ID NO: 2442 - RNA, 103 nt, synthetic construct; identical to SEQ ID NO: 1643
  source 1..103: mol_type = other RNA
  modified_base 1: mod_base = OTHER; note = 2'-O-Methyl-cytidine phosphorothioate
  modified_base 2: mod_base = OTHER; note = 2'-O-Methyl-cytidine phosphorothioate
  modified_base 3: mod_base = OTHER; note = 2'-O-Methyl-cytidine phosphorothioate
  modified_base 21: mod_base = OTHER; note = 2'-O-Methyl-guanosine
  modified_base 25: mod_base = OTHER; note = uridine phosphorothioate
  modified_base 28: mod_base = OTHER; note = 2'-O-Methyl-adenosine
  modified_base 29: mod_base = OTHER; note = 2'-O-Methyl-guanosine
  modified_base 30: mod_base = OTHER; note = 2'-O-Methyl-cytidine
  modified_base 31: mod_base = OTHER; note = 2'-O-Methyl-uridine
  modified_base 32: mod_base = OTHER; note = 2'-O-Methyl-adenosine
  modified_base 33: mod_base = OTHER; note = 2'-O-Methyl-guanosine
  modified_base 34: mod_base = OTHER; note = 2'-O-Methyl-adenosine
  modified_base 35: mod_base = OTHER; note = 2'-O-Methyl-adenosine
  modified_base 36: mod_base = OTHER; note = 2'-O-Methyl-adenosine
  modified_base 37: mod_base = OTHER; note = 2'-O-Methyl-uridine
  modified_base 38: mod_base = OTHER; note = 2'-O-Methyl-adenosine
  modified_base 39: mod_base = OTHER; note = 2'-O-Methyl-guanosine
  modified_base 40: mod_base = OTHER; note = 2'-O-Methyl-cytidine
  modified_base 41: mod_base = OTHER; note = 2'-O-Methyl-adenosine
  modified_base 42: mod_base = OTHER; note = 2'-O-Methyl-adenosine
  modified_base 46: mod_base = OTHER; note = 2'-O-Methyl-adenosine
  modified_base 48: mod_base = OTHER; note = 2'-O-Methyl-adenosine
  modified_base 50: mod_base = OTHER; note = 2'-O-Methyl-uridine
  modified_base 52: mod_base = OTHER; note = 2'-O-Methyl-adenosine
  modified_base 53: mod_base = OTHER; note = 2'-O-Methyl-guanosine
  modified_base 54: mod_base = OTHER; note = 2'-O-Methyl-guanosine
  modified_base 55: mod_base = OTHER; note = 2'-O-Methyl-cytidine
  modified_base 56: mod_base = OTHER; note = 2'-O-Methyl-uridine
  modified_base 57: mod_base = OTHER; note = 2'-O-Methyl-adenosine
  modified_base 60: mod_base = OTHER; note = 2'-O-Methyl-cytidine
  modified_base 61: mod_base = OTHER; note = 2'-O-Methyl-cytidine
  modified_base 66: mod_base = OTHER; note = 2'-O-Methyl-uridine
  modified_base 67: mod_base = OTHER; note = 2'-O-Methyl-cytidine
  modified_base 70: mod_base = OTHER; note = 2'-O-Methyl-cytidine
  modified_base 71: mod_base = OTHER; note = 2'-O-Methyl-uridine
  modified_base 72: mod_base = OTHER; note = 2'-O-Methyl-uridine
  modified_base 73: mod_base = OTHER; note = 2'-O-Methyl-guanosine
  modified_base 74: mod_base = OTHER; note = 2'-O-Methyl-adenosine
  modified_base 75: mod_base = OTHER; note = 2'-O-Methyl-adenosine
  modified_base 76: mod_base = OTHER; note = 2'-O-Methyl-adenosine
  modified_base 77: mod_base = OTHER; note = 2'-O-Methyl-adenosine
  modified_base 78: mod_base = OTHER; note = 2'-O-Methyl-adenosine
  modified_base 79: mod_base = OTHER; note = 2'-O-Methyl-guanosine
  modified_base 80: mod_base = OTHER; note = 2'-O-Methyl-uridine
  modified_base 81: mod_base = OTHER; note = 2'-O-Methyl-guanosine
  modified_base 83: mod_base = OTHER; note = 2'-O-Methyl-cytidine
  modified_base 84: mod_base = OTHER; note = 2'-O-Methyl-adenosine
  modified_base 85: mod_base = OTHER; note = 2'-O-Methyl-cytidine
  modified_base 86: mod_base = OTHER; note = 2'-O-Methyl-cytidine
  modified_base 87: mod_base = OTHER; note = 2'-O-Methyl-guanosine
  modified_base 88: mod_base = OTHER; note = 2'-O-Methyl-adenosine
  modified_base 89: mod_base = OTHER; note = 2'-O-Methyl-guanosine
  modified_base 90: mod_base = OTHER; note = 2'-O-Methyl-uridine
  modified_base 91: mod_base = OTHER; note = 2'-O-Methyl-cytidine
  modified_base 92: mod_base = OTHER; note = 2'-O-Methyl-guanosine
  modified_base 93: mod_base = OTHER; note = 2'-O-Methyl-guanosine
  modified_base 94: mod_base = OTHER; note = 2'-O-Methyl-uridine
  modified_base 95: mod_base = OTHER; note = 2'-O-Methyl-guanosine
  modified_base 96: mod_base = OTHER; note = 2'-O-Methyl-cytidine
  modified_base 97: mod_base = OTHER; note = 2'-O-Methyl-uridine phosphorothioate
  modified_base 98: mod_base = OTHER; note = 2'-O-Methyl-uridine phosphorothioate
  modified_base 99: mod_base = OTHER; note = 2'-O-Methyl-uridine phosphorothioate
  modified_base 100: mod_base = OTHER; note = 2'-O-Methyl-uridine

SEQ ID NO: 2443 - RNA, 103 nt, synthetic construct; identical to SEQ ID NO: 1643
  source 1..103: mol_type = other RNA
  modified_base 1: mod_base = OTHER; note = 2'-O-Methyl-cytidine phosphorothioate
  modified_base 2: mod_base = OTHER; note = 2'-O-Methyl-cytidine phosphorothioate
  modified_base 3: mod_base = OTHER; note = 2'-O-Methyl-cytidine phosphorothioate
  modified_base 21: mod_base = OTHER; note = 2'-O-Methyl-guanosine
  modified_base 25: mod_base = OTHER; note = uridine phosphorothioate
  modified_base 28: mod_base = OTHER; note = 2'-O-Methyl-adenosine
  modified_base 29: mod_base = OTHER; note = 2'-O-Methyl-guanosine
  modified_base 30: mod_base = OTHER; note = 2'-O-Methyl-cytidine
  modified_base 31: mod_base = OTHER; note = 2'-O-Methyl-uridine
  modified_base 32: mod_base = OTHER; note = 2'-O-Methyl-adenosine
  modified_base 34: mod_base = OTHER; note = 2'-O-Methyl-adenosine
  modified_base 35: mod_base = OTHER; note = 2'-O-Methyl-adenosine
  modified_base 36: mod_base = OTHER; note = 2'-O-Methyl-adenosine
  modified_base 37: mod_base = OTHER; note = 2'-O-Methyl-uridine
  modified_base 38: mod_base = OTHER; note = 2'-O-Methyl-adenosine
  modified_base 39: mod_base = OTHER; note = 2'-O-Methyl-guanosine
  modified_base 40: mod_base = OTHER; note = 2'-O-Methyl-cytidine
  modified_base 41: mod_base = OTHER; note = 2'-O-Methyl-adenosine
  modified_base 42: mod_base = OTHER; note = 2'-O-Methyl-adenosine
  modified_base 46: mod_base = OTHER; note = 2'-O-Methyl-adenosine
  modified_base 48: mod_base = OTHER; note = 2'-O-Methyl-adenosine
  modified_base 50: mod_base = OTHER; note = 2'-O-Methyl-uridine
  modified_base 52: mod_base = OTHER; note = 2'-O-Methyl-adenosine
  modified_base 53: mod_base = OTHER; note = 2'-O-Methyl-guanosine
  modified_base 54: mod_base = OTHER; note = 2'-O-Methyl-guanosine
  modified_base 55: mod_base = OTHER; note = 2'-O-Methyl-cytidine
  modified_base 56: mod_base = OTHER; note = 2'-O-Methyl-uridine
  modified_base 57: mod_base = OTHER; note = 2'-O-Methyl-adenosine
  modified_base 60: mod_base = OTHER; note = 2'-O-Methyl-cytidine
  modified_base 61: mod_base = OTHER; note = 2'-O-Methyl-cytidine
  modified_base 66: mod_base = OTHER; note = 2'-O-Methyl-uridine
  modified_base 67: mod_base = OTHER; note = 2'-O-Methyl-cytidine
  modified_base 70: mod_base = OTHER; note = 2'-O-Methyl-cytidine
  modified_base 71: mod_base = OTHER; note = 2'-O-Methyl-uridine
  modified_base 72: mod_base = OTHER; note = 2'-O-Methyl-uridine
  modified_base 74: mod_base = OTHER; note = 2'-O-Methyl-adenosine
  modified_base 75: mod_base = OTHER; note = 2'-O-Methyl-adenosine
  modified_base 76: mod_base = OTHER; note = 2'-O-Methyl-adenosine
  modified_base 77: mod_base = OTHER; note = 2'-O-Methyl-adenosine
  modified_base 78: mod_base = OTHER; note = 2'-O-Methyl-adenosine
  modified_base 79: mod_base = OTHER; note = 2'-O-Methyl-guanosine
  modified_base 80: mod_base = OTHER; note = 2'-O-Methyl-uridine
  modified_base 81: mod_base = OTHER; note = 2'-O-Methyl-guanosine
  modified_base 83: mod_base = OTHER; note = 2'-O-Methyl-cytidine
  modified_base 84: mod_base = OTHER; note = 2'-O-Methyl-adenosine
  modified_base 85: mod_base = OTHER; note = 2'-O-Methyl-cytidine
  modified_base 86: mod_base = OTHER; note = 2'-O-Methyl-cytidine
  modified_base 87: mod_base = OTHER; note = 2'-O-Methyl-guanosine
  modified_base 88: mod_base = OTHER; note = 2'-O-Methyl-adenosine
  modified_base 89: mod_base = OTHER; note = 2'-O-Methyl-guanosine
  modified_base 90: mod_base = OTHER; note = 2'-O-Methyl-uridine
  modified_base 91: mod_base = OTHER; note = 2'-O-Methyl-cytidine
  modified_base 92: mod_base = OTHER; note = 2'-O-Methyl-guanosine
  modified_base 93: mod_base = OTHER; note = 2'-O-Methyl-guanosine
  modified_base 94: mod_base = OTHER; note = 2'-O-Methyl-uridine
  modified_base 95: mod_base = OTHER; note = 2'-O-Methyl-guanosine
  modified_base 96: mod_base = OTHER; note = 2'-O-Methyl-cytidine
  modified_base 97: mod_base = OTHER; note = 2'-O-Methyl-uridine phosphorothioate
  modified_base 98: mod_base = OTHER; note = 2'-O-Methyl-uridine phosphorothioate
  modified_base 99: mod_base = OTHER; note = 2'-O-Methyl-uridine phosphorothioate
  modified_base 100: mod_base = OTHER; note = 2'-O-Methyl-uridine

SEQ ID NO: 2444 - RNA, 103 nt, synthetic construct; identical to SEQ ID NO: 1699
  source 1..103: mol_type = other RNA
  modified_base 1: mod_base = OTHER; note = 2'-O-Methyl-guanosine phosphorothioate
  modified_base 2: mod_base = OTHER; note = 2'-O-Methyl-adenosine phosphorothioate
  modified_base 3: mod_base = OTHER; note = 2'-O-Methyl-guanosine phosphorothioate
  modified_base 21: mod_base = OTHER; note = 2'-O-Methyl-guanosine
  modified_base 25: mod_base = OTHER; note = uridine phosphorothioate
  modified_base 28: mod_base = OTHER; note = 2'-O-Methyl-adenosine
  modified_base 29: mod_base = OTHER; note = 2'-O-Methyl-guanosine
  modified_base 30: mod_base = OTHER; note = 2'-O-Methyl-cytidine
  modified_base 31: mod_base = OTHER; note = 2'-O-Methyl-uridine
  modified_base 32: mod_base = OTHER; note = 2'-O-Methyl-adenosine
  modified_base 33: mod_base = OTHER; note = 2'-O-Methyl-guanosine
  modified_base 34: mod_base = OTHER; note = 2'-O-Methyl-adenosine
  modified_base 35: mod_base = OTHER; note = 2'-O-Methyl-adenosine
  modified_base 36: mod_base = OTHER; note = 2'-O-Methyl-adenosine
  modified_base 37: mod_base = OTHER; note = 2'-O-Methyl-uridine
  modified_base 38: mod_base = OTHER; note = 2'-O-Methyl-adenosine
  modified_base 39: mod_base = OTHER; note = 2'-O-Methyl-guanosine
  modified_base 40: mod_base = OTHER; note = 2'-O-Methyl-cytidine
  modified_base 41: mod_base = OTHER; note = 2'-O-Methyl-adenosine
  modified_base 42: mod_base = OTHER; note = 2'-O-Methyl-adenosine
  modified_base 46: mod_base = OTHER; note = 2'-O-Methyl-adenosine
  modified_base 48: mod_base = OTHER; note = 2'-O-Methyl-adenosine
  modified_base 50: mod_base = OTHER; note = 2'-O-Methyl-uridine
  modified_base 52: mod_base = OTHER; note = 2'-O-Methyl-adenosine
  modified_base 53: mod_base = OTHER; note = 2'-O-Methyl-guanosine
  modified_base 54: mod_base = OTHER; note = 2'-O-Methyl-guanosine
  modified_base 55: mod_base = OTHER; note = 2'-O-Methyl-cytidine
  modified_base 56: mod_base = OTHER; note = 2'-O-Methyl-uridine
  modified_base 57: mod_base = OTHER; note = 2'-O-Methyl-adenosine
  modified_base 60: mod_base = OTHER; note = 2'-O-Methyl-cytidine
  modified_base 61: mod_base = OTHER; note = 2'-O-Methyl-cytidine
  modified_base 66: mod_base = OTHER; note = 2'-O-Methyl-uridine
  modified_base 67: mod_base = OTHER; note = 2'-O-Methyl-cytidine
  modified_base 70: mod_base = OTHER; note = 2'-O-Methyl-cytidine
  modified_base 71: mod_base = OTHER; note = 2'-O-Methyl-uridine
  modified_base 72: mod_base = OTHER; note = 2'-O-Methyl-uridine
  modified_base 73: mod_base = OTHER; note = 2'-O-Methyl-guanosine
  modified_base 74: mod_base = OTHER; note = 2'-O-Methyl-adenosine
  modified_base 75: mod_base = OTHER; note = 2'-O-Methyl-adenosine
  modified_base 76: mod_base = OTHER; note = 2'-O-Methyl-adenosine
  modified_base 77: mod_base = OTHER; note = 2'-O-Methyl-adenosine
  modified_base 78: mod_base = OTHER; note = 2'-O-Methyl-adenosine
  modified_base 79: mod_base = OTHER; note = 2'-O-Methyl-guanosine
  modified_base 80: mod_base = OTHER; note = 2'-O-Methyl-uridine
  modified_base 81: mod_base = OTHER; note = 2'-O-Methyl-guanosine
  modified_base 83: mod_base = OTHER; note = 2'-O-Methyl-cytidine
  modified_base 84: mod_base = OTHER; note = 2'-O-Methyl-adenosine
  modified_base 85: mod_base = OTHER; note = 2'-O-Methyl-cytidine
  modified_base 86: mod_base = OTHER; note = 2'-O-Methyl-cytidine
  modified_base 87: mod_base = OTHER; note = 2'-O-Methyl-guanosine
  modified_base 88: mod_base = OTHER; note = 2'-O-Methyl-adenosine
  modified_base 89: mod_base = OTHER; note = 2'-O-Methyl-guanosine
  modified_base 90: mod_base = OTHER; note = 2'-O-Methyl-uridine
  modified_base 91: mod_base = OTHER; note = 2'-O-Methyl-cytidine
  modified_base 92: mod_base = OTHER; note = 2'-O-Methyl-guanosine
  modified_base 93: mod_base = OTHER; note = 2'-O-Methyl-guanosine
  modified_base 94: mod_base = OTHER; note = 2'-O-Methyl-uridine
  modified_base 95: mod_base = OTHER; note = 2'-O-Methyl-guanosine
  modified_base 96: mod_base = OTHER; note = 2'-O-Methyl-cytidine
  modified_base 97: mod_base = OTHER; note = 2'-O-Methyl-uridine phosphorothioate
  modified_base 98: mod_base = OTHER; note = 2'-O-Methyl-uridine phosphorothioate
  modified_base 99: mod_base = OTHER; note = 2'-O-Methyl-uridine phosphorothioate
  modified_base 100: mod_base = OTHER; note = 2'-O-Methyl-uridine

SEQ ID NO: 2445 - RNA, 103 nt, synthetic construct; identical to SEQ ID NO: 1699
  source 1..103: mol_type = other RNA
  modified_base 1: mod_base = OTHER; note = 2'-O-Methyl-guanosine phosphorothioate
  modified_base 2: mod_base = OTHER; note = 2'-O-Methyl-adenosine phosphorothioate
  modified_base 3: mod_base = OTHER; note = 2'-O-Methyl-guanosine phosphorothioate
  modified_base 21: mod_base = OTHER; note = 2'-O-Methyl-guanosine
  modified_base 25: mod_base = OTHER; note = uridine phosphorothioate
  modified_base 28: mod_base = OTHER; note = 2'-O-Methyl-adenosine
  modified_base 29: mod_base = OTHER; note = 2'-O-Methyl-guanosine
  modified_base 30: mod_base = OTHER; note = 2'-O-Methyl-cytidine
  modified_base 31: mod_base = OTHER; note = 2'-O-Methyl-uridine
  modified_base 32: mod_base = OTHER; note = 2'-O-Methyl-adenosine
  modified_base 34: mod_base = OTHER; note = 2'-O-Methyl-adenosine
  modified_base 35: mod_base = OTHER; note = 2'-O-Methyl-adenosine
  modified_base 36: mod_base = OTHER; note = 2'-O-Methyl-adenosine
  modified_base 37: mod_base = OTHER; note = 2'-O-Methyl-uridine
  modified_base 38: mod_base = OTHER; note = 2'-O-Methyl-adenosine
  modified_base 39: mod_base = OTHER; note = 2'-O-Methyl-guanosine
  modified_base 40: mod_base = OTHER; note = 2'-O-Methyl-cytidine
  modified_base 41: mod_base = OTHER; note = 2'-O-Methyl-adenosine
  modified_base 42: mod_base = OTHER; note = 2'-O-Methyl-adenosine
  modified_base 46: mod_base = OTHER; note = 2'-O-Methyl-adenosine
  modified_base 48: mod_base = OTHER; note = 2'-O-Methyl-adenosine
  modified_base 50: mod_base = OTHER; note = 2'-O-Methyl-uridine
  modified_base 52: mod_base = OTHER; note = 2'-O-Methyl-adenosine
  modified_base 53: mod_base = OTHER; note = 2'-O-Methyl-guanosine
  modified_base 54: mod_base = OTHER; note = 2'-O-Methyl-guanosine
  modified_base 55: mod_base = OTHER; note = 2'-O-Methyl-cytidine
  modified_base 56: mod_base = OTHER; note = 2'-O-Methyl-uridine
  modified_base 57: mod_base = OTHER; note = 2'-O-Methyl-adenosine
  modified_base 60: mod_base = OTHER; note = 2'-O-Methyl-cytidine
  modified_base 61: mod_base = OTHER; note = 2'-O-Methyl-cytidine
  modified_base 66: mod_base = OTHER; note = 2'-O-Methyl-uridine
  modified_base 67: mod_base = OTHER; note = 2'-O-Methyl-cytidine
  modified_base 70: mod_base = OTHER; note = 2'-O-Methyl-cytidine
  modified_base 71: mod_base = OTHER; note = 2'-O-Methyl-uridine
  modified_base 72: mod_base = OTHER; note = 2'-O-Methyl-uridine
  modified_base 74: mod_base = OTHER; note = 2'-O-Methyl-adenosine
  modified_base 75: mod_base = OTHER; note = 2'-O-Methyl-adenosine
  modified_base 76: mod_base = OTHER; note = 2'-O-Methyl-adenosine
  modified_base 77: mod_base = OTHER; note = 2'-O-Methyl-adenosine
  modified_base 78: mod_base = OTHER; note = 2'-O-Methyl-adenosine
  modified_base 79: mod_base = OTHER; note = 2'-O-Methyl-guanosine
  modified_base 80: mod_base = OTHER; note = 2'-O-Methyl-uridine
  modified_base 81: mod_base = OTHER; note = 2'-O-Methyl-guanosine
  modified_base 83: mod_base = OTHER; note = 2'-O-Methyl-cytidine
  modified_base 84: mod_base = OTHER; note = 2'-O-Methyl-adenosine
  modified_base 85: mod_base = OTHER; note = 2'-O-Methyl-cytidine
  modified_base 86: mod_base = OTHER; note = 2'-O-Methyl-cytidine
  modified_base 87: mod_base = OTHER; note = 2'-O-Methyl-guanosine
  modified_base 88: mod_base = OTHER; note = 2'-O-Methyl-adenosine
  modified_base 89: mod_base = OTHER; note = 2'-O-Methyl-guanosine
  modified_base 90: mod_base = OTHER; note = 2'-O-Methyl-uridine
  modified_base 91: mod_base = OTHER; note = 2'-O-Methyl-cytidine
  modified_base 92: mod_base = OTHER; note = 2'-O-Methyl-guanosine
  modified_base 93: mod_base = OTHER; note = 2'-O-Methyl-guanosine
  modified_base 94: mod_base = OTHER; note = 2'-O-Methyl-uridine
  modified_base 95: mod_base = OTHER; note = 2'-O-Methyl-guanosine
  modified_base 96: mod_base = OTHER; note = 2'-O-Methyl-cytidine
  modified_base 97: mod_base = OTHER; note = 2'-O-Methyl-uridine phosphorothioate
  modified_base 98: mod_base = OTHER; note = 2'-O-Methyl-uridine phosphorothioate
  modified_base 99: mod_base = OTHER; note = 2'-O-Methyl-uridine phosphorothioate
  modified_base 100: mod_base = OTHER; note = 2'-O-Methyl-uridine

SEQ ID NO: 2446 - RNA, 103 nt, synthetic construct; identical to SEQ ID NO: 1700
  source 1..103: mol_type = other RNA
  modified_base 1: mod_base = OTHER; note = 2'-O-Methyl-cytidine phosphorothioate
  modified_base 2: mod_base = OTHER; note = 2'-O-Methyl-adenosine phosphorothioate
  modified_base 3: mod_base = OTHER; note = 2'-O-Methyl-guanosine phosphorothioate
  modified_base 21: mod_base = OTHER; note = 2'-O-Methyl-guanosine
  modified_base 25: mod_base = OTHER; note = uridine phosphorothioate
  modified_base 28: mod_base = OTHER; note = 2'-O-Methyl-adenosine
  modified_base 29: mod_base = OTHER; note = 2'-O-Methyl-guanosine
  modified_base 30: mod_base = OTHER; note = 2'-O-Methyl-cytidine
  modified_base 31: mod_base = OTHER; note = 2'-O-Methyl-uridine
  modified_base 32: mod_base = OTHER; note = 2'-O-Methyl-adenosine
  modified_base 33: mod_base = OTHER; note = 2'-O-Methyl-guanosine
  modified_base 34: mod_base = OTHER; note = 2'-O-Methyl-adenosine
  modified_base 35: mod_base = OTHER; note = 2'-O-Methyl-adenosine
  modified_base 36: mod_base = OTHER; note = 2'-O-Methyl-adenosine
  modified_base 37: mod_base = OTHER; note = 2'-O-Methyl-uridine
  modified_base 38: mod_base = OTHER; note = 2'-O-Methyl-adenosine
  modified_base 39: mod_base = OTHER; note = 2'-O-Methyl-guanosine
  modified_base 40: mod_base = OTHER; note = 2'-O-Methyl-cytidine
  modified_base 41: mod_base = OTHER; note = 2'-O-Methyl-adenosine
  modified_base 42: mod_base = OTHER; note = 2'-O-Methyl-adenosine
  modified_base 46: mod_base = OTHER; note = 2'-O-Methyl-adenosine
  modified_base 48: mod_base = OTHER; note = 2'-O-Methyl-adenosine
  modified_base 50: mod_base = OTHER; note = 2'-O-Methyl-uridine
  modified_base 52: mod_base = OTHER; note = 2'-O-Methyl-adenosine
  modified_base 53: mod_base = OTHER; note = 2'-O-Methyl-guanosine
  modified_base 54: mod_base = OTHER; note = 2'-O-Methyl-guanosine
  modified_base 57: mod_base = OTHER; note = 2'-O-Methyl-adenosine
  modified_base 61: mod_base = OTHER; note = 2'-O-Methyl-cytidine
  modified_base 66: mod_base = OTHER; note = 2'-O-Methyl-uridine
  modified_base 67: mod_base = OTHER; note = 2'-O-Methyl-cytidine
  modified_base 70: mod_base = OTHER; note = 2'-O-Methyl-cytidine
  modified_base 71: mod_base = OTHER; note = 2'-O-Methyl-uridine
  modified_base 72: mod_base = OTHER; note = 2'-O-Methyl-uridine
  modified_base 74: mod_base = OTHER; note = 2'-O-Methyl-adenosine
  modified_base 75: mod_base = OTHER; note = 2'-O-Methyl-adenosine
  modified_base 76: mod_base = OTHER; note = 2'-O-Methyl-adenosine
  modified_base 77: mod_base = OTHER; note = 2'-O-Methyl-adenosine
  modified_base 78: mod_base = OTHER; note = 2'-O-Methyl-adenosine
  modified_base 79: mod_base = OTHER; note = 2'-O-Methyl-guanosine
  modified_base 80: mod_base = OTHER; note = 2'-O-Methyl-uridine
  modified_base 82: mod_base = OTHER; note = 2'-O-Methyl-guanosine
  modified_base 83: mod_base = OTHER; note = 2'-O-Methyl-cytidine
  modified_base 84: mod_base = OTHER; note = 2'-O-Methyl-adenosine
  modified_base 85: mod_base = OTHER; note = 2'-O-Methyl-cytidine
  modified_base 86: mod_base = OTHER; note = 2'-O-Methyl-cytidine
  modified_base 87: mod_base = OTHER; note = 2'-O-Methyl-guanosine
  modified_base 89: mod_base = OTHER; note = 2'-O-Methyl-guanosine
  modified_base 92: mod_base = OTHER; note = 2'-O-Methyl-guanosine
  modified_base 93: mod_base = OTHER; note = 2'-O-Methyl-guanosine
  modified_base 94: mod_base = OTHER; note = 2'-O-Methyl-uridine
  modified_base 95: mod_base = OTHER; note = 2'-O-Methyl-guanosine
  modified_base 96: mod_base = OTHER; note = 2'-O-Methyl-cytidine
  modified_base 97: mod_base = OTHER; note = 2'-O-Methyl-uridine phosphorothioate
  modified_base 98: mod_base = OTHER; note = 2'-O-Methyl-uridine phosphorothioate
  modified_base 99: mod_base = OTHER; note = 2'-O-Methyl-uridine phosphorothioate
  modified_base 100: mod_base = OTHER; note = 2'-O-Methyl-uridine

SEQ ID NO: 2447 - RNA, 103 nt, synthetic construct; identical to SEQ ID NO: 1700
  source 1..103: mol_type = other RNA
  modified_base 1: mod_base = OTHER; note = 2'-O-Methyl-cytidine phosphorothioate
  modified_base 2: mod_base = OTHER; note = 2'-O-Methyl-adenosine phosphorothioate
  modified_base 3: mod_base = OTHER; note = 2'-O-Methyl-guanosine phosphorothioate
  modified_base 21: mod_base = OTHER; note = 2'-O-Methyl-guanosine
  modified_base 25: mod_base = OTHER; note = uridine phosphorothioate
  modified_base 28: mod_base = OTHER; note = 2'-O-Methyl-adenosine
  modified_base 29: mod_base = OTHER; note = 2'-O-Methyl-guanosine
  modified_base 30: mod_base = OTHER; note = 2'-O-Methyl-cytidine
  modified_base 31: mod_base = OTHER; note = 2'-O-Methyl-uridine
  modified_base 32: mod_base = OTHER; note = 2'-O-Methyl-adenosine
  modified_base 33: mod_base = OTHER; note = 2'-O-Methyl-guanosine
  modified_base 34: mod_base = OTHER; note = 2'-O-Methyl-adenosine
  modified_base 35: mod_base = OTHER; note = 2'-O-Methyl-adenosine
  modified_base 36: mod_base = OTHER; note = 2'-O-Methyl-adenosine
  modified_base 37: mod_base = OTHER; note = 2'-O-Methyl-uridine
  modified_base 38: mod_base = OTHER; note = 2'-O-Methyl-adenosine
  modified_base 39: mod_base = OTHER; note = 2'-O-Methyl-guanosine
  modified_base 40: mod_base = OTHER; note = 2'-O-Methyl-cytidine
  modified_base 41: mod_base = OTHER; note = 2'-O-Methyl-adenosine
  modified_base 42: mod_base = OTHER; note = 2'-O-Methyl-adenosine
  modified_base 46: mod_base = OTHER; note = 2'-O-Methyl-adenosine
  modified_base 48: mod_base = OTHER; note = 2'-O-Methyl-adenosine
  modified_base 50: mod_base = OTHER; note = 2'-O-Methyl-uridine
  modified_base 52: mod_base = OTHER; note = 2'-O-Methyl-adenosine
  modified_base 53: mod_base = OTHER; note = 2'-O-Methyl-guanosine
  modified_base 54: mod_base = OTHER; note = 2'-O-Methyl-guanosine
  modified_base 55: mod_base = OTHER; note = 2'-O-Methyl-cytidine
  modified_base 56: mod_base = OTHER; note = 2'-O-Methyl-uridine
  modified_base 57: mod_base = OTHER; note = 2'-O-Methyl-adenosine
  modified_base 60: mod_base = OTHER; note = 2'-O-Methyl-cytidine
  modified_base 61: mod_base = OTHER; note = 2'-O-Methyl-cytidine
  modified_base 66: mod_base = OTHER; note = 2'-O-Methyl-uridine
  modified_base 67: mod_base = OTHER; note = 2'-O-Methyl-cytidine
  modified_base 70: mod_base = OTHER; note = 2'-O-Methyl-cytidine
  modified_base 71: mod_base = OTHER; note = 2'-O-Methyl-uridine
  modified_base 72: mod_base = OTHER; note = 2'-O-Methyl-uridine
  modified_base 74: mod_base = OTHER; note = 2'-O-Methyl-adenosine
  modified_base 75: mod_base = OTHER; note = 2'-O-Methyl-adenosine
  modified_base 76: mod_base = OTHER; note = 2'-O-Methyl-adenosine
  modified_base 77: mod_base = OTHER; note = 2'-O-Methyl-adenosine
  modified_base 78: mod_base = OTHER; note = 2'-O-Methyl-adenosine
  modified_base 79: mod_base = OTHER; note = 2'-O-Methyl-guanosine
  modified_base 80: mod_base = OTHER; note = 2'-O-Methyl-uridine
  modified_base 82: mod_base = OTHER; note = 2'-O-Methyl-guanosine
  modified_base 83: mod_base = OTHER; note = 2'-O-Methyl-cytidine
  modified_base 84: mod_base = OTHER; note = 2'-O-Methyl-adenosine
  modified_base 85: mod_base = OTHER; note = 2'-O-Methyl-cytidine
  modified_base 86: mod_base = OTHER; note = 2'-O-Methyl-cytidine
  modified_base 87: mod_base = OTHER; note = 2'-O-Methyl-guanosine
  modified_base 89: mod_base = OTHER; note = 2'-O-Methyl-guanosine
  modified_base 92: mod_base = OTHER; note = 2'-O-Methyl-guanosine
  modified_base 93: mod_base = OTHER; note = 2'-O-Methyl-guanosine
  modified_base 94: mod_base = OTHER; note = 2'-O-Methyl-uridine
  modified_base 95: mod_base = OTHER; note = 2'-O-Methyl-guanosine
  modified_base 96: mod_base = OTHER; note = 2'-O-Methyl-cytidine
  modified_base 97: mod_base = OTHER; note = 2'-O-Methyl-uridine phosphorothioate
  modified_base 98: mod_base = OTHER; note = 2'-O-Methyl-uridine phosphorothioate
  modified_base 99: mod_base = OTHER; note = 2'-O-Methyl-uridine phosphorothioate
  modified_base 100: mod_base = OTHER; note = 2'-O-Methyl-uridine

SEQ ID NO: 2448 - RNA, 103 nt, synthetic construct; identical to SEQ ID NO: 1700
  source 1..103: mol_type = other RNA
  modified_base 1: mod_base = OTHER; note = 2'-O-Methyl-cytidine phosphorothioate
  modified_base 2: mod_base = OTHER; note = 2'-O-Methyl-adenosine phosphorothioate
  modified_base 3: mod_base = OTHER; note = 2'-O-Methyl-guanosine phosphorothioate
  modified_base 21: mod_base = OTHER; note = 2'-O-Methyl-guanosine
  modified_base 25: mod_base = OTHER; note = uridine phosphorothioate
  modified_base 28: mod_base = OTHER; note = 2'-O-Methyl-adenosine
  modified_base 29: mod_base = OTHER; note = 2'-O-Methyl-guanosine
  modified_base 30: mod_base = OTHER; note = 2'-O-Methyl-cytidine
  modified_base 31: mod_base = OTHER; note = 2'-O-Methyl-uridine
  modified_base 32: mod_base = OTHER; note = 2'-O-Methyl-adenosine
  modified_base 33: mod_base = OTHER; note = 2'-O-Methyl-guanosine
  modified_base 34: mod_base = OTHER; note = 2'-O-Methyl-adenosine
  modified_base 35: mod_base = OTHER; note = 2'-O-Methyl-adenosine
  modified_base 36: mod_base = OTHER; note = 2'-O-Methyl-adenosine
  modified_base 37: mod_base = OTHER; note = 2'-O-Methyl-uridine
  modified_base 38: mod_base = OTHER; note = 2'-O-Methyl-adenosine
  modified_base 39: mod_base = OTHER; note = 2'-O-Methyl-guanosine
  modified_base 40: mod_base = OTHER; note = 2'-O-Methyl-cytidine
  modified_base 41: mod_base = OTHER; note = 2'-O-Methyl-adenosine
  modified_base 42: mod_base = OTHER; note = 2'-O-Methyl-adenosine
  modified_base 46: mod_base = OTHER; note = 2'-O-Methyl-adenosine
  modified_base 48: mod_base = OTHER; note = 2'-O-Methyl-adenosine
  modified_base 50: mod_base = OTHER; note = 2'-O-Methyl-uridine
  modified_base 52: mod_base = OTHER; note = 2'-O-Methyl-adenosine
  modified_base 53: mod_base = OTHER; note = 2'-O-Methyl-guanosine
  modified_base 54: mod_base = OTHER; note = 2'-O-Methyl-guanosine
  modified_base 57: mod_base = OTHER; note = 2'-O-Methyl-adenosine
  modified_base 61: mod_base = OTHER; note = 2'-O-Methyl-cytidine
  modified_base 66: mod_base = OTHER; note = 2'-O-Methyl-uridine
  modified_base 67: mod_base = OTHER; note = 2'-O-Methyl-cytidine
  modified_base 70: mod_base = OTHER; note = 2'-O-Methyl-cytidine
  modified_base 71: mod_base = OTHER; note = 2'-O-Methyl-uridine
  modified_base 72: mod_base = OTHER; note = 2'-O-Methyl-uridine
  modified_base 73: mod_base = OTHER; note = 2'-O-Methyl-guanosine
  modified_base 74: mod_base = OTHER; note = 2'-O-Methyl-adenosine
  modified_base 75: mod_base = OTHER; note = 2'-O-Methyl-adenosine
  modified_base 76: mod_base = OTHER; note = 2'-O-Methyl-adenosine
  modified_base 77: mod_base = OTHER; note = 2'-O-Methyl-adenosine
  modified_base 78: mod_base = OTHER; note = 2'-O-Methyl-adenosine
  modified_base 79: mod_base = OTHER; note = 2'-O-Methyl-guanosine
  modified_base 80: mod_base = OTHER; note = 2'-O-Methyl-uridine
  modified_base 82: mod_base = OTHER; note = 2'-O-Methyl-guanosine
  modified_base 83: mod_base = OTHER; note = 2'-O-Methyl-cytidine
  modified_base 84: mod_base = OTHER; note = 2'-O-Methyl-adenosine
  modified_base 85: mod_base = OTHER; note = 2'-O-Methyl-cytidine
  modified_base 86: mod_base = OTHER; note = 2'-O-Methyl-cytidine
  modified_base 87: mod_base = OTHER; note = 2'-O-Methyl-guanosine
  modified_base 89: mod_base = OTHER; note = 2'-O-Methyl-guanosine
  modified_base 92: mod_base = OTHER; note = 2'-O-Methyl-guanosine
  modified_base 93: mod_base = OTHER; note = 2'-O-Methyl-guanosine
  modified_base 94: mod_base = OTHER; note = 2'-O-Methyl-uridine
  modified_base 95: mod_base = OTHER; note = 2'-O-Methyl-guanosine
  modified_base 96: mod_base = OTHER; note = 2'-O-Methyl-cytidine
  modified_base 97: mod_base = OTHER; note = 2'-O-Methyl-uridine phosphorothioate
  modified_base 98: mod_base = OTHER; note = 2'-O-Methyl-uridine phosphorothioate
  modified_base 99: mod_base = OTHER; note = 2'-O-Methyl-uridine phosphorothioate
  modified_base 100: mod_base = OTHER; note = 2'-O-Methyl-uridine

SEQ ID NO: 2449 - RNA, 103 nt, synthetic construct; identical to SEQ ID NO: 1700
  source 1..103: mol_type = other RNA
  modified_base 1: mod_base = OTHER; note = 2'-O-Methyl-cytidine phosphorothioate
  modified_base 2: mod_base = OTHER; note = 2'-O-Methyl-adenosine phosphorothioate
  modified_base 3: mod_base = OTHER; note = 2'-O-Methyl-guanosine phosphorothioate
  modified_base 21: mod_base = OTHER; note = 2'-O-Methyl-guanosine
  modified_base 25: mod_base = OTHER; note = uridine phosphorothioate
  modified_base 28: mod_base = OTHER; note = 2'-O-Methyl-adenosine
  modified_base 29: mod_base = OTHER; note = 2'-O-Methyl-guanosine
  modified_base 30: mod_base = OTHER; note = 2'-O-Methyl-cytidine
  modified_base 31: mod_base = OTHER; note = 2'-O-Methyl-uridine
  modified_base 32: mod_base = OTHER; note = 2'-O-Methyl-adenosine
  modified_base 33: mod_base = OTHER; note = 2'-O-Methyl-guanosine
  modified_base 34: mod_base = OTHER; note = 2'-O-Methyl-adenosine
  modified_base 35: mod_base = OTHER; note = 2'-O-Methyl-adenosine
  modified_base 36: mod_base = OTHER; note = 2'-O-Methyl-adenosine
  modified_base 37: mod_base = OTHER; note = 2'-O-Methyl-uridine
  modified_base 38: mod_base = OTHER; note = 2'-O-Methyl-adenosine
  modified_base 39: mod_base = OTHER; note = 2'-O-Methyl-guanosine
  modified_base 40: mod_base = OTHER; note = 2'-O-Methyl-cytidine
  modified_base 41: mod_base = OTHER; note = 2'-O-Methyl-adenosine
  modified_base 42: mod_base = OTHER; note = 2'-O-Methyl-adenosine
  modified_base 46: mod_base = OTHER; note = 2'-O-Methyl-adenosine
  modified_base 48: mod_base = OTHER; note = 2'-O-Methyl-adenosine
  modified_base 50: mod_base = OTHER; note = 2'-O-Methyl-uridine
  modified_base 52: mod_base = OTHER; note = 2'-O-Methyl-adenosine
  modified_base 53: mod_base = OTHER; note = 2'-O-Methyl-guanosine
  modified_base 54: mod_base = OTHER; note = 2'-O-Methyl-guanosine
  modified_base 57: mod_base = OTHER; note = 2'-O-Methyl-adenosine
  modified_base 61: mod_base = OTHER; note = 2'-O-Methyl-cytidine
  modified_base 66: mod_base = OTHER; note = 2'-O-Methyl-uridine
  modified_base 67: mod_base = OTHER; note = 2'-O-Methyl-cytidine
  modified_base 70: mod_base = OTHER; note = 2'-O-Methyl-cytidine
  modified_base 71: mod_base = OTHER; note = 2'-O-Methyl-uridine
  modified_base 72: mod_base = OTHER; note = 2'-O-Methyl-uridine
  modified_base 73: mod_base = OTHER; note = 2'-O-Methyl-guanosine
  modified_base 74: mod_base = OTHER; note = 2'-O-Methyl-adenosine
  modified_base 75: mod_base = OTHER; note = 2'-O-Methyl-adenosine
  modified_base 76: mod_base = OTHER; note = 2'-O-Methyl-adenosine
  modified_base 77: mod_base = OTHER; note = 2'-O-Methyl-adenosine
  modified_base 78: mod_base = OTHER; note = 2'-O-Methyl-adenosine
  modified_base 79: mod_base = OTHER; note = 2'-O-Methyl-guanosine
  modified_base 80: mod_base = OTHER; note = 2'-O-Methyl-uridine
  modified_base 82: mod_base = OTHER; note = 2'-O-Methyl-guanosine
  modified_base 83: mod_base = OTHER; note = 2'-O-Methyl-cytidine
  modified_base 84: mod_base = OTHER; note = 2'-O-Methyl-adenosine
  modified_base 85: mod_base = OTHER; note = 2'-O-Methyl-cytidine
  modified_base 86: mod_base = OTHER; note = 2'-O-Methyl-cytidine
  modified_base 87: mod_base = OTHER; note = 2'-O-Methyl-guanosine
  modified_base 89: mod_base = OTHER; note = 2'-O-Methyl-guanosine
  modified_base 91: mod_base = OTHER; note = 2'-O-Methyl-cytidine
  modified_base 92: mod_base = OTHER; note = 2'-O-Methyl-guanosine
  modified_base 93: mod_base = OTHER; note = 2'-O-Methyl-guanosine
  modified_base 94: mod_base = OTHER; note = 2'-O-Methyl-uridine
  modified_base 95: mod_base = OTHER; note = 2'-O-Methyl-guanosine
  modified_base 96: mod_base = OTHER; note = 2'-O-Methyl-cytidine
  modified_base 97: mod_base = OTHER; note = 2'-O-Methyl-uridine phosphorothioate
  modified_base 98: mod_base = OTHER; note = 2'-O-Methyl-uridine phosphorothioate
  modified_base 99: mod_base = OTHER; note = 2'-O-Methyl-uridine phosphorothioate
  modified_base 100: mod_base = OTHER; note = 2'-O-Methyl-uridine

SEQ ID NO: 2450 - RNA, 103 nt, synthetic construct; identical to SEQ ID NO: 1700
  source 1..103: mol_type = other RNA
  modified_base 1: mod_base = OTHER; note = 2'-O-Methyl-cytidine phosphorothioate
  modified_base 2: mod_base = OTHER; note = 2'-O-Methyl-adenosine phosphorothioate
  modified_base 3: mod_base = OTHER; note = 2'-O-Methyl-guanosine phosphorothioate
  modified_base 21: mod_base = OTHER; note = 2'-O-Methyl-guanosine
  modified_base 25: mod_base = OTHER; note = uridine phosphorothioate
  modified_base 28: mod_base = OTHER; note = 2'-O-Methyl-adenosine
  modified_base 29: mod_base = OTHER; note = 2'-O-Methyl-guanosine
  modified_base 30: mod_base = OTHER; note = 2'-O-Methyl-cytidine
  modified_base 31: mod_base = OTHER; note = 2'-O-Methyl-uridine
  modified_base 32: mod_base = OTHER; note = 2'-O-Methyl-adenosine
  modified_base 34: mod_base = OTHER; note = 2'-O-Methyl-adenosine
  modified_base 35: mod_base = OTHER; note = 2'-O-Methyl-adenosine
  modified_base 36: mod_base = OTHER; note = 2'-O-Methyl-adenosine
  modified_base 37: mod_base = OTHER; note = 2'-O-Methyl-uridine
  modified_base 38: mod_base = OTHER; note = 2'-O-Methyl-adenosine
  modified_base 39: mod_base = OTHER; note = 2'-O-Methyl-guanosine
  modified_base 40: mod_base = OTHER; note = 2'-O-Methyl-cytidine
  modified_base 41: mod_base = OTHER; note = 2'-O-Methyl-adenosine
  modified_base 42: mod_base = OTHER; note = 2'-O-Methyl-adenosine
  modified_base 46: mod_base = OTHER; note = 2'-O-Methyl-adenosine
  modified_base 48: mod_base = OTHER; note = 2'-O-Methyl-adenosine
  modified_base 50: mod_base = OTHER; note = 2'-O-Methyl-uridine
  modified_base 52: mod_base = OTHER; note = 2'-O-Methyl-adenosine
  modified_base 53: mod_base = OTHER; note = 2'-O-Methyl-guanosine
  modified_base 54: mod_base = OTHER; note = 2'-O-Methyl-guanosine
  modified_base 57: mod_base = OTHER; note = 2'-O-Methyl-adenosine
  modified_base 61: mod_base = OTHER; note = 2'-O-Methyl-cytidine
  modified_base 66: mod_base = OTHER; note = 2'-O-Methyl-uridine
  modified_base 67: mod_base = OTHER; note = 2'-O-Methyl-cytidine
  modified_base 70: mod_base = OTHER; note = 2'-O-Methyl-cytidine
  modified_base 71: mod_base = OTHER; note = 2'-O-Methyl-uridine
  modified_base 72: mod_base = OTHER; note = 2'-O-Methyl-uridine
  modified_base 73: mod_base = OTHER; note = 2'-O-Methyl-guanosine
  modified_base 74: mod_base = OTHER; note = 2'-O-Methyl-adenosine
  modified_base 75: mod_base = OTHER; note = 2'-O-Methyl-adenosine
  modified_base 76: mod_base = OTHER; note = 2'-O-Methyl-adenosine
  modified_base 77: mod_base = OTHER; note = 2'-O-Methyl-adenosine
  modified_base 78: mod_base = OTHER; note = 2'-O-Methyl-adenosine
  modified_base 79: mod_base = OTHER; note = 2'-O-Methyl-guanosine
  modified_base 80: mod_base = OTHER; note = 2'-O-Methyl-uridine
  modified_base 82: mod_base = OTHER; note = 2'-O-Methyl-guanosine
  modified_base 83: mod_base = OTHER; note = 2'-O-Methyl-cytidine
  modified_base 84: mod_base = OTHER; note = 2'-O-Methyl-adenosine
  modified_base 85: mod_base = OTHER; note = 2'-O-Methyl-cytidine
  modified_base 86: mod_base = OTHER; note = 2'-O-Methyl-cytidine
  modified_base 87: mod_base = OTHER; note = 2'-O-Methyl-guanosine
  modified_base 89: mod_base = OTHER; note = 2'-O-Methyl-guanosine
  modified_base 92: mod_base = OTHER; note = 2'-O-Methyl-guanosine
  modified_base 93: mod_base = OTHER; note = 2'-O-Methyl-guanosine
  modified_base 94: mod_base = OTHER; note = 2'-O-Methyl-uridine
  modified_base 95: mod_base = OTHER; note = 2'-O-Methyl-guanosine
  modified_base 96: mod_base = OTHER; note = 2'-O-Methyl-cytidine
  modified_base 97: mod_base = OTHER; note = 2'-O-Methyl-uridine phosphorothioate
  modified_base 98: mod_base = OTHER; note = 2'-O-Methyl-uridine phosphorothioate
  modified_base 99: mod_base = OTHER; note = 2'-O-Methyl-uridine phosphorothioate
  modified_base 100: mod_base = OTHER; note = 2'-O-Methyl-uridine

SEQ ID NO: 2451 - RNA, 103 nt, synthetic construct; identical to SEQ ID NO: 1700
  source 1..103: mol_type = other RNA
  modified_base 1: mod_base = OTHER; note = 2'-O-Methyl-cytidine phosphorothioate
  modified_base 2: mod_base = OTHER; note = 2'-O-Methyl-adenosine phosphorothioate
  modified_base 3: mod_base = OTHER; note = 2'-O-Methyl-guanosine phosphorothioate
  modified_base 21: mod_base = OTHER; note = 2'-O-Methyl-guanosine
  modified_base 25: mod_base = OTHER; note = uridine phosphorothioate
  modified_base 28: mod_base = OTHER; note = 2'-O-Methyl-adenosine
  modified_base 29: mod_base = OTHER; note = 2'-O-Methyl-guanosine
  modified_base 30: mod_base = OTHER; note = 2'-O-Methyl-cytidine
  modified_base 31: mod_base = OTHER; note = 2'-O-Methyl-uridine
  modified_base 32: mod_base = OTHER; note = 2'-O-Methyl-adenosine
  modified_base 34: mod_base = OTHER; note = 2'-O-Methyl-adenosine
  modified_base 35: mod_base = OTHER; note = 2'-O-Methyl-adenosine
  modified_base 36: mod_base = OTHER; note = 2'-O-Methyl-adenosine
  modified_base 37: mod_base = OTHER; note = 2'-O-Methyl-uridine
  modified_base 38: mod_base = OTHER; note = 2'-O-Methyl-adenosine
  modified_base 39: mod_base = OTHER; note = 2'-O-Methyl-guanosine
  modified_base 40: mod_base = OTHER; note = 2'-O-Methyl-cytidine
  modified_base 41: mod_base = OTHER; note = 2'-O-Methyl-adenosine
  modified_base 42: mod_base = OTHER; note = 2'-O-Methyl-adenosine
  modified_base 46: mod_base = OTHER; note = 2'-O-Methyl-adenosine
  modified_base 48: mod_base = OTHER; note = 2'-O-Methyl-adenosine
  modified_base 50: mod_base = OTHER; note = 2'-O-Methyl-uridine
  modified_base 52: mod_base = OTHER; note = 2'-O-Methyl-adenosine
  modified_base 53: mod_base = OTHER; note = 2'-O-Methyl-guanosine
  modified_base 54: mod_base = OTHER; note = 2'-O-Methyl-guanosine
  modified_base 57: mod_base = OTHER; note = 2'-O-Methyl-adenosine
  modified_base 61: mod_base = OTHER; note = 2'-O-Methyl-cytidine
  modified_base 66: mod_base = OTHER; note = 2'-O-Methyl-uridine
  modified_base 67: mod_base = OTHER; note = 2'-O-Methyl-cytidine
  modified_base 70: mod_base = OTHER; note = 2'-O-Methyl-cytidine
  modified_base 71: mod_base = OTHER; note = 2'-O-Methyl-uridine
  modified_base 72: mod_base = OTHER; note = 2'-O-Methyl-uridine
  modified_base 73: mod_base = OTHER; note = 2'-O-Methyl-guanosine
  modified_base 74: mod_base = OTHER; note = 2'-O-Methyl-adenosine
  modified_base 75: mod_base = OTHER; note = 2'-O-Methyl-adenosine
  modified_base 76: mod_base = OTHER; note = 2'-O-Methyl-adenosine
  modified_base 77: mod_base = OTHER; note = 2'-O-Methyl-adenosine
  modified_base 78: mod_base = OTHER; note = 2'-O-Methyl-adenosine
  modified_base 79: mod_base = OTHER; note = 2'-O-Methyl-guanosine
  modified_base 80: mod_base = OTHER; note = 2'-O-Methyl-uridine
  modified_base 82: mod_base = OTHER; note = 2'-O-Methyl-guanosine
  modified_base 83: mod_base = OTHER; note = 2'-O-Methyl-cytidine
  modified_base 84: mod_base = OTHER; note = 2'-O-Methyl-adenosine
  modified_base 85: mod_base = OTHER; note = 2'-O-Methyl-cytidine
  modified_base 86: mod_base = OTHER; note = 2'-O-Methyl-cytidine
  modified_base 87: mod_base = OTHER; note = 2'-O-Methyl-guanosine
  modified_base 89: mod_base = OTHER; note = 2'-O-Methyl-guanosine
  modified_base 91: mod_base = OTHER; note = 2'-O-Methyl-cytidine
  modified_base 92: mod_base = OTHER; note = 2'-O-Methyl-guanosine
  modified_base 93: mod_base = OTHER; note = 2'-O-Methyl-guanosine
  modified_base 94: mod_base = OTHER; note = 2'-O-Methyl-uridine
  modified_base 95: mod_base = OTHER; note = 2'-O-Methyl-guanosine
  modified_base 96: mod_base = OTHER; note = 2'-O-Methyl-cytidine
  modified_base 97: mod_base = OTHER; note = 2'-O-Methyl-uridine phosphorothioate
  modified_base 98: mod_base = OTHER; note = 2'-O-Methyl-uridine phosphorothioate
  modified_base 99: mod_base = OTHER; note = 2'-O-Methyl-uridine phosphorothioate
  modified_base 100: mod_base = OTHER; note = 2'-O-Methyl-uridine

SEQ ID NO: 2452 - RNA, 103 nt, synthetic construct; identical to SEQ ID NO: 1700
  source 1..103: mol_type = other RNA
  modified_base 1: mod_base = OTHER; note = 2'-O-Methyl-cytidine phosphorothioate
  modified_base 2: mod_base = OTHER; note = 2'-O-Methyl-adenosine phosphorothioate
  modified_base 3: mod_base = OTHER; note = 2'-O-Methyl-guanosine phosphorothioate
  modified_base 21: mod_base = OTHER; note = 2'-O-Methyl-guanosine
  modified_base 25: mod_base = OTHER; note = uridine phosphorothioate
  modified_base 28: mod_base = OTHER; note = 2'-O-Methyl-adenosine
  modified_base 29: mod_base = OTHER; note = 2'-O-Methyl-guanosine
  modified_base 30: mod_base = OTHER; note = 2'-O-Methyl-cytidine
  modified_base 31: mod_base = OTHER; note = 2'-O-Methyl-uridine
  modified_base 32: mod_base = OTHER; note = 2'-O-Methyl-adenosine
  modified_base 34: mod_base = OTHER; note = 2'-O-Methyl-adenosine
  modified_base 35: mod_base = OTHER; note = 2'-O-Methyl-adenosine
  modified_base 36: mod_base = OTHER; note = 2'-O-Methyl-adenosine
  modified_base 37: mod_base = OTHER; note = 2'-O-Methyl-uridine
  modified_base 38: mod_base = OTHER; note = 2'-O-Methyl-adenosine
  modified_base 39: mod_base = OTHER; note = 2'-O-Methyl-guanosine
  modified_base 40: mod_base = OTHER; note = 2'-O-Methyl-cytidine
  modified_base 41: mod_base = OTHER; note = 2'-O-Methyl-adenosine
  modified_base 42: mod_base = OTHER; note = 2'-O-Methyl-adenosine
  modified_base 46: mod_base = OTHER; note = 2'-O-Methyl-adenosine
  modified_base 48: mod_base = OTHER; note = 2'-O-Methyl-adenosine
  modified_base 50: mod_base = OTHER; note = 2'-O-Methyl-uridine
  modified_base 52: mod_base = OTHER; note = 2'-O-Methyl-adenosine
  modified_base 53: mod_base = OTHER; note = 2'-O-Methyl-guanosine
  modified_base 54: mod_base = OTHER; note = 2'-O-Methyl-guanosine
  modified_base 55: mod_base = OTHER; note = 2'-O-Methyl-cytidine
  modified_base 56: mod_base = OTHER; note = 2'-O-Methyl-uridine
  modified_base 57: mod_base = OTHER; note = 2'-O-Methyl-adenosine
  modified_base 60: mod_base = OTHER; note = 2'-O-Methyl-cytidine
  modified_base 61: mod_base = OTHER; note = 2'-O-Methyl-cytidine
  modified_base 66: mod_base = OTHER; note = 2'-O-Methyl-uridine
  modified_base 67: mod_base = OTHER; note = 2'-O-Methyl-cytidine
  modified_base 70: mod_base = OTHER; note = 2'-O-Methyl-cytidine
  modified_base 71: mod_base = OTHER; note = 2'-O-Methyl-uridine
  modified_base 72: mod_base = OTHER; note = 2'-O-Methyl-uridine
  modified_base 74: mod_base = OTHER; note = 2'-O-Methyl-adenosine
  modified_base 75: mod_base = OTHER; note = 2'-O-Methyl-adenosine
  modified_base 76: mod_base = OTHER; note = 2'-O-Methyl-adenosine
  modified_base 77: mod_base = OTHER; note = 2'-O-Methyl-adenosine
  modified_base 78: mod_base = OTHER; note = 2'-O-Methyl-adenosine
  modified_base 79: mod_base = OTHER; note = 2'-O-Methyl-guanosine
  modified_base 80: mod_base = OTHER; note = 2'-O-Methyl-uridine
  modified_base 82: mod_base = OTHER; note = 2'-O-Methyl-guanosine
  modified_base 83: mod_base = OTHER; note = 2'-O-Methyl-cytidine
  modified_base 84: mod_base = OTHER; note = 2'-O-Methyl-adenosine
  modified_base 85: mod_base = OTHER; note = 2'-O-Methyl-cytidine
  modified_base 86: mod_base = OTHER; note = 2'-O-Methyl-cytidine
  modified_base 87: mod_base = OTHER; note = 2'-O-Methyl-guanosine
  modified_base 89: mod_base = OTHER; note = 2'-O-Methyl-guanosine
  modified_base 92: mod_base = OTHER; note = 2'-O-Methyl-guanosine
  modified_base 93: mod_base = OTHER; note = 2'-O-Methyl-guanosine
  modified_base 94: mod_base = OTHER; note = 2'-O-Methyl-uridine
  modified_base 95: mod_base = OTHER; note = 2'-O-Methyl-guanosine
  modified_base 96: mod_base = OTHER; note = 2'-O-Methyl-cytidine
  modified_base 97: mod_base = OTHER; note = 2'-O-Methyl-uridine phosphorothioate
  modified_base 98: mod_base = OTHER; note = 2'-O-Methyl-uridine phosphorothioate
  modified_base 99: mod_base = OTHER; note = 2'-O-Methyl-uridine phosphorothioate
  modified_base 100: mod_base = OTHER; note = 2'-O-Methyl-uridine

SEQ ID NO: 2453 - RNA, 103 nt, synthetic construct; identical to SEQ ID NO: 1643
  source 1..103: mol_type = other RNA
  modified_base 1: mod_base = OTHER; note = 2'-O-Methyl-cytidine phosphorothioate
  modified_base 2: mod_base = OTHER; note = 2'-O-Methyl-cytidine phosphorothioate
  modified_base 3: mod_base = OTHER; note = 2'-O-Methyl-cytidine phosphorothioate
  modified_base 21: mod_base = OTHER; note = 2'-O-Methyl-guanosine
  modified_base 28: mod_base = OTHER; note = 2'-O-Methyl-adenosine
  modified_base 29: mod_base = OTHER; note = 2'-O-Methyl-guanosine
  modified_base 30: mod_base = OTHER; note = 2'-O-Methyl-cytidine
  modified_base 31: mod_base = OTHER; note = 2'-O-Methyl-uridine
  modified_base 32: mod_base = OTHER; note = 2'-O-Methyl-adenosine
  modified_base 33: mod_base = OTHER; note = 2'-O-Methyl-guanosine
  modified_base 34: mod_base = OTHER; note = 2'-O-Methyl-adenosine
  modified_base 35: mod_base = OTHER; note = 2'-O-Methyl-adenosine
  modified_base 36: mod_base = OTHER; note = 2'-O-Methyl-adenosine
  modified_base 37: mod_base = OTHER; note = 2'-O-Methyl-uridine
  modified_base 38: mod_base = OTHER; note = 2'-O-Methyl-adenosine
  modified_base 39: mod_base = OTHER; note = 2'-O-Methyl-guanosine
  modified_base 40: mod_base = OTHER; note = 2'-O-Methyl-cytidine
  modified_base 41: mod_base = OTHER; note = 2'-O-Methyl-adenosine
  modified_base 42: mod_base = OTHER; note = 2'-O-Methyl-adenosine
  modified_base 45: mod_base = OTHER; note = uridine phosphorothioate
  modified_base 46: mod_base = OTHER; note = 2'-O-Methyl-adenosine
  modified_base 48: mod_base = OTHER; note = 2'-O-Methyl-adenosine
  modified_base 50: mod_base = OTHER; note = 2'-O-Methyl-uridine
  modified_base 52: mod_base = OTHER; note = 2'-O-Methyl-adenosine
  modified_base 53: mod_base = OTHER; note = 2'-O-Methyl-guanosine
  modified_base 54: mod_base = OTHER; note = 2'-O-Methyl-guanosine
  modified_base 55: mod_base = OTHER; note = 2'-O-Methyl-cytidine
  modified_base 56: mod_base = OTHER; note = 2'-O-Methyl-uridine
  modified_base 57: mod_base = OTHER; note = 2'-O-Methyl-adenosine
  modified_base 60: mod_base = OTHER; note = 2'-O-Methyl-cytidine
  modified_base 61: mod_base = OTHER; note = 2'-O-Methyl-cytidine
  modified_base 64: mod_base = OTHER; note = uridine phosphorothioate
  modified_base 66: mod_base = OTHER; note = 2'-O-Methyl-uridine
  modified_base 67: mod_base = OTHER; note = 2'-O-Methyl-cytidine
  modified_base 70: mod_base = OTHER; note = 2'-O-Methyl-cytidine
  modified_base 71: mod_base = OTHER; note = 2'-O-Methyl-uridine
  modified_base 72: mod_base = OTHER; note = 2'-O-Methyl-uridine
  modified_base 73: mod_base = OTHER; note = 2'-O-Methyl-guanosine
  modified_base 74: mod_base = OTHER; note = 2'-O-Methyl-adenosine
  modified_base 75: mod_base = OTHER; note = 2'-O-Methyl-adenosine
  modified_base 76: mod_base = OTHER; note = 2'-O-Methyl-adenosine
  modified_base 77: mod_base = OTHER; note = 2'-O-Methyl-adenosine
  modified_base 78: mod_base = OTHER; note = 2'-O-Methyl-adenosine
  modified_base 79: mod_base = OTHER; note = 2'-O-Methyl-guanosine
  modified_base 80: mod_base = OTHER; note = 2'-O-Methyl-uridine
  modified_base 81: mod_base = OTHER; note = 2'-O-Methyl-guanosine
  modified_base 83: mod_base = OTHER; note = 2'-O-Methyl-cytidine
  modified_base 84: mod_base = OTHER; note = 2'-O-Methyl-adenosine
  modified_base 85: mod_base = OTHER; note = 2'-O-Methyl-cytidine
  modified_base 86: mod_base = OTHER; note = 2'-O-Methyl-cytidine
  modified_base 87: mod_base = OTHER; note = 2'-O-Methyl-guanosine
  modified_base 88: mod_base = OTHER; note = 2'-O-Methyl-adenosine
  modified_base 89: mod_base = OTHER; note = 2'-O-Methyl-guanosine
  modified_base 90: mod_base = OTHER; note = 2'-O-Methyl-uridine
  modified_base 91: mod_base = OTHER; note = 2'-O-Methyl-cytidine
  modified_base 92: mod_base = OTHER; note = 2'-O-Methyl-guanosine
  modified_base 93: mod_base = OTHER; note = 2'-O-Methyl-guanosine
  modified_base 94: mod_base = OTHER; note = 2'-O-Methyl-uridine
  modified_base 95: mod_base = OTHER; note = 2'-O-Methyl-guanosine
  modified_base 96: mod_base = OTHER; note = 2'-O-Methyl-cytidine
  modified_base 97: mod_base = OTHER; note = 2'-O-Methyl-uridine phosphorothioate
  modified_base 98: mod_base = OTHER; note = 2'-O-Methyl-uridine phosphorothioate
  modified_base 99: mod_base = OTHER; note = 2'-O-Methyl-uridine phosphorothioate
  modified_base 100: mod_base = OTHER; note = 2'-O-Methyl-uridine

SEQ ID NO: 2454 - RNA, 103 nt, synthetic construct; identical to SEQ ID NO: 1643
  source 1..103: mol_type = other RNA
  modified_base 1: mod_base = OTHER; note = 2'-O-Methyl-cytidine phosphorothioate
  modified_base 2: mod_base = OTHER; note = 2'-O-Methyl-cytidine phosphorothioate
  modified_base 3: mod_base = OTHER; note = 2'-O-Methyl-cytidine phosphorothioate
  modified_base 21: mod_base = OTHER; note = 2'-O-Methyl-guanosine
  modified_base 28: mod_base = OTHER; note = 2'-O-Methyl-adenosine
  modified_base 29: mod_base = OTHER; note = 2'-O-Methyl-guanosine
  modified_base 30: mod_base = OTHER; note = 2'-O-Methyl-cytidine
  modified_base 31: mod_base = OTHER; note = 2'-O-Methyl-uridine
  modified_base 32: mod_base = OTHER; note = 2'-O-Methyl-adenosine
  modified_base 34: mod_base = OTHER; note = 2'-O-Methyl-adenosine
  modified_base 35: mod_base = OTHER; note = 2'-O-Methyl-adenosine
  modified_base 36: mod_base = OTHER; note = 2'-O-Methyl-adenosine
  modified_base 37: mod_base = OTHER; note = 2'-O-Methyl-uridine
  modified_base 38: mod_base = OTHER; note = 2'-O-Methyl-adenosine
  modified_base 39: mod_base = OTHER; note = 2'-O-Methyl-guanosine
  modified_base 40: mod_base = OTHER; note = 2'-O-Methyl-cytidine
  modified_base 41: mod_base = OTHER; note = 2'-O-Methyl-adenosine
  modified_base 42: mod_base = OTHER; note = 2'-O-Methyl-adenosine
  modified_base 45: mod_base = OTHER; note = uridine phosphorothioate
  modified_base 46: mod_base = OTHER; note = 2'-O-Methyl-adenosine
  modified_base 48: mod_base = OTHER; note = 2'-O-Methyl-adenosine
  modified_base 50: mod_base = OTHER; note = 2'-O-Methyl-uridine
  modified_base 52: mod_base = OTHER; note = 2'-O-Methyl-adenosine
  modified_base 53: mod_base = OTHER; note = 2'-O-Methyl-guanosine
  modified_base 54: mod_base = OTHER; note = 2'-O-Methyl-guanosine
  modified_base 55: mod_base = OTHER; note = 2'-O-Methyl-cytidine
  modified_base 56: mod_base = OTHER; note = 2'-O-Methyl-uridine
  modified_base 57: mod_base = OTHER; note = 2'-O-Methyl-adenosine
  modified_base 60: mod_base = OTHER; note = 2'-O-Methyl-cytidine
  modified_base 61: mod_base = OTHER; note = 2'-O-Methyl-cytidine
  modified_base 64: mod_base = OTHER; note = uridine phosphorothioate
  modified_base 66: mod_base = OTHER; note = 2'-O-Methyl-uridine
  modified_base 67: mod_base = OTHER; note = 2'-O-Methyl-cytidine
  modified_base 70: mod_base = OTHER; note = 2'-O-Methyl-cytidine
  modified_base 71: mod_base = OTHER; note = 2'-O-Methyl-uridine
  modified_base 72: mod_base = OTHER; note = 2'-O-Methyl-uridine
  modified_base 74: mod_base = OTHER; note = 2'-O-Methyl-adenosine
  modified_base 75: mod_base = OTHER; note = 2'-O-Methyl-adenosine
  modified_base 76: mod_base = OTHER; note = 2'-O-Methyl-adenosine
  modified_base 77: mod_base = OTHER; note = 2'-O-Methyl-adenosine
  modified_base 78: mod_base = OTHER; note = 2'-O-Methyl-adenosine
  modified_base 79: mod_base = OTHER; note = 2'-O-Methyl-guanosine
  modified_base 80: mod_base = OTHER; note = 2'-O-Methyl-uridine
  modified_base 81: mod_base = OTHER; note = 2'-O-Methyl-guanosine
  modified_base 83: mod_base = OTHER; note = 2'-O-Methyl-cytidine
  modified_base 84: mod_base = OTHER; note = 2'-O-Methyl-adenosine
  modified_base 85: mod_base = OTHER; note = 2'-O-Methyl-cytidine
  modified_base 86: mod_base = OTHER; note = 2'-O-Methyl-cytidine
  modified_base 87: mod_base = OTHER; note = 2'-O-Methyl-guanosine
  modified_base 88: mod_base = OTHER; note = 2'-O-Methyl-adenosine
  modified_base 89: mod_base = OTHER; note = 2'-O-Methyl-guanosine
  modified_base 90: mod_base = OTHER; note = 2'-O-Methyl-uridine
  modified_base 91: mod_base = OTHER; note = 2'-O-Methyl-cytidine
  modified_base 92: mod_base = OTHER; note = 2'-O-Methyl-guanosine
  modified_base 93: mod_base = OTHER; note = 2'-O-Methyl-guanosine
  modified_base 94: mod_base = OTHER; note = 2'-O-Methyl-uridine
  modified_base 95: mod_base = OTHER; note = 2'-O-Methyl-guanosine
  modified_base 96: mod_base = OTHER; note = 2'-O-Methyl-cytidine
  modified_base 97: mod_base = OTHER; note = 2'-O-Methyl-uridine phosphorothioate
  modified_base 98: mod_base = OTHER; note = 2'-O-Methyl-uridine phosphorothioate
  modified_base 99: mod_base = OTHER; note = 2'-O-Methyl-uridine phosphorothioate
  modified_base 100: mod_base = OTHER; note = 2'-O-Methyl-uridine

SEQ ID NO: 2455 - RNA, 103 nt, synthetic construct; identical to SEQ ID NO: 1699
  source 1..103: mol_type = other RNA
  modified_base 1: mod_base = OTHER; note = 2'-O-Methyl-guanosine phosphorothioate
  modified_base 2: mod_base = OTHER; note = 2'-O-Methyl-adenosine phosphorothioate
  modified_base 3: mod_base = OTHER; note = 2'-O-Methyl-guanosine phosphorothioate
  modified_base 21: mod_base = OTHER; note = 2'-O-Methyl-guanosine
  modified_base 28: mod_base = OTHER; note = 2'-O-Methyl-adenosine
  modified_base 29: mod_base = OTHER; note = 2'-O-Methyl-guanosine
  modified_base 30: mod_base = OTHER; note = 2'-O-Methyl-cytidine
  modified_base 31: mod_base = OTHER; note = 2'-O-Methyl-uridine
  modified_base 32: mod_base = OTHER; note = 2'-O-Methyl-adenosine
  modified_base 33: mod_base = OTHER; note = 2'-O-Methyl-guanosine
  modified_base 34: mod_base = OTHER; note = 2'-O-Methyl-adenosine
  modified_base 35: mod_base = OTHER; note = 2'-O-Methyl-adenosine
  modified_base 36: mod_base = OTHER; note = 2'-O-Methyl-adenosine
  modified_base 37: mod_base = OTHER; note = 2'-O-Methyl-uridine
  modified_base 38: mod_base = OTHER; note = 2'-O-Methyl-adenosine
  modified_base 39: mod_base = OTHER; note = 2'-O-Methyl-guanosine
  modified_base 40: mod_base = OTHER; note = 2'-O-Methyl-cytidine
  modified_base 41: mod_base = OTHER; note = 2'-O-Methyl-adenosine
  modified_base 42: mod_base = OTHER; note = 2'-O-Methyl-adenosine
  modified_base 45: mod_base = OTHER; note = uridine phosphorothioate
  modified_base 46: mod_base = OTHER; note = 2'-O-Methyl-adenosine
  modified_base 48: mod_base = OTHER; note = 2'-O-Methyl-adenosine
  modified_base 50: mod_base = OTHER; note = 2'-O-Methyl-uridine
  modified_base 52: mod_base = OTHER; note = 2'-O-Methyl-adenosine
  modified_base 53: mod_base = OTHER; note = 2'-O-Methyl-guanosine
  modified_base 54: mod_base = OTHER; note = 2'-O-Methyl-guanosine
  modified_base 55: mod_base = OTHER; note = 2'-O-Methyl-cytidine
  modified_base 56: mod_base = OTHER; note = 2'-O-Methyl-uridine
  modified_base 57: mod_base = OTHER; note = 2'-O-Methyl-adenosine
  modified_base 60: mod_base = OTHER; note = 2'-O-Methyl-cytidine
  modified_base 61: mod_base = OTHER; note = 2'-O-Methyl-cytidine
  modified_base 64: mod_base = OTHER; note = uridine phosphorothioate
  modified_base 66: mod_base = OTHER; note = 2'-O-Methyl-uridine
  modified_base 67: mod_base = OTHER; note = 2'-O-Methyl-cytidine
  modified_base 70: mod_base = OTHER; note = 2'-O-Methyl-cytidine
  modified_base 71: mod_base = OTHER; note = 2'-O-Methyl-uridine
  modified_base 72: mod_base = OTHER; note = 2'-O-Methyl-uridine
  modified_base 73: mod_base = OTHER; note = 2'-O-Methyl-guanosine
  modified_base 74: mod_base = OTHER; note = 2'-O-Methyl-adenosine
  modified_base 75: mod_base = OTHER; note = 2'-O-Methyl-adenosine
  modified_base 76: mod_base = OTHER; note = 2'-O-Methyl-adenosine
  modified_base 77: mod_base = OTHER; note = 2'-O-Methyl-adenosine
  modified_base 78: mod_base = OTHER; note = 2'-O-Methyl-adenosine
  modified_base 79: mod_base = OTHER; note = 2'-O-Methyl-guanosine
  modified_base 80: mod_base = OTHER; note = 2'-O-Methyl-uridine
  modified_base 81: mod_base = OTHER; note = 2'-O-Methyl-guanosine
  modified_base 83: mod_base = OTHER; note = 2'-O-Methyl-cytidine
  modified_base 84: mod_base = OTHER; note = 2'-O-Methyl-adenosine
  modified_base 85: mod_base = OTHER; note = 2'-O-Methyl-cytidine
  modified_base 86: mod_base = OTHER; note = 2'-O-Methyl-cytidine
  modified_base 87: mod_base = OTHER; note = 2'-O-Methyl-guanosine
  modified_base 88: mod_base = OTHER; note = 2'-O-Methyl-adenosine
  modified_base 89: mod_base = OTHER; note = 2'-O-Methyl-guanosine
  modified_base 90: mod_base = OTHER; note = 2'-O-Methyl-uridine
  modified_base 91: mod_base = OTHER; note = 2'-O-Methyl-cytidine
  modified_base 92: mod_base = OTHER; note = 2'-O-Methyl-guanosine
  modified_base 93: mod_base = OTHER; note = 2'-O-Methyl-guanosine
  modified_base 94: mod_base = OTHER; note = 2'-O-Methyl-uridine
  modified_base 95: mod_base = OTHER; note = 2'-O-Methyl-guanosine
  modified_base 96: mod_base = OTHER; note = 2'-O-Methyl-cytidine
  modified_base 97: mod_base = OTHER; note = 2'-O-Methyl-uridine phosphorothioate
  modified_base 98: mod_base = OTHER; note = 2'-O-Methyl-uridine phosphorothioate
  modified_base 99: mod_base = OTHER; note = 2'-O-Methyl-uridine phosphorothioate
  modified_base 100: mod_base = OTHER; note = 2'-O-Methyl-uridine

SEQ ID NO: 2456 - RNA, 103 nt, synthetic construct; identical to SEQ ID NO: 1699
  source 1..103: mol_type = other RNA
  modified_base 1: mod_base = OTHER; note = 2'-O-Methyl-guanosine phosphorothioate
  modified_base 2: mod_base = OTHER; note = 2'-O-Methyl-adenosine phosphorothioate
  modified_base 3: mod_base = OTHER; note = 2'-O-Methyl-guanosine phosphorothioate
  modified_base 21: mod_base = OTHER; note = 2'-O-Methyl-guanosine
  modified_base 28: mod_base = OTHER; note = 2'-O-Methyl-adenosine
  modified_base 29: mod_base = OTHER; note = 2'-O-Methyl-guanosine
  modified_base 30: mod_base = OTHER; note = 2'-O-Methyl-cytidine
  modified_base 31: mod_base = OTHER; note = 2'-O-Methyl-uridine
  modified_base 32: mod_base = OTHER; note = 2'-O-Methyl-adenosine
  modified_base 34: mod_base = OTHER; note = 2'-O-Methyl-adenosine
  modified_base 35: mod_base = OTHER; note = 2'-O-Methyl-adenosine
  modified_base 36: mod_base = OTHER; note = 2'-O-Methyl-adenosine
  modified_base 37: mod_base = OTHER; note = 2'-O-Methyl-uridine
  modified_base 38: mod_base = OTHER; note = 2'-O-Methyl-adenosine
  modified_base 39: mod_base = OTHER; note = 2'-O-Methyl-guanosine
  modified_base 40: mod_base = OTHER; note = 2'-O-Methyl-cytidine
  modified_base 41: mod_base = OTHER; note = 2'-O-Methyl-adenosine
  modified_base 42: mod_base = OTHER; note = 2'-O-Methyl-adenosine
  modified_base 45: mod_base = OTHER; note = uridine phosphorothioate
  modified_base 46: mod_base = OTHER; note = 2'-O-Methyl-adenosine
  modified_base 48: mod_base = OTHER; note = 2'-O-Methyl-adenosine
  modified_base 50: mod_base = OTHER; note = 2'-O-Methyl-uridine
  modified_base 52: mod_base = OTHER; note = 2'-O-Methyl-adenosine
  modified_base 53: mod_base = OTHER; note = 2'-O-Methyl-guanosine
  modified_base 54: mod_base = OTHER; note = 2'-O-Methyl-guanosine
  modified_base 55: mod_base = OTHER; note = 2'-O-Methyl-cytidine
  modified_base 56: mod_base = OTHER; note = 2'-O-Methyl-uridine
  modified_base 57: mod_base = OTHER; note = 2'-O-Methyl-adenosine
  modified_base 60: mod_base = OTHER; note = 2'-O-Methyl-cytidine
  modified_base 61: mod_base = OTHER; note = 2'-O-Methyl-cytidine
  modified_base 64: mod_base = OTHER; note = uridine phosphorothioate
  modified_base 66: mod_base = OTHER; note = 2'-O-Methyl-uridine
  modified_base 67: mod_base = OTHER; note = 2'-O-Methyl-cytidine
  modified_base 70: mod_base = OTHER; note = 2'-O-Methyl-cytidine
  modified_base 71: mod_base = OTHER; note = 2'-O-Methyl-uridine
  modified_base 72: mod_base = OTHER; note = 2'-O-Methyl-uridine
  modified_base 74: mod_base = OTHER; note = 2'-O-Methyl-adenosine
  modified_base 75: mod_base = OTHER; note = 2'-O-Methyl-adenosine
  modified_base 76: mod_base = OTHER; note = 2'-O-Methyl-adenosine
  modified_base 77: mod_base = OTHER; note = 2'-O-Methyl-adenosine
  modified_base 78: mod_base = OTHER; note = 2'-O-Methyl-adenosine
  modified_base 79: mod_base = OTHER; note = 2'-O-Methyl-guanosine
  modified_base 80: mod_base = OTHER; note = 2'-O-Methyl-uridine
  modified_base 81: mod_base = OTHER; note = 2'-O-Methyl-guanosine
  modified_base 83: mod_base = OTHER; note = 2'-O-Methyl-cytidine
  modified_base 84: mod_base = OTHER; note = 2'-O-Methyl-adenosine
  modified_base 85: mod_base = OTHER; note = 2'-O-Methyl-cytidine
  modified_base 86: mod_base = OTHER; note = 2'-O-Methyl-cytidine
  modified_base 87: mod_base = OTHER; note = 2'-O-Methyl-guanosine
  modified_base 88: mod_base = OTHER; note = 2'-O-Methyl-adenosine
  modified_base 89: mod_base = OTHER; note = 2'-O-Methyl-guanosine
  modified_base 90: mod_base = OTHER; note = 2'-O-Methyl-uridine
  modified_base 91: mod_base = OTHER; note = 2'-O-Methyl-cytidine
  modified_base 92: mod_base = OTHER; note = 2'-O-Methyl-guanosine
  modified_base 93: mod_base = OTHER; note = 2'-O-Methyl-guanosine
  modified_base 94: mod_base = OTHER; note = 2'-O-Methyl-uridine
  modified_base 95: mod_base = OTHER; note = 2'-O-Methyl-guanosine
  modified_base 96: mod_base = OTHER; note = 2'-O-Methyl-cytidine
  modified_base 97: mod_base = OTHER; note = 2'-O-Methyl-uridine phosphorothioate
  modified_base 98: mod_base = OTHER; note = 2'-O-Methyl-uridine phosphorothioate
  modified_base 99: mod_base = OTHER; note = 2'-O-Methyl-uridine phosphorothioate
  modified_base 100: mod_base = OTHER; note = 2'-O-Methyl-uridine

SEQ ID NO: 2457 - RNA, 103 nt, synthetic construct; identical to SEQ ID NO: 1700
  source 1..103: mol_type = other RNA
  modified_base 1: mod_base = OTHER; note = 2'-O-Methyl-cytidine phosphorothioate
  modified_base 2: mod_base = OTHER; note = 2'-O-Methyl-adenosine phosphorothioate
  modified_base 3: mod_base = OTHER; note = 2'-O-Methyl-guanosine phosphorothioate
  modified_base 21: mod_base = OTHER; note = 2'-O-Methyl-guanosine
  modified_base 28: mod_base = OTHER; note = 2'-O-Methyl-adenosine
  modified_base 29: mod_base = OTHER; note = 2'-O-Methyl-guanosine
  modified_base 30: mod_base = OTHER; note = 2'-O-Methyl-cytidine
  modified_base 31: mod_base = OTHER; note = 2'-O-Methyl-uridine
  modified_base 32: mod_base = OTHER; note = 2'-O-Methyl-adenosine
  modified_base 33: mod_base = OTHER; note = 2'-O-Methyl-guanosine
  modified_base 34: mod_base = OTHER; note = 2'-O-Methyl-adenosine
  modified_base 35: mod_base = OTHER; note = 2'-O-Methyl-adenosine
  modified_base 36: mod_base = OTHER; note = 2'-O-Methyl-adenosine
  modified_base 37: mod_base = OTHER; note = 2'-O-Methyl-uridine
  modified_base 38: mod_base = OTHER; note = 2'-O-Methyl-adenosine
  modified_base 39: mod_base = OTHER; note = 2'-O-Methyl-guanosine
  modified_base 40: mod_base = OTHER; note = 2'-O-Methyl-cytidine
  modified_base 41: mod_base = OTHER; note = 2'-O-Methyl-adenosine
  modified_base 42: mod_base = OTHER; note = 2'-O-Methyl-adenosine
  modified_base 45: mod_base = OTHER; note = uridine phosphorothioate
  modified_base 46: mod_base = OTHER; note = 2'-O-Methyl-adenosine
  modified_base 48: mod_base = OTHER; note = 2'-O-Methyl-adenosine
  modified_base 50: mod_base = OTHER; note = 2'-O-Methyl-uridine
  modified_base 52: mod_base = OTHER; note = 2'-O-Methyl-adenosine
  modified_base 53: mod_base = OTHER; note = 2'-O-Methyl-guanosine
  modified_base 54: mod_base = OTHER; note = 2'-O-Methyl-guanosine
  modified_base 57: mod_base = OTHER; note = 2'-O-Methyl-adenosine
  modified_base 61: mod_base = OTHER; note = 2'-O-Methyl-cytidine
  modified_base 64: mod_base = OTHER; note = uridine phosphorothioate
  modified_base 66: mod_base = OTHER; note = 2'-O-Methyl-uridine
  modified_base 67: mod_base = OTHER; note = 2'-O-Methyl-cytidine
  modified_base 70: mod_base = OTHER; note = 2'-O-Methyl-cytidine
  modified_base 71: mod_base = OTHER; note = 2'-O-Methyl-uridine
  modified_base 72: mod_base = OTHER; note = 2'-O-Methyl-uridine
  modified_base 74: mod_base = OTHER; note = 2'-O-Methyl-adenosine
  modified_base 75: mod_base = OTHER; note = 2'-O-Methyl-adenosine
  modified_base 76: mod_base = OTHER; note = 2'-O-Methyl-adenosine
  modified_base 77: mod_base = OTHER; note = 2'-O-Methyl-adenosine
  modified_base 78: mod_base = OTHER; note = 2'-O-Methyl-adenosine
  modified_base 79: mod_base = OTHER; note = 2'-O-Methyl-guanosine
  modified_base 80: mod_base = OTHER; note = 2'-O-Methyl-uridine
  modified_base 82: mod_base = OTHER; note = 2'-O-Methyl-guanosine
  modified_base 83: mod_base = OTHER; note = 2'-O-Methyl-cytidine
  modified_base 84: mod_base = OTHER; note = 2'-O-Methyl-adenosine
  modified_base 85: mod_base = OTHER; note = 2'-O-Methyl-cytidine
  modified_base 86: mod_base = OTHER; note = 2'-O-Methyl-cytidine
  modified_base 87: mod_base = OTHER; note = 2'-O-Methyl-guanosine
  modified_base 89: mod_base = OTHER; note = 2'-O-Methyl-guanosine
  modified_base 92: mod_base = OTHER; note = 2'-O-Methyl-guanosine
  modified_base 93: mod_base = OTHER; note = 2'-O-Methyl-guanosine
  modified_base 94: mod_base = OTHER; note = 2'-O-Methyl-uridine
  modified_base 95: mod_base = OTHER; note = 2'-O-Methyl-guanosine
  modified_base 96: mod_base = OTHER; note = 2'-O-Methyl-cytidine
  modified_base 97: mod_base = OTHER; note = 2'-O-Methyl-uridine phosphorothioate
  modified_base 98: mod_base = OTHER; note = 2'-O-Methyl-uridine phosphorothioate
  modified_base 99: mod_base = OTHER; note = 2'-O-Methyl-uridine phosphorothioate
  modified_base 100: mod_base = OTHER; note = 2'-O-Methyl-uridine

SEQ ID NO: 2458 - RNA, 103 nt, synthetic construct; identical to SEQ ID NO: 1700
  source 1..103: mol_type = other RNA
  modified_base 1: mod_base = OTHER; note = 2'-O-Methyl-cytidine phosphorothioate
  modified_base 2: mod_base = OTHER; note = 2'-O-Methyl-adenosine phosphorothioate
  modified_base 3: mod_base = OTHER; note = 2'-O-Methyl-guanosine phosphorothioate
  modified_base 21: mod_base = OTHER; note = 2'-O-Methyl-guanosine
  modified_base 28: mod_base = OTHER; note = 2'-O-Methyl-adenosine
  modified_base 29: mod_base = OTHER; note = 2'-O-Methyl-guanosine
  modified_base 30: mod_base = OTHER; note = 2'-O-Methyl-cytidine
  modified_base 31: mod_base = OTHER; note = 2'-O-Methyl-uridine
  modified_base 32: mod_base = OTHER; note = 2'-O-Methyl-adenosine
  modified_base 33: mod_base = OTHER; note = 2'-O-Methyl-guanosine
  modified_base 34: mod_base = OTHER; note = 2'-O-Methyl-adenosine
  modified_base 35: mod_base = OTHER; note = 2'-O-Methyl-adenosine
  modified_base 36: mod_base = OTHER; note = 2'-O-Methyl-adenosine
  modified_base 37: mod_base = OTHER; note = 2'-O-Methyl-uridine
  modified_base 38: mod_base = OTHER; note = 2'-O-Methyl-adenosine
  modified_base 39: mod_base = OTHER; note = 2'-O-Methyl-guanosine
  modified_base 40: mod_base = OTHER; note = 2'-O-Methyl-cytidine
  modified_base 41: mod_base = OTHER; note = 2'-O-Methyl-adenosine
  modified_base 42: mod_base = OTHER; note = 2'-O-Methyl-adenosine
  modified_base 45: mod_base = OTHER; note = uridine phosphorothioate
  modified_base 46: mod_base = OTHER; note = 2'-O-Methyl-adenosine
  modified_base 48: mod_base = OTHER; note = 2'-O-Methyl-adenosine
  modified_base 50: mod_base = OTHER; note = 2'-O-Methyl-uridine
  modified_base 52: mod_base = OTHER; note = 2'-O-Methyl-adenosine
  modified_base 53: mod_base = OTHER; note = 2'-O-Methyl-guanosine
  modified_base 54: mod_base = OTHER; note = 2'-O-Methyl-guanosine
  modified_base 55: mod_base = OTHER; note = 2'-O-Methyl-cytidine
  modified_base 56: mod_base = OTHER; note = 2'-O-Methyl-uridine
  modified_base 57: mod_base = OTHER; note = 2'-O-Methyl-adenosine
  modified_base 60: mod_base = OTHER; note = 2'-O-Methyl-cytidine
  modified_base 61: mod_base = OTHER; note = 2'-O-Methyl-cytidine
  modified_base 64: mod_base = OTHER; note = uridine phosphorothioate
  modified_base 66: mod_base = OTHER; note = 2'-O-Methyl-uridine
  modified_base 67: mod_base = OTHER; note = 2'-O-Methyl-cytidine
  modified_base 70: mod_base = OTHER; note = 2'-O-Methyl-cytidine
  modified_base 71: mod_base = OTHER; note = 2'-O-Methyl-uridine
  modified_base 72: mod_base = OTHER; note = 2'-O-Methyl-uridine
  modified_base 74: mod_base = OTHER; note = 2'-O-Methyl-adenosine
  modified_base 75: mod_base = OTHER; note = 2'-O-Methyl-adenosine
  modified_base 76: mod_base = OTHER; note = 2'-O-Methyl-adenosine
  modified_base 77: mod_base = OTHER; note = 2'-O-Methyl-adenosine
  modified_base 78: mod_base = OTHER; note = 2'-O-Methyl-adenosine
  modified_base 79: mod_base = OTHER; note = 2'-O-Methyl-guanosine
  modified_base 80: mod_base = OTHER; note = 2'-O-Methyl-uridine
  modified_base 82: mod_base = OTHER; note = 2'-O-Methyl-guanosine
  modified_base 83: mod_base = OTHER; note = 2'-O-Methyl-cytidine
  modified_base 84: mod_base = OTHER; note = 2'-O-Methyl-adenosine
  modified_base 85: mod_base = OTHER; note = 2'-O-Methyl-cytidine
  modified_base 86: mod_base = OTHER; note = 2'-O-Methyl-cytidine
  modified_base 87: mod_base = OTHER; note = 2'-O-Methyl-guanosine
  modified_base 89: mod_base = OTHER; note = 2'-O-Methyl-guanosine
  modified_base 92: mod_base = OTHER; note = 2'-O-Methyl-guanosine
  modified_base 93: mod_base = OTHER; note = 2'-O-Methyl-guanosine
  modified_base 94: mod_base = OTHER; note = 2'-O-Methyl-uridine
  modified_base 95: mod_base = OTHER; note = 2'-O-Methyl-guanosine
  modified_base 96: mod_base = OTHER; note = 2'-O-Methyl-cytidine
  modified_base 97: mod_base = OTHER; note = 2'-O-Methyl-uridine phosphorothioate
  modified_base 98: mod_base = OTHER; note = 2'-O-Methyl-uridine phosphorothioate
  modified_base 99: mod_base = OTHER; note = 2'-O-Methyl-uridine phosphorothioate
  modified_base 100: mod_base = OTHER; note = 2'-O-Methyl-uridine

SEQ ID NO: 2459 - RNA, 103 nt, synthetic construct; identical to SEQ ID NO: 1700
  source 1..103: mol_type = other RNA
  modified_base 1: mod_base = OTHER; note = 2'-O-Methyl-cytidine phosphorothioate
  modified_base 2: mod_base = OTHER; note = 2'-O-Methyl-adenosine phosphorothioate
  modified_base 3: mod_base = OTHER; note = 2'-O-Methyl-guanosine phosphorothioate
  modified_base 21: mod_base = OTHER; note = 2'-O-Methyl-guanosine
  modified_base 28: mod_base = OTHER; note = 2'-O-Methyl-adenosine
  modified_base 29: mod_base = OTHER; note = 2'-O-Methyl-guanosine
  modified_base 30: mod_base = OTHER; note = 2'-O-Methyl-cytidine
  modified_base 31: mod_base = OTHER; note = 2'-O-Methyl-uridine
  modified_base 32: mod_base = OTHER; note = 2'-O-Methyl-adenosine
  modified_base 33: mod_base = OTHER; note = 2'-O-Methyl-guanosine
  modified_base 34: mod_base = OTHER; note = 2'-O-Methyl-adenosine
  modified_base 35: mod_base = OTHER; note = 2'-O-Methyl-adenosine
  modified_base 36: mod_base = OTHER; note = 2'-O-Methyl-adenosine
  modified_base 37: mod_base = OTHER; note = 2'-O-Methyl-uridine
  modified_base 38: mod_base = OTHER; note = 2'-O-Methyl-adenosine
  modified_base 39: mod_base = OTHER; note = 2'-O-Methyl-guanosine
  modified_base 40: mod_base = OTHER; note = 2'-O-Methyl-cytidine
  modified_base 41: mod_base = OTHER; note = 2'-O-Methyl-adenosine
  modified_base 42: mod_base = OTHER; note = 2'-O-Methyl-adenosine
  modified_base 45: mod_base = OTHER; note = uridine phosphorothioate
  modified_base 46: mod_base = OTHER; note = 2'-O-Methyl-adenosine
  modified_base 48: mod_base = OTHER; note = 2'-O-Methyl-adenosine
  modified_base 50: mod_base = OTHER; note = 2'-O-Methyl-uridine
  modified_base 52: mod_base = OTHER; note = 2'-O-Methyl-adenosine
  modified_base 53: mod_base = OTHER; note = 2'-O-Methyl-guanosine
  modified_base 54: mod_base = OTHER; note = 2'-O-Methyl-guanosine
  modified_base 57: mod_base = OTHER; note = 2'-O-Methyl-adenosine
  modified_base 61: mod_base = OTHER; note = 2'-O-Methyl-cytidine
  modified_base 64: mod_base = OTHER; note = uridine phosphorothioate
  modified_base 66: mod_base = OTHER; note = 2'-O-Methyl-uridine
  modified_base 67: mod_base = OTHER; note = 2'-O-Methyl-cytidine
  modified_base 70: mod_base = OTHER; note = 2'-O-Methyl-cytidine
  modified_base 71: mod_base = OTHER; note = 2'-O-Methyl-uridine
  modified_base 72: mod_base = OTHER; note = 2'-O-Methyl-uridine
  modified_base 73: mod_base = OTHER; note = 2'-O-Methyl-guanosine
  modified_base 74: mod_base = OTHER; note = 2'-O-Methyl-adenosine
  modified_base 75: mod_base = OTHER; note = 2'-O-Methyl-adenosine
  modified_base 76: mod_base = OTHER; note = 2'-O-Methyl-adenosine
  modified_base 77: mod_base = OTHER; note = 2'-O-Methyl-adenosine
  modified_base 78: mod_base = OTHER; note = 2'-O-Methyl-adenosine
  modified_base 79: mod_base = OTHER; note = 2'-O-Methyl-guanosine
  modified_base 80: mod_base = OTHER; note = 2'-O-Methyl-uridine
  modified_base 82: mod_base = OTHER; note = 2'-O-Methyl-guanosine
  modified_base 83: mod_base = OTHER; note = 2'-O-Methyl-cytidine
  modified_base 84: mod_base = OTHER; note = 2'-O-Methyl-adenosine
  modified_base 85: mod_base = OTHER; note = 2'-O-Methyl-cytidine
  modified_base 86: mod_base = OTHER; note = 2'-O-Methyl-cytidine
  modified_base 87: mod_base = OTHER; note = 2'-O-Methyl-guanosine
  modified_base 89: mod_base = OTHER; note = 2'-O-Methyl-guanosine
  modified_base 92: mod_base = OTHER; note = 2'-O-Methyl-guanosine
  modified_base 93: mod_base = OTHER; note = 2'-O-Methyl-guanosine
  modified_base 94: mod_base = OTHER; note = 2'-O-Methyl-uridine
  modified_base 95: mod_base = OTHER; note = 2'-O-Methyl-guanosine
  modified_base 96: mod_base = OTHER; note = 2'-O-Methyl-cytidine
  modified_base 97: mod_base = OTHER; note = 2'-O-Methyl-uridine phosphorothioate
  modified_base 98: mod_base = OTHER; note = 2'-O-Methyl-uridine phosphorothioate
  modified_base 99: mod_base = OTHER; note = 2'-O-Methyl-uridine phosphorothioate
  modified_base 100: mod_base = OTHER; note = 2'-O-Methyl-uridine

SEQ ID NO: 2460 - RNA, 103 nt, synthetic construct; identical to SEQ ID NO: 1700
  source 1..103: mol_type = other RNA
  modified_base 1: mod_base = OTHER; note = 2'-O-Methyl-cytidine phosphorothioate
  modified_base 2: mod_base = OTHER; note = 2'-O-Methyl-adenosine phosphorothioate
  modified_base 3: mod_base = OTHER; note = 2'-O-Methyl-guanosine phosphorothioate
  modified_base 21: mod_base = OTHER; note = 2'-O-Methyl-guanosine
  modified_base 28: mod_base = OTHER; note = 2'-O-Methyl-adenosine
  modified_base 29: mod_base = OTHER; note = 2'-O-Methyl-guanosine
  modified_base 30: mod_base = OTHER; note = 2'-O-Methyl-cytidine
  modified_base 31: mod_base = OTHER; note = 2'-O-Methyl-uridine
  modified_base 32: mod_base = OTHER; note = 2'-O-Methyl-adenosine
  modified_base 33: mod_base = OTHER; note = 2'-O-Methyl-guanosine
  modified_base 34: mod_base = OTHER; note = 2'-O-Methyl-adenosine
  modified_base 35: mod_base = OTHER; note = 2'-O-Methyl-adenosine
  modified_base 36: mod_base = OTHER; note = 2'-O-Methyl-adenosine
  modified_base 37: mod_base = OTHER; note = 2'-O-Methyl-uridine
  modified_base 38: mod_base = OTHER; note = 2'-O-Methyl-adenosine
  modified_base 39: mod_base = OTHER; note = 2'-O-Methyl-guanosine
  modified_base 40: mod_base = OTHER; note = 2'-O-Methyl-cytidine
  modified_base 41: mod_base = OTHER; note = 2'-O-Methyl-adenosine
  modified_base 42: mod_base = OTHER; note = 2'-O-Methyl-adenosine
  modified_base 45: mod_base = OTHER; note = uridine phosphorothioate
  modified_base 46: mod_base = OTHER; note = 2'-O-Methyl-adenosine
  modified_base 48: mod_base = OTHER; note = 2'-O-Methyl-adenosine
  modified_base 50: mod_base = OTHER; note = 2'-O-Methyl-uridine
  modified_base 52: mod_base = OTHER; note = 2'-O-Methyl-adenosine
  modified_base 53: mod_base = OTHER; note = 2'-O-Methyl-guanosine
  modified_base 54: mod_base = OTHER; note = 2'-O-Methyl-guanosine
  modified_base 57: mod_base = OTHER; note = 2'-O-Methyl-adenosine
  modified_base 61: mod_base = OTHER; note = 2'-O-Methyl-cytidine
  modified_base 64: mod_base = OTHER; note = uridine phosphorothioate
  modified_base 66: mod_base = OTHER; note = 2'-O-Methyl-uridine
  modified_base 67: mod_base = OTHER; note = 2'-O-Methyl-cytidine
  modified_base 70: mod_base = OTHER; note = 2'-O-Methyl-cytidine
  modified_base 71: mod_base = OTHER; note = 2'-O-Methyl-uridine
  modified_base 72: mod_base = OTHER; note = 2'-O-Methyl-uridine
  modified_base 73: mod_base = OTHER; note = 2'-O-Methyl-guanosine
  modified_base 74: mod_base = OTHER; note = 2'-O-Methyl-adenosine
  modified_base 75: mod_base = OTHER; note = 2'-O-Methyl-adenosine
  modified_base 76: mod_base = OTHER; note = 2'-O-Methyl-adenosine
  modified_base 77: mod_base = OTHER; note = 2'-O-Methyl-adenosine
  modified_base 78: mod_base = OTHER; note = 2'-O-Methyl-adenosine
  modified_base 79: mod_base = OTHER; note = 2'-O-Methyl-guanosine
  modified_base 80: mod_base = OTHER; note = 2'-O-Methyl-uridine
  modified_base 82: mod_base = OTHER; note = 2'-O-Methyl-guanosine
  modified_base 83: mod_base = OTHER; note = 2'-O-Methyl-cytidine
  modified_base 84: mod_base = OTHER; note = 2'-O-Methyl-adenosine
  modified_base 85: mod_base = OTHER; note = 2'-O-Methyl-cytidine
  modified_base 86: mod_base = OTHER; note = 2'-O-Methyl-cytidine
  modified_base 87: mod_base = OTHER; note = 2'-O-Methyl-guanosine
  modified_base 89: mod_base = OTHER; note = 2'-O-Methyl-guanosine
  modified_base 91: mod_base = OTHER; note = 2'-O-Methyl-cytidine
  modified_base 92: mod_base = OTHER; note = 2'-O-Methyl-guanosine
  modified_base 93: mod_base = OTHER; note = 2'-O-Methyl-guanosine
  modified_base 94: mod_base = OTHER; note = 2'-O-Methyl-uridine
  modified_base 95: mod_base = OTHER; note = 2'-O-Methyl-guanosine
  modified_base 96: mod_base = OTHER; note = 2'-O-Methyl-cytidine
  modified_base 97: mod_base = OTHER; note = 2'-O-Methyl-uridine phosphorothioate
  modified_base 98: mod_base = OTHER; note = 2'-O-Methyl-uridine phosphorothioate
  modified_base 99: mod_base = OTHER; note = 2'-O-Methyl-uridine phosphorothioate
  modified_base 100: mod_base = OTHER; note = 2'-O-Methyl-uridine

SEQ ID NO: 2461 - RNA, 103 nt, synthetic construct; identical to SEQ ID NO: 1700
  source 1..103: mol_type = other RNA
  modified_base 1: mod_base = OTHER; note = 2'-O-Methyl-cytidine phosphorothioate
  modified_base 2: mod_base = OTHER; note = 2'-O-Methyl-adenosine phosphorothioate
  modified_base 3: mod_base = OTHER; note = 2'-O-Methyl-guanosine phosphorothioate
  modified_base 21: mod_base = OTHER; note = 2'-O-Methyl-guanosine
  modified_base 28: mod_base = OTHER; note = 2'-O-Methyl-adenosine
  modified_base 29: mod_base = OTHER; note = 2'-O-Methyl-guanosine
  modified_base 30: mod_base = OTHER; note = 2'-O-Methyl-cytidine
  modified_base 31: mod_base = OTHER; note = 2'-O-Methyl-uridine
  modified_base 32: mod_base = OTHER; note = 2'-O-Methyl-adenosine
  modified_base 34: mod_base = OTHER; note = 2'-O-Methyl-adenosine
  modified_base 35: mod_base = OTHER; note = 2'-O-Methyl-adenosine
  modified_base 36: mod_base = OTHER; note = 2'-O-Methyl-adenosine
  modified_base 37: mod_base = OTHER; note = 2'-O-Methyl-uridine
  modified_base 38: mod_base = OTHER; note = 2'-O-Methyl-adenosine
  modified_base 39: mod_base = OTHER; note = 2'-O-Methyl-guanosine
  modified_base 40: mod_base = OTHER; note = 2'-O-Methyl-cytidine
  modified_base 41: mod_base = OTHER; note = 2'-O-Methyl-adenosine
  modified_base 42: mod_base = OTHER; note = 2'-O-Methyl-adenosine
  modified_base 45: mod_base = OTHER; note = uridine phosphorothioate
  modified_base 46: mod_base = OTHER; note = 2'-O-Methyl-adenosine
  modified_base 48: mod_base = OTHER; note = 2'-O-Methyl-adenosine
  modified_base 50: mod_base = OTHER; note = 2'-O-Methyl-uridine
  modified_base 52: mod_base = OTHER; note = 2'-O-Methyl-adenosine
  modified_base 53: mod_base = OTHER; note = 2'-O-Methyl-guanosine
  modified_base 54: mod_base = OTHER; note = 2'-O-Methyl-guanosine
  modified_base 57: mod_base = OTHER; note = 2'-O-Methyl-adenosine
  modified_base 61: mod_base = OTHER; note = 2'-O-Methyl-cytidine
  modified_base 64: mod_base = OTHER; note = uridine phosphorothioate
  modified_base 66: mod_base = OTHER; note = 2'-O-Methyl-uridine
  modified_base 67: mod_base = OTHER; note = 2'-O-Methyl-cytidine
  modified_base 70: mod_base = OTHER; note = 2'-O-Methyl-cytidine
  modified_base 71: mod_base = OTHER; note = 2'-O-Methyl-uridine
  modified_base 72: mod_base = OTHER; note = 2'-O-Methyl-uridine
  modified_base 73: mod_base = OTHER; note = 2'-O-Methyl-guanosine
  modified_base 74: mod_base = OTHER; note = 2'-O-Methyl-adenosine
  modified_base 75: mod_base = OTHER; note = 2'-O-Methyl-adenosine
  modified_base 76: mod_base = OTHER; note = 2'-O-Methyl-adenosine
  modified_base 77: mod_base = OTHER; note = 2'-O-Methyl-adenosine
  modified_base 78: mod_base = OTHER; note = 2'-O-Methyl-adenosine
  modified_base 79: mod_base = OTHER; note = 2'-O-Methyl-guanosine
  modified_base 80: mod_base = OTHER; note = 2'-O-Methyl-uridine
  modified_base 82: mod_base = OTHER; note = 2'-O-Methyl-guanosine
  modified_base 83: mod_base = OTHER; note = 2'-O-Methyl-cytidine
  modified_base 84: mod_base = OTHER; note = 2'-O-Methyl-adenosine
  modified_base 85: mod_base = OTHER; note = 2'-O-Methyl-cytidine
  modified_base 86: mod_base = OTHER; note = 2'-O-Methyl-cytidine
  modified_base 87: mod_base = OTHER; note = 2'-O-Methyl-guanosine
  modified_base 89: mod_base = OTHER; note = 2'-O-Methyl-guanosine
  modified_base 92: mod_base = OTHER; note = 2'-O-Methyl-guanosine
  modified_base 93: mod_base = OTHER; note = 2'-O-Methyl-guanosine
  modified_base 94: mod_base = OTHER; note = 2'-O-Methyl-uridine
  modified_base 95: mod_base = OTHER; note = 2'-O-Methyl-guanosine
  modified_base 96: mod_base = OTHER; note = 2'-O-Methyl-cytidine
  modified_base 97: mod_base = OTHER; note = 2'-O-Methyl-uridine phosphorothioate
  modified_base 98: mod_base = OTHER; note = 2'-O-Methyl-uridine phosphorothioate
  modified_base 99: mod_base = OTHER; note = 2'-O-Methyl-uridine phosphorothioate
  modified_base 100: mod_base = OTHER; note = 2'-O-Methyl-uridine

SEQ ID NO: 2462 - RNA, 103 nt, synthetic construct; identical to SEQ ID NO: 1700
  source 1..103: mol_type = other RNA
  modified_base 1: mod_base = OTHER; note = 2'-O-Methyl-cytidine phosphorothioate
  modified_base 2: mod_base = OTHER; note = 2'-O-Methyl-adenosine phosphorothioate
  modified_base 3: mod_base = OTHER; note = 2'-O-Methyl-guanosine phosphorothioate
  modified_base 21: mod_base = OTHER; note = 2'-O-Methyl-guanosine
  modified_base 28: mod_base = OTHER; note = 2'-O-Methyl-adenosine
  modified_base 29: mod_base = OTHER; note = 2'-O-Methyl-guanosine
  modified_base 30: mod_base = OTHER; note = 2'-O-Methyl-cytidine
  modified_base 31: mod_base = OTHER; note = 2'-O-Methyl-uridine
  modified_base 32: mod_base = OTHER; note = 2'-O-Methyl-adenosine
  modified_base 34: mod_base = OTHER; note = 2'-O-Methyl-adenosine
  modified_base 35: mod_base = OTHER; note = 2'-O-Methyl-adenosine
  modified_base 36: mod_base = OTHER; note = 2'-O-Methyl-adenosine
  modified_base 37: mod_base = OTHER; note = 2'-O-Methyl-uridine
  modified_base 38: mod_base = OTHER; note = 2'-O-Methyl-adenosine
  modified_base 39: mod_base = OTHER; note = 2'-O-Methyl-guanosine
  modified_base 40: mod_base = OTHER; note = 2'-O-Methyl-cytidine
  modified_base 41: mod_base = OTHER; note = 2'-O-Methyl-adenosine
  modified_base 42: mod_base = OTHER; note = 2'-O-Methyl-adenosine
  modified_base 45: mod_base = OTHER; note = uridine phosphorothioate
  modified_base 46: mod_base = OTHER; note = 2'-O-Methyl-adenosine
  modified_base 48: mod_base = OTHER; note = 2'-O-Methyl-adenosine
  modified_base 50: mod_base = OTHER; note = 2'-O-Methyl-uridine
  modified_base 52: mod_base = OTHER; note = 2'-O-Methyl-adenosine
  modified_base 53: mod_base = OTHER; note = 2'-O-Methyl-guanosine
  modified_base 54: mod_base = OTHER; note = 2'-O-Methyl-guanosine
  modified_base 57: mod_base = OTHER; note = 2'-O-Methyl-adenosine
  modified_base 61: mod_base = OTHER; note = 2'-O-Methyl-cytidine
  modified_base 64: mod_base = OTHER; note = uridine phosphorothioate
  modified_base 66: mod_base = OTHER; note = 2'-O-Methyl-uridine
  modified_base 67: mod_base = OTHER; note = 2'-O-Methyl-cytidine
  modified_base 70: mod_base = OTHER; note = 2'-O-Methyl-cytidine
  modified_base 71: mod_base = OTHER; note = 2'-O-Methyl-uridine
  modified_base 72: mod_base = OTHER; note = 2'-O-Methyl-uridine
  modified_base 73: mod_base = OTHER; note = 2'-O-Methyl-guanosine
  modified_base 74: mod_base = OTHER; note = 2'-O-Methyl-adenosine
  modified_base 75: mod_base = OTHER; note = 2'-O-Methyl-adenosine
  modified_base 76: mod_base = OTHER; note = 2'-O-Methyl-adenosine
  modified_base 77: mod_base = OTHER; note = 2'-O-Methyl-adenosine
  modified_base 78: mod_base = OTHER; note = 2'-O-Methyl-adenosine
  modified_base 79: mod_base = OTHER; note = 2'-O-Methyl-guanosine
  modified_base 80: mod_base = OTHER; note = 2'-O-Methyl-uridine
  modified_base 82: mod_base = OTHER; note = 2'-O-Methyl-guanosine
  modified_base 83: mod_base = OTHER; note = 2'-O-Methyl-cytidine
  modified_base 84: mod_base = OTHER; note = 2'-O-Methyl-adenosine
  modified_base 85: mod_base = OTHER; note = 2'-O-Methyl-cytidine
  modified_base 86: mod_base = OTHER; note = 2'-O-Methyl-cytidine
  modified_base 87: mod_base = OTHER; note = 2'-O-Methyl-guanosine
  modified_base 89: mod_base = OTHER; note = 2'-O-Methyl-guanosine
  modified_base 91: mod_base = OTHER; note = 2'-O-Methyl-cytidine
  modified_base 92: mod_base = OTHER; note = 2'-O-Methyl-guanosine
  modified_base 93: mod_base = OTHER; note = 2'-O-Methyl-guanosine
  modified_base 94: mod_base = OTHER; note = 2'-O-Methyl-uridine
  modified_base 95: mod_base = OTHER; note = 2'-O-Methyl-guanosine
  modified_base 96: mod_base = OTHER; note = 2'-O-Methyl-cytidine
  modified_base 97: mod_base = OTHER; note = 2'-O-Methyl-uridine phosphorothioate
  modified_base 98: mod_base = OTHER; note = 2'-O-Methyl-uridine phosphorothioate
  modified_base 99: mod_base = OTHER; note = 2'-O-Methyl-uridine phosphorothioate
  modified_base 100: mod_base = OTHER; note = 2'-O-Methyl-uridine

SEQ ID NO: 2463 - RNA, 103 nt, synthetic construct; identical to SEQ ID NO: 1700
  source 1..103: mol_type = other RNA
  modified_base 1: mod_base = OTHER; note = 2'-O-Methyl-cytidine phosphorothioate
  modified_base 2: mod_base = OTHER; note = 2'-O-Methyl-adenosine phosphorothioate
  modified_base 3: mod_base = OTHER; note = 2'-O-Methyl-guanosine phosphorothioate
  modified_base 21: mod_base = OTHER; note = 2'-O-Methyl-guanosine
  modified_base 28: mod_base = OTHER; note = 2'-O-Methyl-adenosine
  modified_base 29: mod_base = OTHER; note = 2'-O-Methyl-guanosine
  modified_base 30: mod_base = OTHER; note = 2'-O-Methyl-cytidine
  modified_base 31: mod_base = OTHER; note = 2'-O-Methyl-uridine
  modified_base 32: mod_base = OTHER; note = 2'-O-Methyl-adenosine
  modified_base 34: mod_base = OTHER; note = 2'-O-Methyl-adenosine
  modified_base 35: mod_base = OTHER; note = 2'-O-Methyl-adenosine
  modified_base 36: mod_base = OTHER; note = 2'-O-Methyl-adenosine
  modified_base 37: mod_base = OTHER; note = 2'-O-Methyl-uridine
  modified_base 38: mod_base = OTHER; note = 2'-O-Methyl-adenosine
  modified_base 39: mod_base = OTHER; note = 2'-O-Methyl-guanosine
  modified_base 40: mod_base = OTHER; note = 2'-O-Methyl-cytidine
  modified_base 41: mod_base = OTHER; note = 2'-O-Methyl-adenosine
  modified_base 42: mod_base = OTHER; note = 2'-O-Methyl-adenosine
  modified_base 45: mod_base = OTHER; note = uridine phosphorothioate
  modified_base 46: mod_base = OTHER; note = 2'-O-Methyl-adenosine
  modified_base 48: mod_base = OTHER; note = 2'-O-Methyl-adenosine
  modified_base 50: mod_base = OTHER; note = 2'-O-Methyl-uridine
  modified_base 52: mod_base = OTHER; note = 2'-O-Methyl-adenosine
  modified_base 53: mod_base = OTHER; note = 2'-O-Methyl-guanosine
  modified_base 54: mod_base = OTHER; note = 2'-O-Methyl-guanosine
  modified_base 55: mod_base = OTHER; note = 2'-O-Methyl-cytidine
  modified_base 56: mod_base = OTHER; note = 2'-O-Methyl-uridine
  modified_base 57: mod_base = OTHER; note = 2'-O-Methyl-adenosine
  modified_base 60: mod_base = OTHER; note = 2'-O-Methyl-cytidine
  modified_base 61: mod_base = OTHER; note = 2'-O-Methyl-cytidine
  modified_base 64: mod_base = OTHER; note = uridine phosphorothioate
  modified_base 66: mod_base = OTHER; note = 2'-O-Methyl-uridine
  modified_base 67: mod_base = OTHER; note = 2'-O-Methyl-cytidine
  modified_base 70: mod_base = OTHER; note = 2'-O-Methyl-cytidine
  modified_base 71: mod_base = OTHER; note = 2'-O-Methyl-uridine
  modified_base 72: mod_base = OTHER; note = 2'-O-Methyl-uridine
  modified_base 74: mod_base = OTHER; note = 2'-O-Methyl-adenosine
  modified_base 75: mod_base = OTHER; note = 2'-O-Methyl-adenosine
  modified_base 76: mod_base = OTHER; note = 2'-O-Methyl-adenosine
  modified_base 77: mod_base = OTHER; note = 2'-O-Methyl-adenosine
  modified_base 78: mod_base = OTHER; note = 2'-O-Methyl-adenosine
  modified_base 79: mod_base = OTHER; note = 2'-O-Methyl-guanosine
  modified_base 80: mod_base = OTHER; note = 2'-O-Methyl-uridine
  modified_base 82: mod_base = OTHER; note = 2'-O-Methyl-guanosine
  modified_base 83: mod_base = OTHER; note = 2'-O-Methyl-cytidine
  modified_base 84: mod_base = OTHER; note = 2'-O-Methyl-adenosine
  modified_base 85: mod_base = OTHER; note = 2'-O-Methyl-cytidine
  modified_base 86: mod_base = OTHER; note = 2'-O-Methyl-cytidine
  modified_base 87: mod_base = OTHER; note = 2'-O-Methyl-guanosine
  modified_base 89: mod_base = OTHER; note = 2'-O-Methyl-guanosine
  modified_base 92: mod_base = OTHER; note = 2'-O-Methyl-guanosine
  modified_base 93: mod_base = OTHER; note = 2'-O-Methyl-guanosine
  modified_base 94: mod_base = OTHER; note = 2'-O-Methyl-uridine
  modified_base 95: mod_base = OTHER; note = 2'-O-Methyl-guanosine
  modified_base 96: mod_base = OTHER; note = 2'-O-Methyl-cytidine
  modified_base 97: mod_base = OTHER; note = 2'-O-Methyl-uridine phosphorothioate
  modified_base 98: mod_base = OTHER; note = 2'-O-Methyl-uridine phosphorothioate
  modified_base 99: mod_base = OTHER; note = 2'-O-Methyl-uridine phosphorothioate
  modified_base 100: mod_base = OTHER; note = 2'-O-Methyl-uridine

SEQ ID NO: 2464 - RNA, 103 nt, synthetic construct; identical to SEQ ID NO: 1643
  source 1..103: mol_type = other RNA
  modified_base 1: mod_base = OTHER; note = 2'-O-Methyl-cytidine phosphorothioate
  modified_base 2: mod_base = OTHER; note = 2'-O-Methyl-cytidine phosphorothioate
  modified_base 3: mod_base = OTHER; note = 2'-O-Methyl-cytidine phosphorothioate
  modified_base 21: mod_base = OTHER; note = 2'-O-Methyl-guanosine
  modified_base 25: mod_base = OTHER; note = uridine phosphorothioate
  modified_base 28: mod_base = OTHER; note = 2'-O-Methyl-adenosine
  modified_base 29: mod_base = OTHER; note = 2'-O-Methyl-guanosine
  modified_base 30: mod_base = OTHER; note = 2'-O-Methyl-cytidine
  modified_base 31: mod_base = OTHER; note = 2'-O-Methyl-uridine
  modified_base 32: mod_base = OTHER; note = 2'-O-Methyl-adenosine
  modified_base 33: mod_base = OTHER; note = 2'-O-Methyl-guanosine
  modified_base 34: mod_base = OTHER; note = 2'-O-Methyl-adenosine
  modified_base 35: mod_base = OTHER; note = 2'-O-Methyl-adenosine
  modified_base 36: mod_base = OTHER; note = 2'-O-Methyl-adenosine
  modified_base 37: mod_base = OTHER; note = 2'-O-Methyl-uridine
  modified_base 38: mod_base = OTHER; note = 2'-O-Methyl-adenosine
  modified_base 39: mod_base = OTHER; note = 2'-O-Methyl-guanosine
  modified_base 40: mod_base = OTHER; note = 2'-O-Methyl-cytidine
  modified_base 41: mod_base = OTHER; note = 2'-O-Methyl-adenosine
  modified_base 42: mod_base = OTHER; note = 2'-O-Methyl-adenosine
  modified_base 45: mod_base = OTHER; note = uridine phosphorothioate
  modified_base 46: mod_base = OTHER; note = 2'-O-Methyl-adenosine
  modified_base 48: mod_base = OTHER; note = 2'-O-Methyl-adenosine
  modified_base 50: mod_base = OTHER; note = 2'-O-Methyl-uridine
  modified_base 52: mod_base = OTHER; note = 2'-O-Methyl-adenosine
  modified_base 53: mod_base = OTHER; note = 2'-O-Methyl-guanosine
  modified_base 54: mod_base = OTHER; note = 2'-O-Methyl-guanosine
  modified_base 55: mod_base = OTHER; note = 2'-O-Methyl-cytidine
  modified_base 56: mod_base = OTHER; note = 2'-O-Methyl-uridine
  modified_base 57: mod_base = OTHER; note = 2'-O-Methyl-adenosine
  modified_base 60: mod_base = OTHER; note = 2'-O-Methyl-cytidine
  modified_base 61: mod_base = OTHER; note = 2'-O-Methyl-cytidine
  modified_base 66: mod_base = OTHER; note = 2'-O-Methyl-uridine
  modified_base 67: mod_base = OTHER; note = 2'-O-Methyl-cytidine
  modified_base 70: mod_base = OTHER; note = 2'-O-Methyl-cytidine
  modified_base 71: mod_base = OTHER; note = 2'-O-Methyl-uridine
  modified_base 72: mod_base = OTHER; note = 2'-O-Methyl-uridine
  modified_base 73: mod_base = OTHER; note = 2'-O-Methyl-guanosine
  modified_base 74: mod_base = OTHER; note = 2'-O-Methyl-adenosine
  modified_base 75: mod_base = OTHER; note = 2'-O-Methyl-adenosine
  modified_base 76: mod_base = OTHER; note = 2'-O-Methyl-adenosine
  modified_base 77: mod_base = OTHER; note = 2'-O-Methyl-adenosine
  modified_base 78: mod_base = OTHER; note = 2'-O-Methyl-adenosine
  modified_base 79: mod_base = OTHER; note = 2'-O-Methyl-guanosine
  modified_base 80: mod_base = OTHER; note = 2'-O-Methyl-uridine
  modified_base 81: mod_base = OTHER; note = 2'-O-Methyl-guanosine
  modified_base 83: mod_base = OTHER; note = 2'-O-Methyl-cytidine
  modified_base 84: mod_base = OTHER; note = 2'-O-Methyl-adenosine
  modified_base 85: mod_base = OTHER; note = 2'-O-Methyl-cytidine
  modified_base 86: mod_base = OTHER; note = 2'-O-Methyl-cytidine
  modified_base 87: mod_base = OTHER; note = 2'-O-Methyl-guanosine
  modified_base 88: mod_base = OTHER; note = 2'-O-Methyl-adenosine
  modified_base 89: mod_base = OTHER; note = 2'-O-Methyl-guanosine
  modified_base 90: mod_base = OTHER; note = 2'-O-Methyl-uridine
  modified_base 91: mod_base = OTHER; note = 2'-O-Methyl-cytidine
  modified_base 92: mod_base = OTHER; note = 2'-O-Methyl-guanosine
  modified_base 93: mod_base = OTHER; note = 2'-O-Methyl-guanosine
  modified_base 94: mod_base = OTHER; note = 2'-O-Methyl-uridine
  modified_base 95: mod_base = OTHER; note = 2'-O-Methyl-guanosine
  modified_base 96: mod_base = OTHER; note = 2'-O-Methyl-cytidine
  modified_base 97: mod_base = OTHER; note = 2'-O-Methyl-uridine phosphorothioate
  modified_base 98: mod_base = OTHER; note = 2'-O-Methyl-uridine phosphorothioate
  modified_base 99: mod_base = OTHER; note = 2'-O-Methyl-uridine phosphorothioate
  modified_base 100: mod_base = OTHER; note = 2'-O-Methyl-uridine

SEQ ID NO: 2465 - RNA, 103 nt, synthetic construct; identical to SEQ ID NO: 1643
  source 1..103: mol_type = other RNA
  modified_base 1: mod_base = OTHER; note = 2'-O-Methyl-cytidine phosphorothioate
  modified_base 2: mod_base = OTHER; note = 2'-O-Methyl-cytidine phosphorothioate
  modified_base 3: mod_base = OTHER; note = 2'-O-Methyl-cytidine phosphorothioate
  modified_base 21: mod_base = OTHER; note = 2'-O-Methyl-guanosine
  modified_base 25: mod_base = OTHER; note = uridine phosphorothioate
  modified_base 28: mod_base = OTHER; note = 2'-O-Methyl-adenosine
  modified_base 29: mod_base = OTHER; note = 2'-O-Methyl-guanosine
  modified_base 30: mod_base = OTHER; note = 2'-O-Methyl-cytidine
  modified_base 31: mod_base = OTHER; note = 2'-O-Methyl-uridine
  modified_base 32: mod_base = OTHER; note = 2'-O-Methyl-adenosine
  modified_base 34: mod_base = OTHER; note = 2'-O-Methyl-adenosine
  modified_base 35: mod_base = OTHER; note = 2'-O-Methyl-adenosine
  modified_base 36: mod_base = OTHER; note = 2'-O-Methyl-adenosine
  modified_base 37: mod_base = OTHER; note = 2'-O-Methyl-uridine
  modified_base 38: mod_base = OTHER; note = 2'-O-Methyl-adenosine
  modified_base 39: mod_base = OTHER; note = 2'-O-Methyl-guanosine
  modified_base 40: mod_base = OTHER; note = 2'-O-Methyl-cytidine
  modified_base 41: mod_base = OTHER; note = 2'-O-Methyl-adenosine
  modified_base 42: mod_base = OTHER; note = 2'-O-Methyl-adenosine
  modified_base 45: mod_base = OTHER; note = uridine phosphorothioate
  modified_base 46: mod_base = OTHER; note = 2'-O-Methyl-adenosine
  modified_base 48: mod_base = OTHER; note = 2'-O-Methyl-adenosine
  modified_base 50: mod_base = OTHER; note = 2'-O-Methyl-uridine
  modified_base 52: mod_base = OTHER; note = 2'-O-Methyl-adenosine
  modified_base 53: mod_base = OTHER; note = 2'-O-Methyl-guanosine
  modified_base 54: mod_base = OTHER; note = 2'-O-Methyl-guanosine
  modified_base 55: mod_base = OTHER; note = 2'-O-Methyl-cytidine
  modified_base 56: mod_base = OTHER; note = 2'-O-Methyl-uridine
  modified_base 57: mod_base = OTHER; note = 2'-O-Methyl-adenosine
  modified_base 60: mod_base = OTHER; note = 2'-O-Methyl-cytidine
  modified_base 61: mod_base = OTHER; note = 2'-O-Methyl-cytidine
  modified_base 66: mod_base = OTHER; note = 2'-O-Methyl-uridine
  modified_base 67: mod_base = OTHER; note = 2'-O-Methyl-cytidine
  modified_base 70: mod_base = OTHER; note = 2'-O-Methyl-cytidine
  modified_base 71: mod_base = OTHER; note = 2'-O-Methyl-uridine
  modified_base 72: mod_base = OTHER; note = 2'-O-Methyl-uridine
  modified_base 74: mod_base = OTHER; note = 2'-O-Methyl-adenosine
  modified_base 75: mod_base = OTHER; note = 2'-O-Methyl-adenosine
  modified_base 76: mod_base = OTHER; note = 2'-O-Methyl-adenosine
  modified_base 77: mod_base = OTHER; note = 2'-O-Methyl-adenosine
  modified_base 78: mod_base = OTHER; note = 2'-O-Methyl-adenosine
  modified_base 79: mod_base = OTHER; note = 2'-O-Methyl-guanosine
  modified_base 80: mod_base = OTHER; note = 2'-O-Methyl-uridine
  modified_base 81: mod_base = OTHER; note = 2'-O-Methyl-guanosine
  modified_base 83: mod_base = OTHER; note = 2'-O-Methyl-cytidine
  modified_base 84: mod_base = OTHER; note = 2'-O-Methyl-adenosine
  modified_base 85: mod_base = OTHER; note = 2'-O-Methyl-cytidine
  modified_base 86: mod_base = OTHER; note = 2'-O-Methyl-cytidine
  modified_base 87: mod_base = OTHER; note = 2'-O-Methyl-guanosine
  modified_base 88: mod_base = OTHER; note = 2'-O-Methyl-adenosine
  modified_base 89: mod_base = OTHER; note = 2'-O-Methyl-guanosine
  modified_base 90: mod_base = OTHER; note = 2'-O-Methyl-uridine
  modified_base 91: mod_base = OTHER; note = 2'-O-Methyl-cytidine
  modified_base 92: mod_base = OTHER; note = 2'-O-Methyl-guanosine
  modified_base 93: mod_base = OTHER; note = 2'-O-Methyl-guanosine
  modified_base 94: mod_base = OTHER; note = 2'-O-Methyl-uridine
  modified_base 95: mod_base = OTHER; note = 2'-O-Methyl-guanosine
  modified_base 96: mod_base = OTHER; note = 2'-O-Methyl-cytidine
  modified_base 97: mod_base = OTHER; note = 2'-O-Methyl-uridine phosphorothioate
  modified_base 98: mod_base = OTHER; note = 2'-O-Methyl-uridine phosphorothioate
  modified_base 99: mod_base = OTHER; note = 2'-O-Methyl-uridine phosphorothioate
  modified_base 100: mod_base = OTHER; note = 2'-O-Methyl-uridine

SEQ ID NO: 2466 - RNA, 103 nt, synthetic construct; identical to SEQ ID NO: 1699
  source 1..103: mol_type = other RNA
  modified_base 1: mod_base = OTHER; note = 2'-O-Methyl-guanosine phosphorothioate
  modified_base 2: mod_base = OTHER; note = 2'-O-Methyl-adenosine phosphorothioate
  modified_base 3: mod_base = OTHER; note = 2'-O-Methyl-guanosine phosphorothioate
  modified_base 21: mod_base = OTHER; note = 2'-O-Methyl-guanosine
  modified_base 25: mod_base = OTHER; note = uridine phosphorothioate
  modified_base 28: mod_base = OTHER; note = 2'-O-Methyl-adenosine
  modified_base 29: mod_base = OTHER; note = 2'-O-Methyl-guanosine
  modified_base 30: mod_base = OTHER; note = 2'-O-Methyl-cytidine
  modified_base 31: mod_base = OTHER; note = 2'-O-Methyl-uridine
  modified_base 32: mod_base = OTHER; note = 2'-O-Methyl-adenosine
  modified_base 33: mod_base = OTHER; note = 2'-O-Methyl-guanosine
  modified_base 34: mod_base = OTHER; note = 2'-O-Methyl-adenosine
  modified_base 35: mod_base = OTHER; note = 2'-O-Methyl-adenosine
  modified_base 36: mod_base = OTHER; note = 2'-O-Methyl-adenosine
  modified_base 37: mod_base = OTHER; note = 2'-O-Methyl-uridine
  modified_base 38: mod_base = OTHER; note = 2'-O-Methyl-adenosine
  modified_base 39: mod_base = OTHER; note = 2'-O-Methyl-guanosine
  modified_base 40: mod_base = OTHER; note = 2'-O-Methyl-cytidine
  modified_base 41: mod_base = OTHER; note = 2'-O-Methyl-adenosine
  modified_base 42: mod_base = OTHER; note = 2'-O-Methyl-adenosine
  modified_base 45: mod_base = OTHER; note = uridine phosphorothioate
  modified_base 46: mod_base = OTHER; note = 2'-O-Methyl-adenosine
  modified_base 48: mod_base = OTHER; note = 2'-O-Methyl-adenosine
  modified_base 50: mod_base = OTHER; note = 2'-O-Methyl-uridine
  modified_base 52: mod_base = OTHER; note = 2'-O-Methyl-adenosine
  modified_base 53: mod_base = OTHER; note = 2'-O-Methyl-guanosine
  modified_base 54: mod_base = OTHER; note = 2'-O-Methyl-guanosine
  modified_base 55: mod_base = OTHER; note = 2'-O-Methyl-cytidine
  modified_base 56: mod_base = OTHER; note = 2'-O-Methyl-uridine
  modified_base 57: mod_base = OTHER; note = 2'-O-Methyl-adenosine
  modified_base 60: mod_base = OTHER; note = 2'-O-Methyl-cytidine
  modified_base 61: mod_base = OTHER; note = 2'-O-Methyl-cytidine
  modified_base 66: mod_base = OTHER; note = 2'-O-Methyl-uridine
  modified_base 67: mod_base = OTHER; note = 2'-O-Methyl-cytidine
  modified_base 70: mod_base = OTHER; note = 2'-O-Methyl-cytidine
  modified_base 71: mod_base = OTHER; note = 2'-O-Methyl-uridine
  modified_base 72: mod_base = OTHER; note = 2'-O-Methyl-uridine
  modified_base 73: mod_base = OTHER; note = 2'-O-Methyl-guanosine
  modified_base 74: mod_base = OTHER; note = 2'-O-Methyl-adenosine
  modified_base 75: mod_base = OTHER; note = 2'-O-Methyl-adenosine
  modified_base 76: mod_base = OTHER; note = 2'-O-Methyl-adenosine
  modified_base 77: mod_base = OTHER; note = 2'-O-Methyl-adenosine
  modified_base 78: mod_base = OTHER; note = 2'-O-Methyl-adenosine
  modified_base 79: mod_base = OTHER; note = 2'-O-Methyl-guanosine
  modified_base 80: mod_base = OTHER; note = 2'-O-Methyl-uridine
  modified_base 81: mod_base = OTHER; note = 2'-O-Methyl-guanosine
  modified_base 83: mod_base = OTHER; note = 2'-O-Methyl-cytidine
  modified_base 84: mod_base = OTHER; note = 2'-O-Methyl-adenosine
  modified_base 85: mod_base = OTHER; note = 2'-O-Methyl-cytidine
  modified_base 86: mod_base = OTHER; note = 2'-O-Methyl-cytidine
  modified_base 87: mod_base = OTHER; note = 2'-O-Methyl-guanosine
  modified_base 88: mod_base = OTHER; note = 2'-O-Methyl-adenosine
  modified_base 89: mod_base = OTHER; note = 2'-O-Methyl-guanosine
  modified_base 90: mod_base = OTHER; note = 2'-O-Methyl-uridine
  modified_base 91: mod_base = OTHER; note = 2'-O-Methyl-cytidine
  modified_base 92: mod_base = OTHER; note = 2'-O-Methyl-guanosine
  modified_base 93: mod_base = OTHER; note = 2'-O-Methyl-guanosine
  modified_base 94: mod_base = OTHER; note = 2'-O-Methyl-uridine
  modified_base 95: mod_base = OTHER; note = 2'-O-Methyl-guanosine
  modified_base 96: mod_base = OTHER; note = 2'-O-Methyl-cytidine
  modified_base 97: mod_base = OTHER; note = 2'-O-Methyl-uridine phosphorothioate
  modified_base 98: mod_base = OTHER; note = 2'-O-Methyl-uridine phosphorothioate
  modified_base 99: mod_base = OTHER; note = 2'-O-Methyl-uridine phosphorothioate
  modified_base 100: mod_base = OTHER; note = 2'-O-Methyl-uridine

SEQ ID NO: 2467 - RNA, 103 nt, synthetic construct; identical to SEQ ID NO: 1699
  source 1..103: mol_type = other RNA
  modified_base 1: mod_base = OTHER; note = 2'-O-Methyl-guanosine phosphorothioate
  modified_base 2: mod_base = OTHER; note = 2'-O-Methyl-adenosine phosphorothioate
  modified_base 3: mod_base = OTHER; note = 2'-O-Methyl-guanosine phosphorothioate
  modified_base 21: mod_base = OTHER; note = 2'-O-Methyl-guanosine
  modified_base 25: mod_base = OTHER; note = uridine phosphorothioate
  modified_base 28: mod_base = OTHER; note = 2'-O-Methyl-adenosine
  modified_base 29: mod_base = OTHER; note = 2'-O-Methyl-guanosine
  modified_base 30: mod_base = OTHER; note = 2'-O-Methyl-cytidine
  modified_base 31: mod_base = OTHER; note = 2'-O-Methyl-uridine
  modified_base 32: mod_base = OTHER; note = 2'-O-Methyl-adenosine
  modified_base 34: mod_base = OTHER; note = 2'-O-Methyl-adenosine
  modified_base 35: mod_base = OTHER; note = 2'-O-Methyl-adenosine
  modified_base 36: mod_base = OTHER; note = 2'-O-Methyl-adenosine
  modified_base 37: mod_base = OTHER; note = 2'-O-Methyl-uridine
  modified_base 38: mod_base = OTHER; note = 2'-O-Methyl-adenosine
  modified_base 39: mod_base = OTHER; note = 2'-O-Methyl-guanosine
  modified_base 40: mod_base = OTHER; note = 2'-O-Methyl-cytidine
  modified_base 41: mod_base = OTHER; note = 2'-O-Methyl-adenosine
  modified_base 42: mod_base = OTHER; note = 2'-O-Methyl-adenosine
  modified_base 45: mod_base = OTHER; note = uridine phosphorothioate
  modified_base 46: mod_base = OTHER; note = 2'-O-Methyl-adenosine
  modified_base 48: mod_base = OTHER; note = 2'-O-Methyl-adenosine
  modified_base 50: mod_base = OTHER; note = 2'-O-Methyl-uridine
  modified_base 52: mod_base = OTHER; note = 2'-O-Methyl-adenosine
  modified_base 53: mod_base = OTHER; note = 2'-O-Methyl-guanosine
  modified_base 54: mod_base = OTHER; note = 2'-O-Methyl-guanosine
  modified_base 55: mod_base = OTHER; note = 2'-O-Methyl-cytidine
  modified_base 56: mod_base = OTHER; note = 2'-O-Methyl-uridine
  modified_base 57: mod_base = OTHER; note = 2'-O-Methyl-adenosine
  modified_base 60: mod_base = OTHER; note = 2'-O-Methyl-cytidine
  modified_base 61: mod_base = OTHER; note = 2'-O-Methyl-cytidine
  modified_base 66: mod_base = OTHER; note = 2'-O-Methyl-uridine
  modified_base 67: mod_base = OTHER; note = 2'-O-Methyl-cytidine
  modified_base 70: mod_base = OTHER; note = 2'-O-Methyl-cytidine
  modified_base 71: mod_base = OTHER; note = 2'-O-Methyl-uridine
  modified_base 72: mod_base = OTHER; note = 2'-O-Methyl-uridine
  modified_base 74: mod_base = OTHER; note = 2'-O-Methyl-adenosine
  modified_base 75: mod_base = OTHER; note = 2'-O-Methyl-adenosine
  modified_base 76: mod_base = OTHER; note = 2'-O-Methyl-adenosine
  modified_base 77: mod_base = OTHER; note = 2'-O-Methyl-adenosine
  modified_base 78: mod_base = OTHER; note = 2'-O-Methyl-adenosine
  modified_base 79: mod_base = OTHER; note = 2'-O-Methyl-guanosine
  modified_base 80: mod_base = OTHER; note = 2'-O-Methyl-uridine
  modified_base 81: mod_base = OTHER; note = 2'-O-Methyl-guanosine
  modified_base 83: mod_base = OTHER; note = 2'-O-Methyl-cytidine
  modified_base 84: mod_base = OTHER; note = 2'-O-Methyl-adenosine
  modified_base 85: mod_base = OTHER; note = 2'-O-Methyl-cytidine
  modified_base 86: mod_base = OTHER; note = 2'-O-Methyl-cytidine
  modified_base 87: mod_base = OTHER; note = 2'-O-Methyl-guanosine
  modified_base 88: mod_base = OTHER; note = 2'-O-Methyl-adenosine
  modified_base 89: mod_base = OTHER; note = 2'-O-Methyl-guanosine
  modified_base 90: mod_base = OTHER; note = 2'-O-Methyl-uridine
  modified_base 91: mod_base = OTHER; note = 2'-O-Methyl-cytidine
  modified_base 92: mod_base = OTHER; note = 2'-O-Methyl-guanosine
  modified_base 93: mod_base = OTHER; note = 2'-O-Methyl-guanosine
  modified_base 94: mod_base = OTHER; note = 2'-O-Methyl-uridine
  modified_base 95: mod_base = OTHER; note = 2'-O-Methyl-guanosine
  modified_base 96: mod_base = OTHER; note = 2'-O-Methyl-cytidine
  modified_base 97: mod_base = OTHER; note = 2'-O-Methyl-uridine phosphorothioate
  modified_base 98: mod_base = OTHER; note = 2'-O-Methyl-uridine phosphorothioate
  modified_base 99: mod_base = OTHER; note = 2'-O-Methyl-uridine phosphorothioate
  modified_base 100: mod_base = OTHER; note = 2'-O-Methyl-uridine

SEQ ID NO: 2468 - RNA, 103 nt, synthetic construct; identical to SEQ ID NO: 1700
  source 1..103: mol_type = other RNA
  modified_base 1: mod_base = OTHER; note = 2'-O-Methyl-cytidine phosphorothioate
  modified_base 2: mod_base = OTHER; note = 2'-O-Methyl-adenosine phosphorothioate
  modified_base 3: mod_base = OTHER; note = 2'-O-Methyl-guanosine phosphorothioate
  modified_base 21: mod_base = OTHER; note = 2'-O-Methyl-guanosine
  modified_base 25: mod_base = OTHER; note = uridine phosphorothioate
  modified_base 28: mod_base = OTHER; note = 2'-O-Methyl-adenosine
  modified_base 29: mod_base = OTHER; note = 2'-O-Methyl-guanosine
  modified_base 30: mod_base = OTHER; note = 2'-O-Methyl-cytidine
  modified_base 31: mod_base = OTHER; note = 2'-O-Methyl-uridine
  modified_base 32: mod_base = OTHER; note = 2'-O-Methyl-adenosine
  modified_base 33: mod_base = OTHER; note = 2'-O-Methyl-guanosine
  modified_base 34: mod_base = OTHER; note = 2'-O-Methyl-adenosine
  modified_base 35: mod_base = OTHER; note = 2'-O-Methyl-adenosine
  modified_base 36: mod_base = OTHER; note = 2'-O-Methyl-adenosine
  modified_base 37: mod_base = OTHER; note = 2'-O-Methyl-uridine
  modified_base 38: mod_base = OTHER; note = 2'-O-Methyl-adenosine
  modified_base 39: mod_base = OTHER; note = 2'-O-Methyl-guanosine
  modified_base 40: mod_base = OTHER; note = 2'-O-Methyl-cytidine
  modified_base 41: mod_base = OTHER; note = 2'-O-Methyl-adenosine
  modified_base 42: mod_base = OTHER; note = 2'-O-Methyl-adenosine
  modified_base 45: mod_base = OTHER; note = uridine phosphorothioate
  modified_base 46: mod_base = OTHER; note = 2'-O-Methyl-adenosine
  modified_base 48: mod_base = OTHER; note = 2'-O-Methyl-adenosine
  modified_base 50: mod_base = OTHER; note = 2'-O-Methyl-uridine
  modified_base 52: mod_base = OTHER; note = 2'-O-Methyl-adenosine
  modified_base 53: mod_base = OTHER; note = 2'-O-Methyl-guanosine
  modified_base 54: mod_base = OTHER; note = 2'-O-Methyl-guanosine
  modified_base 57: mod_base = OTHER; note = 2'-O-Methyl-adenosine
  modified_base 61: mod_base = OTHER; note = 2'-O-Methyl-cytidine
  modified_base 66: mod_base = OTHER; note = 2'-O-Methyl-uridine
  modified_base 67: mod_base = OTHER; note = 2'-O-Methyl-cytidine
  modified_base 70: mod_base = OTHER; note = 2'-O-Methyl-cytidine
  modified_base 71: mod_base = OTHER; note = 2'-O-Methyl-uridine
  modified_base 72: mod_base = OTHER; note = 2'-O-Methyl-uridine
  modified_base 74: mod_base = OTHER; note = 2'-O-Methyl-adenosine
  modified_base 75: mod_base = OTHER; note = 2'-O-Methyl-adenosine
  modified_base 76: mod_base = OTHER; note = 2'-O-Methyl-adenosine
  modified_base 77: mod_base = OTHER; note = 2'-O-Methyl-adenosine
  modified_base 78: mod_base = OTHER; note = 2'-O-Methyl-adenosine
  modified_base 79: mod_base = OTHER; note = 2'-O-Methyl-guanosine
  modified_base 80: mod_base = OTHER; note = 2'-O-Methyl-uridine
  modified_base 82: mod_base = OTHER; note = 2'-O-Methyl-guanosine
  modified_base 83: mod_base = OTHER; note = 2'-O-Methyl-cytidine
  modified_base 84: mod_base = OTHER; note = 2'-O-Methyl-adenosine
  modified_base 85: mod_base = OTHER; note = 2'-O-Methyl-cytidine
  modified_base 86: mod_base = OTHER; note = 2'-O-Methyl-cytidine
  modified_base 87: mod_base = OTHER; note = 2'-O-Methyl-guanosine
  modified_base 89: mod_base = OTHER; note = 2'-O-Methyl-guanosine
  modified_base 92: mod_base = OTHER; note = 2'-O-Methyl-guanosine
  modified_base 93: mod_base = OTHER; note = 2'-O-Methyl-guanosine
  modified_base 94: mod_base = OTHER; note = 2'-O-Methyl-uridine
  modified_base 95: mod_base = OTHER; note = 2'-O-Methyl-guanosine
  modified_base 96: mod_base = OTHER; note = 2'-O-Methyl-cytidine
  modified_base 97: mod_base = OTHER; note = 2'-O-Methyl-uridine phosphorothioate
  modified_base 98: mod_base = OTHER; note = 2'-O-Methyl-uridine phosphorothioate
  modified_base 99: mod_base = OTHER; note = 2'-O-Methyl-uridine phosphorothioate
  modified_base 100: mod_base = OTHER; note = 2'-O-Methyl-uridine

SEQ ID NO: 2469 - RNA, 103 nt, synthetic construct; identical to SEQ ID NO: 1700
  source 1..103: mol_type = other RNA
  modified_base 1: mod_base = OTHER; note = 2'-O-Methyl-cytidine phosphorothioate
  modified_base 2: mod_base = OTHER; note = 2'-O-Methyl-adenosine phosphorothioate
  modified_base 3: mod_base = OTHER; note = 2'-O-Methyl-guanosine phosphorothioate
  modified_base 21: mod_base = OTHER; note = 2'-O-Methyl-guanosine
  modified_base 25: mod_base = OTHER; note = uridine phosphorothioate
  modified_base 28: mod_base = OTHER; note = 2'-O-Methyl-adenosine
  modified_base 29: mod_base = OTHER; note = 2'-O-Methyl-guanosine
  modified_base 30: mod_base = OTHER; note = 2'-O-Methyl-cytidine
  modified_base 31: mod_base = OTHER; note = 2'-O-Methyl-uridine
  modified_base 32: mod_base = OTHER; note = 2'-O-Methyl-adenosine
  modified_base 33: mod_base = OTHER; note = 2'-O-Methyl-guanosine
  modified_base 34: mod_base = OTHER; note = 2'-O-Methyl-adenosine
  modified_base 35: mod_base = OTHER; note = 2'-O-Methyl-adenosine
  modified_base 36: mod_base = OTHER; note = 2'-O-Methyl-adenosine
  modified_base 37: mod_base = OTHER; note = 2'-O-Methyl-uridine
  modified_base 38: mod_base = OTHER; note = 2'-O-Methyl-adenosine
  modified_base 39: mod_base = OTHER; note = 2'-O-Methyl-guanosine
  modified_base 40: mod_base = OTHER; note = 2'-O-Methyl-cytidine
  modified_base 41: mod_base = OTHER; note = 2'-O-Methyl-adenosine
  modified_base 42: mod_base = OTHER; note = 2'-O-Methyl-adenosine
  modified_base 45: mod_base = OTHER; note = uridine phosphorothioate
  modified_base 46: mod_base = OTHER; note = 2'-O-Methyl-adenosine
  modified_base 48: mod_base = OTHER; note = 2'-O-Methyl-adenosine
  modified_base 50: mod_base = OTHER; note = 2'-O-Methyl-uridine
  modified_base 52: mod_base = OTHER; note = 2'-O-Methyl-adenosine
  modified_base 53: mod_base = OTHER; note = 2'-O-Methyl-guanosine
  modified_base 54: mod_base = OTHER; note = 2'-O-Methyl-guanosine
  modified_base 55: mod_base = OTHER; note = 2'-O-Methyl-cytidine
  modified_base 56: mod_base = OTHER; note = 2'-O-Methyl-uridine
  modified_base 57: mod_base = OTHER; note = 2'-O-Methyl-adenosine
  modified_base 60: mod_base = OTHER; note = 2'-O-Methyl-cytidine
  modified_base 61: mod_base = OTHER; note = 2'-O-Methyl-cytidine
  modified_base 66: mod_base = OTHER; note = 2'-O-Methyl-uridine
  modified_base 67: mod_base = OTHER; note = 2'-O-Methyl-cytidine
  modified_base 70: mod_base = OTHER; note = 2'-O-Methyl-cytidine
  modified_base 71: mod_base = OTHER; note = 2'-O-Methyl-uridine
  modified_base 72: mod_base = OTHER; note = 2'-O-Methyl-uridine
  modified_base 74: mod_base = OTHER; note = 2'-O-Methyl-adenosine
  modified_base 75: mod_base = OTHER; note = 2'-O-Methyl-adenosine
  modified_base 76: mod_base = OTHER; note = 2'-O-Methyl-adenosine
  modified_base 77: mod_base = OTHER; note = 2'-O-Methyl-adenosine
  modified_base 78: mod_base = OTHER; note = 2'-O-Methyl-adenosine
  modified_base 79: mod_base = OTHER; note = 2'-O-Methyl-guanosine
  modified_base 80: mod_base = OTHER; note = 2'-O-Methyl-uridine
  modified_base 82: mod_base = OTHER; note = 2'-O-Methyl-guanosine
  modified_base 83: mod_base = OTHER; note = 2'-O-Methyl-cytidine
  modified_base 84: mod_base = OTHER; note = 2'-O-Methyl-adenosine
  modified_base 85: mod_base = OTHER; note = 2'-O-Methyl-cytidine
  modified_base 86: mod_base = OTHER; note = 2'-O-Methyl-cytidine
  modified_base 87: mod_base = OTHER; note = 2'-O-Methyl-guanosine
  modified_base 89: mod_base = OTHER; note = 2'-O-Methyl-guanosine
  modified_base 92: mod_base = OTHER; note = 2'-O-Methyl-guanosine
  modified_base 93: mod_base = OTHER; note = 2'-O-Methyl-guanosine
  modified_base 94: mod_base = OTHER; note = 2'-O-Methyl-uridine
  modified_base 95: mod_base = OTHER; note = 2'-O-Methyl-guanosine
  modified_base 96: mod_base = OTHER; note = 2'-O-Methyl-cytidine
  modified_base 97: mod_base = OTHER; note = 2'-O-Methyl-uridine phosphorothioate
  modified_base 98: mod_base = OTHER; note = 2'-O-Methyl-uridine phosphorothioate
  modified_base 99: mod_base = OTHER; note = 2'-O-Methyl-uridine phosphorothioate
  modified_base 100: mod_base = OTHER; note = 2'-O-Methyl-uridine

SEQ ID NO: 2470 - RNA, 103 nt, synthetic construct; identical to SEQ ID NO: 1700
  source 1..103: mol_type = other RNA
  modified_base 1: mod_base = OTHER; note = 2'-O-Methyl-cytidine phosphorothioate
  modified_base 2: mod_base = OTHER; note = 2'-O-Methyl-adenosine phosphorothioate
  modified_base 3: mod_base = OTHER; note = 2'-O-Methyl-guanosine phosphorothioate
  modified_base 21: mod_base = OTHER; note = 2'-O-Methyl-guanosine
  modified_base 25: mod_base = OTHER; note = uridine phosphorothioate
  modified_base 28: mod_base = OTHER; note = 2'-O-Methyl-adenosine
  modified_base 29: mod_base = OTHER; note = 2'-O-Methyl-guanosine
  modified_base 30: mod_base = OTHER; note = 2'-O-Methyl-cytidine
  modified_base 31: mod_base = OTHER; note = 2'-O-Methyl-uridine
  modified_base 32: mod_base = OTHER; note = 2'-O-Methyl-adenosine
  modified_base 33: mod_base = OTHER; note = 2'-O-Methyl-guanosine
  modified_base 34: mod_base = OTHER; note = 2'-O-Methyl-adenosine
  modified_base 35: mod_base = OTHER; note = 2'-O-Methyl-adenosine
  modified_base 36: mod_base = OTHER; note = 2'-O-Methyl-adenosine
  modified_base 37: mod_base = OTHER; note = 2'-O-Methyl-uridine
  modified_base 38: mod_base = OTHER; note = 2'-O-Methyl-adenosine
  modified_base 39: mod_base = OTHER; note = 2'-O-Methyl-guanosine
  modified_base 40: mod_base = OTHER; note = 2'-O-Methyl-cytidine
  modified_base 41: mod_base = OTHER; note = 2'-O-Methyl-adenosine
  modified_base 42: mod_base = OTHER; note = 2'-O-Methyl-adenosine
  modified_base 45: mod_base = OTHER; note = uridine phosphorothioate
  modified_base 46: mod_base = OTHER; note = 2'-O-Methyl-adenosine
  modified_base 48: mod_base = OTHER; note = 2'-O-Methyl-adenosine
  modified_base 50: mod_base = OTHER; note = 2'-O-Methyl-uridine
  modified_base 52: mod_base = OTHER; note = 2'-O-Methyl-adenosine
  modified_base 53: mod_base = OTHER; note = 2'-O-Methyl-guanosine
  modified_base 54: mod_base = OTHER; note = 2'-O-Methyl-guanosine
  modified_base 57: mod_base = OTHER; note = 2'-O-Methyl-adenosine
  modified_base 61: mod_base = OTHER; note = 2'-O-Methyl-cytidine
  modified_base 66: mod_base = OTHER; note = 2'-O-Methyl-uridine
  modified_base 67: mod_base = OTHER; note = 2'-O-Methyl-cytidine
  modified_base 70: mod_base = OTHER; note = 2'-O-Methyl-cytidine
  modified_base 71: mod_base = OTHER; note = 2'-O-Methyl-uridine
  modified_base 72: mod_base = OTHER; note = 2'-O-Methyl-uridine
  modified_base 73: mod_base = OTHER; note = 2'-O-Methyl-guanosine
  modified_base 74: mod_base = OTHER; note = 2'-O-Methyl-adenosine
  modified_base 75: mod_base = OTHER; note = 2'-O-Methyl-adenosine
  modified_base 76: mod_base = OTHER; note = 2'-O-Methyl-adenosine
  modified_base 77: mod_base = OTHER; note = 2'-O-Methyl-adenosine
  modified_base 78: mod_base = OTHER; note = 2'-O-Methyl-adenosine
  modified_base 79: mod_base = OTHER; note = 2'-O-Methyl-guanosine
  modified_base 80: mod_base = OTHER; note = 2'-O-Methyl-uridine
  modified_base 82: mod_base = OTHER; note = 2'-O-Methyl-guanosine
  modified_base 83: mod_base = OTHER; note = 2'-O-Methyl-cytidine
  modified_base 84: mod_base = OTHER; note = 2'-O-Methyl-adenosine
  modified_base 85: mod_base = OTHER; note = 2'-O-Methyl-cytidine
  modified_base 86: mod_base = OTHER; note = 2'-O-Methyl-cytidine
  modified_base 87: mod_base = OTHER; note = 2'-O-Methyl-guanosine
  modified_base 89: mod_base = OTHER; note = 2'-O-Methyl-guanosine
  modified_base 92: mod_base = OTHER; note = 2'-O-Methyl-guanosine
  modified_base 93: mod_base = OTHER; note = 2'-O-Methyl-guanosine
  modified_base 94: mod_base = OTHER; note = 2'-O-Methyl-uridine
  modified_base 95: mod_base = OTHER; note = 2'-O-Methyl-guanosine
  modified_base 96: mod_base = OTHER; note = 2'-O-Methyl-cytidine
  modified_base 97: mod_base = OTHER; note = 2'-O-Methyl-uridine phosphorothioate
  modified_base 98: mod_base = OTHER; note = 2'-O-Methyl-uridine phosphorothioate
  modified_base 99: mod_base = OTHER; note = 2'-O-Methyl-uridine phosphorothioate
  modified_base 100: mod_base = OTHER; note = 2'-O-Methyl-uridine

SEQ ID NO: 2471 - RNA, 103 nt, synthetic construct; identical to SEQ ID NO: 1700
  source 1..103: mol_type = other RNA
  modified_base 1: mod_base = OTHER; note = 2'-O-Methyl-cytidine phosphorothioate
  modified_base 2: mod_base = OTHER; note = 2'-O-Methyl-adenosine phosphorothioate
  modified_base 3: mod_base = OTHER; note = 2'-O-Methyl-guanosine phosphorothioate
  modified_base 21: mod_base = OTHER; note = 2'-O-Methyl-guanosine
  modified_base 25: mod_base = OTHER; note = uridine phosphorothioate
  modified_base 28: mod_base = OTHER; note = 2'-O-Methyl-adenosine
  modified_base 29: mod_base = OTHER; note = 2'-O-Methyl-guanosine
  modified_base 30: mod_base = OTHER; note = 2'-O-Methyl-cytidine
  modified_base 31: mod_base = OTHER; note = 2'-O-Methyl-uridine
  modified_base 32: mod_base = OTHER; note = 2'-O-Methyl-adenosine
  modified_base 33: mod_base = OTHER; note = 2'-O-Methyl-guanosine
  modified_base 34: mod_base = OTHER; note = 2'-O-Methyl-adenosine
  modified_base 35: mod_base = OTHER; note = 2'-O-Methyl-adenosine
  modified_base 36: mod_base = OTHER; note = 2'-O-Methyl-adenosine
  modified_base 37: mod_base = OTHER; note = 2'-O-Methyl-uridine
  modified_base 38: mod_base = OTHER; note = 2'-O-Methyl-adenosine
  modified_base 39: mod_base = OTHER; note = 2'-O-Methyl-guanosine
  modified_base 40: mod_base = OTHER; note = 2'-O-Methyl-cytidine
  modified_base 41: mod_base = OTHER; note = 2'-O-Methyl-adenosine
  modified_base 42: mod_base = OTHER; note = 2'-O-Methyl-adenosine
  modified_base 45: mod_base = OTHER; note = uridine phosphorothioate
  modified_base 46: mod_base = OTHER; note = 2'-O-Methyl-adenosine
  modified_base 48: mod_base = OTHER; note = 2'-O-Methyl-adenosine
  modified_base 50: mod_base = OTHER; note = 2'-O-Methyl-uridine
  modified_base 52: mod_base = OTHER; note = 2'-O-Methyl-adenosine
  modified_base 53: mod_base = OTHER; note = 2'-O-Methyl-guanosine
  modified_base 54: mod_base = OTHER; note = 2'-O-Methyl-guanosine
  modified_base 57: mod_base = OTHER; note = 2'-O-Methyl-adenosine
  modified_base 61: mod_base = OTHER; note = 2'-O-Methyl-cytidine
  modified_base 66: mod_base = OTHER; note = 2'-O-Methyl-uridine
  modified_base 67: mod_base = OTHER; note = 2'-O-Methyl-cytidine
  modified_base 70: mod_base = OTHER; note = 2'-O-Methyl-cytidine
  modified_base 71: mod_base = OTHER; note = 2'-O-Methyl-uridine
  modified_base 72: mod_base = OTHER; note = 2'-O-Methyl-uridine
  modified_base 73: mod_base = OTHER; note = 2'-O-Methyl-guanosine
  modified_base 74: mod_base = OTHER; note = 2'-O-Methyl-adenosine
  modified_base 75: mod_base = OTHER; note = 2'-O-Methyl-adenosine
  modified_base 76: mod_base = OTHER; note = 2'-O-Methyl-adenosine
  modified_base 77: mod_base = OTHER; note = 2'-O-Methyl-adenosine
  modified_base 78: mod_base = OTHER; note = 2'-O-Methyl-adenosine
  modified_base 79: mod_base = OTHER; note = 2'-O-Methyl-guanosine
  modified_base 80: mod_base = OTHER; note = 2'-O-Methyl-uridine
  modified_base 82: mod_base = OTHER; note = 2'-O-Methyl-guanosine
  modified_base 83: mod_base = OTHER; note = 2'-O-Methyl-cytidine
  modified_base 84: mod_base = OTHER; note = 2'-O-Methyl-adenosine
  modified_base 85: mod_base = OTHER; note = 2'-O-Methyl-cytidine
  modified_base 86: mod_base = OTHER; note = 2'-O-Methyl-cytidine
  modified_base 87: mod_base = OTHER; note = 2'-O-Methyl-guanosine
  modified_base 89: mod_base = OTHER; note = 2'-O-Methyl-guanosine
  modified_base 91: mod_base = OTHER; note = 2'-O-Methyl-cytidine
  modified_base 92: mod_base = OTHER; note = 2'-O-Methyl-guanosine
  modified_base 93: mod_base = OTHER; note = 2'-O-Methyl-guanosine
  modified_base 94: mod_base = OTHER; note = 2'-O-Methyl-uridine
  modified_base 95: mod_base = OTHER; note = 2'-O-Methyl-guanosine
  modified_base 96: mod_base = OTHER; note = 2'-O-Methyl-cytidine
  modified_base 97: mod_base = OTHER; note = 2'-O-Methyl-uridine phosphorothioate
  modified_base 98: mod_base = OTHER; note = 2'-O-Methyl-uridine phosphorothioate
  modified_base 99: mod_base = OTHER; note = 2'-O-Methyl-uridine phosphorothioate
  modified_base 100: mod_base = OTHER; note = 2'-O-Methyl-uridine

SEQ ID NO: 2472 - RNA, 103 nt, synthetic construct; identical to SEQ ID NO: 1700
  source 1..103: mol_type = other RNA
  modified_base 1: mod_base = OTHER; note = 2'-O-Methyl-cytidine phosphorothioate
  modified_base 2: mod_base = OTHER; note = 2'-O-Methyl-adenosine phosphorothioate
  modified_base 3: mod_base = OTHER; note = 2'-O-Methyl-guanosine phosphorothioate
  modified_base 21: mod_base = OTHER; note = 2'-O-Methyl-guanosine
  modified_base 25: mod_base = OTHER; note = uridine phosphorothioate
  modified_base 28: mod_base = OTHER; note = 2'-O-Methyl-adenosine
  modified_base 29: mod_base = OTHER; note = 2'-O-Methyl-guanosine
  modified_base 30: mod_base = OTHER; note = 2'-O-Methyl-cytidine
  modified_base 31: mod_base = OTHER; note = 2'-O-Methyl-uridine
  modified_base 32: mod_base = OTHER; note = 2'-O-Methyl-adenosine
  modified_base 34: mod_base = OTHER; note = 2'-O-Methyl-adenosine
  modified_base 35: mod_base = OTHER; note = 2'-O-Methyl-adenosine
  modified_base 36: mod_base = OTHER; note = 2'-O-Methyl-adenosine
  modified_base 37: mod_base = OTHER; note = 2'-O-Methyl-uridine
  modified_base 38: mod_base = OTHER; note = 2'-O-Methyl-adenosine
  modified_base 39: mod_base = OTHER; note = 2'-O-Methyl-guanosine
  modified_base 40: mod_base = OTHER; note = 2'-O-Methyl-cytidine
  modified_base 41: mod_base = OTHER; note = 2'-O-Methyl-adenosine
  modified_base 42: mod_base = OTHER; note = 2'-O-Methyl-adenosine
  modified_base 45: mod_base = OTHER; note = uridine phosphorothioate
  modified_base 46: mod_base = OTHER; note = 2'-O-Methyl-adenosine
  modified_base 48: mod_base = OTHER; note = 2'-O-Methyl-adenosine
  modified_base 50: mod_base = OTHER; note = 2'-O-Methyl-uridine
  modified_base 52: mod_base = OTHER; note = 2'-O-Methyl-adenosine
  modified_base 53: mod_base = OTHER; note = 2'-O-Methyl-guanosine
  modified_base 54: mod_base = OTHER; note = 2'-O-Methyl-guanosine
  modified_base 57: mod_base = OTHER; note = 2'-O-Methyl-adenosine
  modified_base 61: mod_base = OTHER; note = 2'-O-Methyl-cytidine
  modified_base 66: mod_base = OTHER; note = 2'-O-Methyl-uridine
  modified_base 67: mod_base = OTHER; note = 2'-O-Methyl-cytidine
  modified_base 70: mod_base = OTHER; note = 2'-O-Methyl-cytidine
  modified_base 71: mod_base = OTHER; note = 2'-O-Methyl-uridine
  modified_base 72: mod_base = OTHER; note = 2'-O-Methyl-uridine
  modified_base 73: mod_base = OTHER; note = 2'-O-Methyl-guanosine
  modified_base 74: mod_base = OTHER; note = 2'-O-Methyl-adenosine
  modified_base 75: mod_base = OTHER; note = 2'-O-Methyl-adenosine
  modified_base 76: mod_base = OTHER; note = 2'-O-Methyl-adenosine
  modified_base 77: mod_base = OTHER; note = 2'-O-Methyl-adenosine
  modified_base 78: mod_base = OTHER; note = 2'-O-Methyl-adenosine
  modified_base 79: mod_base = OTHER; note = 2'-O-Methyl-guanosine
  modified_base 80: mod_base = OTHER; note = 2'-O-Methyl-uridine
  modified_base 82: mod_base = OTHER; note = 2'-O-Methyl-guanosine
  modified_base 83: mod_base = OTHER; note = 2'-O-Methyl-cytidine
  modified_base 84: mod_base = OTHER; note = 2'-O-Methyl-adenosine
  modified_base 85: mod_base = OTHER; note = 2'-O-Methyl-cytidine
  modified_base 86: mod_base = OTHER; note = 2'-O-Methyl-cytidine
  modified_base 87: mod_base = OTHER; note = 2'-O-Methyl-guanosine
  modified_base 89: mod_base = OTHER; note = 2'-O-Methyl-guanosine
  modified_base 92: mod_base = OTHER; note = 2'-O-Methyl-guanosine
  modified_base 93: mod_base = OTHER; note = 2'-O-Methyl-guanosine
  modified_base 94: mod_base = OTHER; note = 2'-O-Methyl-uridine
  modified_base 95: mod_base = OTHER; note = 2'-O-Methyl-guanosine
  modified_base 96: mod_base = OTHER; note = 2'-O-Methyl-cytidine
  modified_base 97: mod_base = OTHER; note = 2'-O-Methyl-uridine phosphorothioate
  modified_base 98: mod_base = OTHER; note = 2'-O-Methyl-uridine phosphorothioate
  modified_base 99: mod_base = OTHER; note = 2'-O-Methyl-uridine phosphorothioate
  modified_base 100: mod_base = OTHER; note = 2'-O-Methyl-uridine

SEQ ID NO: 2473 - RNA, 103 nt, synthetic construct; identical to SEQ ID NO: 1700
  source 1..103: mol_type = other RNA
  modified_base 1: mod_base = OTHER; note = 2'-O-Methyl-cytidine phosphorothioate
  modified_base 2: mod_base = OTHER; note = 2'-O-Methyl-adenosine phosphorothioate
  modified_base 3: mod_base = OTHER; note = 2'-O-Methyl-guanosine phosphorothioate
  modified_base 21: mod_base = OTHER; note = 2'-O-Methyl-guanosine
  modified_base 25: mod_base = OTHER; note = uridine phosphorothioate
  modified_base 28: mod_base = OTHER; note = 2'-O-Methyl-adenosine
  modified_base 29: mod_base = OTHER; note = 2'-O-Methyl-guanosine
  modified_base 30: mod_base = OTHER; note = 2'-O-Methyl-cytidine
  modified_base 31: mod_base = OTHER; note = 2'-O-Methyl-uridine
  modified_base 32: mod_base = OTHER; note = 2'-O-Methyl-adenosine
  modified_base 34: mod_base = OTHER; note = 2'-O-Methyl-adenosine
  modified_base 35: mod_base = OTHER; note = 2'-O-Methyl-adenosine
  modified_base 36: mod_base = OTHER; note = 2'-O-Methyl-adenosine
  modified_base 37: mod_base = OTHER; note = 2'-O-Methyl-uridine
  modified_base 38: mod_base = OTHER; note = 2'-O-Methyl-adenosine
  modified_base 39: mod_base = OTHER; note = 2'-O-Methyl-guanosine
  modified_base 40: mod_base = OTHER; note = 2'-O-Methyl-cytidine
  modified_base 41: mod_base = OTHER; note = 2'-O-Methyl-adenosine
  modified_base 42: mod_base = OTHER; note = 2'-O-Methyl-adenosine
  modified_base 45: mod_base = OTHER; note = uridine phosphorothioate
  modified_base 46: mod_base = OTHER; note = 2'-O-Methyl-adenosine
  modified_base 48: mod_base = OTHER; note = 2'-O-Methyl-adenosine
  modified_base 50: mod_base = OTHER; note = 2'-O-Methyl-uridine
  modified_base 52: mod_base = OTHER; note = 2'-O-Methyl-adenosine
  modified_base 53: mod_base = OTHER; note = 2'-O-Methyl-guanosine
  modified_base 54: mod_base = OTHER; note = 2'-O-Methyl-guanosine
  modified_base 57: mod_base = OTHER; note = 2'-O-Methyl-adenosine
  modified_base 61: mod_base = OTHER; note = 2'-O-Methyl-cytidine
  modified_base 66: mod_base = OTHER; note = 2'-O-Methyl-uridine
  modified_base 67: mod_base = OTHER; note = 2'-O-Methyl-cytidine
  modified_base 70: mod_base = OTHER; note = 2'-O-Methyl-cytidine
  modified_base 71: mod_base = OTHER; note = 2'-O-Methyl-uridine
  modified_base 72: mod_base = OTHER; note = 2'-O-Methyl-uridine
  modified_base 73: mod_base = OTHER; note = 2'-O-Methyl-guanosine
  modified_base 74: mod_base = OTHER; note = 2'-O-Methyl-adenosine
  modified_base 75: mod_base = OTHER; note = 2'-O-Methyl-adenosine
  modified_base 76: mod_base = OTHER; note = 2'-O-Methyl-adenosine
  modified_base 77: mod_base = OTHER; note = 2'-O-Methyl-adenosine
  modified_base 78: mod_base = OTHER; note = 2'-O-Methyl-adenosine
  modified_base 79: mod_base = OTHER; note = 2'-O-Methyl-guanosine
  modified_base 80: mod_base = OTHER; note = 2'-O-Methyl-uridine
  modified_base 82: mod_base = OTHER; note = 2'-O-Methyl-guanosine
  modified_base 83: mod_base = OTHER; note = 2'-O-Methyl-cytidine
  modified_base 84: mod_base = OTHER; note = 2'-O-Methyl-adenosine
  modified_base 85: mod_base = OTHER; note = 2'-O-Methyl-cytidine
  modified_base 86: mod_base = OTHER; note = 2'-O-Methyl-cytidine
  modified_base 87: mod_base = OTHER; note = 2'-O-Methyl-guanosine
  modified_base 89: mod_base = OTHER; note = 2'-O-Methyl-guanosine
  modified_base 91: mod_base = OTHER; note = 2'-O-Methyl-cytidine
  modified_base 92: mod_base = OTHER; note = 2'-O-Methyl-guanosine
  modified_base 93: mod_base = OTHER; note = 2'-O-Methyl-guanosine
  modified_base 94: mod_base = OTHER; note = 2'-O-Methyl-uridine
  modified_base 95: mod_base = OTHER; note = 2'-O-Methyl-guanosine
  modified_base 96: mod_base = OTHER; note = 2'-O-Methyl-cytidine
  modified_base 97: mod_base = OTHER; note = 2'-O-Methyl-uridine phosphorothioate
  modified_base 98: mod_base = OTHER; note = 2'-O-Methyl-uridine phosphorothioate
  modified_base 99: mod_base = OTHER; note = 2'-O-Methyl-uridine phosphorothioate
  modified_base 100: mod_base = OTHER; note = 2'-O-Methyl-uridine

SEQ ID NO: 2474 - RNA, 103 nt, synthetic construct; identical to SEQ ID NO: 1700
  source 1..103: mol_type = other RNA
  modified_base 1: mod_base = OTHER; note = 2'-O-Methyl-cytidine phosphorothioate
  modified_base 2: mod_base = OTHER; note = 2'-O-Methyl-adenosine phosphorothioate
  modified_base 3: mod_base = OTHER; note = 2'-O-Methyl-guanosine phosphorothioate
  modified_base 21: mod_base = OTHER; note = 2'-O-Methyl-guanosine
  modified_base 25: mod_base = OTHER; note = uridine phosphorothioate
  modified_base 28: mod_base = OTHER; note = 2'-O-Methyl-adenosine
  modified_base 29: mod_base = OTHER; note = 2'-O-Methyl-guanosine
  modified_base 30: mod_base = OTHER; note = 2'-O-Methyl-cytidine
  modified_base 31: mod_base = OTHER; note = 2'-O-Methyl-uridine
  modified_base 32: mod_base = OTHER; note = 2'-O-Methyl-adenosine
  modified_base 34: mod_base = OTHER; note = 2'-O-Methyl-adenosine
  modified_base 35: mod_base = OTHER; note = 2'-O-Methyl-adenosine
  modified_base 36: mod_base = OTHER; note = 2'-O-Methyl-adenosine
  modified_base 37: mod_base = OTHER; note = 2'-O-Methyl-uridine
  modified_base 38: mod_base = OTHER; note = 2'-O-Methyl-adenosine
  modified_base 39: mod_base = OTHER; note = 2'-O-Methyl-guanosine
  modified_base 40: mod_base = OTHER; note = 2'-O-Methyl-cytidine
  modified_base 41: mod_base = OTHER; note = 2'-O-Methyl-adenosine
  modified_base 42: mod_base = OTHER; note = 2'-O-Methyl-adenosine
  modified_base 45: mod_base = OTHER; note = uridine phosphorothioate
  modified_base 46: mod_base = OTHER; note = 2'-O-Methyl-adenosine
  modified_base 48: mod_base = OTHER; note = 2'-O-Methyl-adenosine
  modified_base 50: mod_base = OTHER; note = 2'-O-Methyl-uridine
  modified_base 52: mod_base = OTHER; note = 2'-O-Methyl-adenosine
  modified_base 53: mod_base = OTHER; note = 2'-O-Methyl-guanosine
  modified_base 54: mod_base = OTHER; note = 2'-O-Methyl-guanosine
  modified_base 55: mod_base = OTHER; note = 2'-O-Methyl-cytidine
  modified_base 56: mod_base = OTHER; note = 2'-O-Methyl-uridine
  modified_base 57: mod_base = OTHER; note = 2'-O-Methyl-adenosine
  modified_base 60: mod_base = OTHER; note = 2'-O-Methyl-cytidine
  modified_base 61: mod_base = OTHER; note = 2'-O-Methyl-cytidine
  modified_base 66: mod_base = OTHER; note = 2'-O-Methyl-uridine
  modified_base 67: mod_base = OTHER; note = 2'-O-Methyl-cytidine
  modified_base 70: mod_base = OTHER; note = 2'-O-Methyl-cytidine
  modified_base 71: mod_base = OTHER; note = 2'-O-Methyl-uridine
  modified_base 72: mod_base = OTHER; note = 2'-O-Methyl-uridine
  modified_base 74: mod_base = OTHER; note = 2'-O-Methyl-adenosine
  modified_base 75: mod_base = OTHER; note = 2'-O-Methyl-adenosine
  modified_base 76: mod_base = OTHER; note = 2'-O-Methyl-adenosine
  modified_base 77: mod_base = OTHER; note = 2'-O-Methyl-adenosine
  modified_base 78: mod_base = OTHER; note = 2'-O-Methyl-adenosine
  modified_base 79: mod_base = OTHER; note = 2'-O-Methyl-guanosine
  modified_base 80: mod_base = OTHER; note = 2'-O-Methyl-uridine
  modified_base 82: mod_base = OTHER; note = 2'-O-Methyl-guanosine
  modified_base 83: mod_base = OTHER; note = 2'-O-Methyl-cytidine
  modified_base 84: mod_base = OTHER; note = 2'-O-Methyl-adenosine
  modified_base 85: mod_base = OTHER; note = 2'-O-Methyl-cytidine
  modified_base 86: mod_base = OTHER; note = 2'-O-Methyl-cytidine
  modified_base 87: mod_base = OTHER; note = 2'-O-Methyl-guanosine
  modified_base 89: mod_base = OTHER; note = 2'-O-Methyl-guanosine
  modified_base 92: mod_base = OTHER; note = 2'-O-Methyl-guanosine
  modified_base 93: mod_base = OTHER; note = 2'-O-Methyl-guanosine
  modified_base 94: mod_base = OTHER; note = 2'-O-Methyl-uridine
  modified_base 95: mod_base = OTHER; note = 2'-O-Methyl-guanosine
  modified_base 96: mod_base = OTHER; note = 2'-O-Methyl-cytidine
  modified_base 97: mod_base = OTHER; note = 2'-O-Methyl-uridine phosphorothioate
  modified_base 98: mod_base = OTHER; note = 2'-O-Methyl-uridine phosphorothioate
  modified_base 99: mod_base = OTHER; note = 2'-O-Methyl-uridine phosphorothioate
  modified_base 100: mod_base = OTHER; note = 2'-O-Methyl-uridine

SEQ ID NO: 2475 - RNA, 103 nt, synthetic construct; identical to SEQ ID NO: 1643
  source 1..103: mol_type = other RNA
  modified_base 1: mod_base = OTHER; note = 2'-O-Methyl-cytidine phosphorothioate
  modified_base 2: mod_base = OTHER; note = 2'-O-Methyl-cytidine phosphorothioate
  modified_base 3: mod_base = OTHER; note = 2'-O-Methyl-cytidine phosphorothioate
  modified_base 21: mod_base = OTHER; note = 2'-O-Methyl-guanosine
  modified_base 25: mod_base = OTHER; note = uridine phosphorothioate
  modified_base 28: mod_base = OTHER; note = 2'-O-Methyl-adenosine
  modified_base 29: mod_base = OTHER; note = 2'-O-Methyl-guanosine
  modified_base 30: mod_base = OTHER; note = 2'-O-Methyl-cytidine
  modified_base 31: mod_base = OTHER; note = 2'-O-Methyl-uridine
  modified_base 32: mod_base = OTHER; note = 2'-O-Methyl-adenosine
  modified_base 33: mod_base = OTHER; note = 2'-O-Methyl-guanosine
  modified_base 34: mod_base = OTHER; note = 2'-O-Methyl-adenosine
  modified_base 35: mod_base = OTHER; note = 2'-O-Methyl-adenosine
  modified_base 36: mod_base = OTHER; note = 2'-O-Methyl-adenosine
  modified_base 37: mod_base = OTHER; note = 2'-O-Methyl-uridine
  modified_base 38: mod_base = OTHER; note = 2'-O-Methyl-adenosine
  modified_base 39: mod_base = OTHER; note = 2'-O-Methyl-guanosine
  modified_base 40: mod_base = OTHER; note = 2'-O-Methyl-cytidine
  modified_base 41: mod_base = OTHER; note = 2'-O-Methyl-adenosine
  modified_base 42: mod_base = OTHER; note = 2'-O-Methyl-adenosine
  modified_base 46: mod_base = OTHER; note = 2'-O-Methyl-adenosine
  modified_base 48: mod_base = OTHER; note = 2'-O-Methyl-adenosine
  modified_base 50: mod_base = OTHER; note = 2'-O-Methyl-uridine
  modified_base 52: mod_base = OTHER; note = 2'-O-Methyl-adenosine
  modified_base 53: mod_base = OTHER; note = 2'-O-Methyl-guanosine
  modified_base 54: mod_base = OTHER; note = 2'-O-Methyl-guanosine
  modified_base 55: mod_base = OTHER; note = 2'-O-Methyl-cytidine
  modified_base 56: mod_base = OTHER; note = 2'-O-Methyl-uridine
  modified_base 57: mod_base = OTHER; note = 2'-O-Methyl-adenosine
  modified_base 60: mod_base = OTHER; note = 2'-O-Methyl-cytidine
  modified_base 61: mod_base = OTHER; note = 2'-O-Methyl-cytidine
  modified_base 64: mod_base = OTHER; note = uridine phosphorothioate
  modified_base 66: mod_base = OTHER; note = 2'-O-Methyl-uridine
  modified_base 67: mod_base = OTHER; note = 2'-O-Methyl-cytidine
  modified_base 70: mod_base = OTHER; note = 2'-O-Methyl-cytidine
  modified_base 71: mod_base = OTHER; note = 2'-O-Methyl-uridine
  modified_base 72: mod_base = OTHER; note = 2'-O-Methyl-uridine
  modified_base 73: mod_base = OTHER; note = 2'-O-Methyl-guanosine
  modified_base 74: mod_base = OTHER; note = 2'-O-Methyl-adenosine
  modified_base 75: mod_base = OTHER; note = 2'-O-Methyl-adenosine
  modified_base 76: mod_base = OTHER; note = 2'-O-Methyl-adenosine
  modified_base 77: mod_base = OTHER; note = 2'-O-Methyl-adenosine
  modified_base 78: mod_base = OTHER; note = 2'-O-Methyl-adenosine
  modified_base 79: mod_base = OTHER; note = 2'-O-Methyl-guanosine
  modified_base 80: mod_base = OTHER; note = 2'-O-Methyl-uridine
  modified_base 81: mod_base = OTHER; note = 2'-O-Methyl-guanosine
  modified_base 83: mod_base = OTHER; note = 2'-O-Methyl-cytidine
  modified_base 84: mod_base = OTHER; note = 2'-O-Methyl-adenosine
  modified_base 85: mod_base = OTHER; note = 2'-O-Methyl-cytidine
  modified_base 86: mod_base = OTHER; note = 2'-O-Methyl-cytidine
  modified_base 87: mod_base = OTHER; note = 2'-O-Methyl-guanosine
  modified_base 88: mod_base = OTHER; note = 2'-O-Methyl-adenosine
  modified_base 89: mod_base = OTHER; note = 2'-O-Methyl-guanosine
  modified_base 90: mod_base = OTHER; note = 2'-O-Methyl-uridine
  modified_base 91: mod_base = OTHER; note = 2'-O-Methyl-cytidine
  modified_base 92: mod_base = OTHER; note = 2'-O-Methyl-guanosine
  modified_base 93: mod_base = OTHER; note = 2'-O-Methyl-guanosine
  modified_base 94: mod_base = OTHER; note = 2'-O-Methyl-uridine
  modified_base 95: mod_base = OTHER; note = 2'-O-Methyl-guanosine
  modified_base 96: mod_base = OTHER; note = 2'-O-Methyl-cytidine
  modified_base 97: mod_base = OTHER; note = 2'-O-Methyl-uridine phosphorothioate
  modified_base 98: mod_base = OTHER; note = 2'-O-Methyl-uridine phosphorothioate
  modified_base 99: mod_base = OTHER; note = 2'-O-Methyl-uridine phosphorothioate
  modified_base 100: mod_base = OTHER; note = 2'-O-Methyl-uridine

SEQ ID NO: 2476 - RNA, 103 nt, synthetic construct; identical to SEQ ID NO: 1643
  source 1..103: mol_type = other RNA
  modified_base 1: mod_base = OTHER; note = 2'-O-Methyl-cytidine phosphorothioate
  modified_base 2: mod_base = OTHER; note = 2'-O-Methyl-cytidine phosphorothioate
  modified_base 3: mod_base = OTHER; note = 2'-O-Methyl-cytidine phosphorothioate
  modified_base 21: mod_base = OTHER; note = 2'-O-Methyl-guanosine
  modified_base 25: mod_base = OTHER; note = uridine phosphorothioate
  modified_base 28: mod_base = OTHER; note = 2'-O-Methyl-adenosine
  modified_base 29: mod_base = OTHER; note = 2'-O-Methyl-guanosine
  modified_base 30: mod_base = OTHER; note = 2'-O-Methyl-cytidine
  modified_base 31: mod_base = OTHER; note = 2'-O-Methyl-uridine
  modified_base 32: mod_base = OTHER; note = 2'-O-Methyl-adenosine
  modified_base 34: mod_base = OTHER; note = 2'-O-Methyl-adenosine
  modified_base 35: mod_base = OTHER; note = 2'-O-Methyl-adenosine
  modified_base 36: mod_base = OTHER; note = 2'-O-Methyl-adenosine
  modified_base 37: mod_base = OTHER; note = 2'-O-Methyl-uridine
  modified_base 38: mod_base = OTHER; note = 2'-O-Methyl-adenosine
  modified_base 39: mod_base = OTHER; note = 2'-O-Methyl-guanosine
  modified_base 40: mod_base = OTHER; note = 2'-O-Methyl-cytidine
  modified_base 41: mod_base = OTHER; note = 2'-O-Methyl-adenosine
  modified_base 42: mod_base = OTHER; note = 2'-O-Methyl-adenosine
  modified_base 46: mod_base = OTHER; note = 2'-O-Methyl-adenosine
  modified_base 48: mod_base = OTHER; note = 2'-O-Methyl-adenosine
  modified_base 50: mod_base = OTHER; note = 2'-O-Methyl-uridine
  modified_base 52: mod_base = OTHER; note = 2'-O-Methyl-adenosine
  modified_base 53: mod_base = OTHER; note = 2'-O-Methyl-guanosine
  modified_base 54: mod_base = OTHER; note = 2'-O-Methyl-guanosine
  modified_base 55: mod_base = OTHER; note = 2'-O-Methyl-cytidine
  modified_base 56: mod_base = OTHER; note = 2'-O-Methyl-uridine
  modified_base 57: mod_base = OTHER; note = 2'-O-Methyl-adenosine
  modified_base 60: mod_base = OTHER; note = 2'-O-Methyl-cytidine
  modified_base 61: mod_base = OTHER; note = 2'-O-Methyl-cytidine
  modified_base 64: mod_base = OTHER; note = uridine phosphorothioate
  modified_base 66: mod_base = OTHER; note = 2'-O-Methyl-uridine
  modified_base 67: mod_base = OTHER; note = 2'-O-Methyl-cytidine
  modified_base 70: mod_base = OTHER; note = 2'-O-Methyl-cytidine
  modified_base 71: mod_base = OTHER; note = 2'-O-Methyl-uridine
  modified_base 72: mod_base = OTHER; note = 2'-O-Methyl-uridine
  modified_base 74: mod_base = OTHER; note = 2'-O-Methyl-adenosine
  modified_base 75: mod_base = OTHER; note = 2'-O-Methyl-adenosine
  modified_base 76: mod_base = OTHER; note = 2'-O-Methyl-adenosine
  modified_base 77: mod_base = OTHER; note = 2'-O-Methyl-adenosine
  modified_base 78: mod_base = OTHER; note = 2'-O-Methyl-adenosine
  modified_base 79: mod_base = OTHER; note = 2'-O-Methyl-guanosine
  modified_base 80: mod_base = OTHER; note = 2'-O-Methyl-uridine
  modified_base 81: mod_base = OTHER; note = 2'-O-Methyl-guanosine
  modified_base 83: mod_base = OTHER; note = 2'-O-Methyl-cytidine
  modified_base 84: mod_base = OTHER; note = 2'-O-Methyl-adenosine
  modified_base 85: mod_base = OTHER; note = 2'-O-Methyl-cytidine
  modified_base 86: mod_base = OTHER; note = 2'-O-Methyl-cytidine
  modified_base 87: mod_base = OTHER; note = 2'-O-Methyl-guanosine
  modified_base 88: mod_base = OTHER; note = 2'-O-Methyl-adenosine
  modified_base 89: mod_base = OTHER; note = 2'-O-Methyl-guanosine
  modified_base 90: mod_base = OTHER; note = 2'-O-Methyl-uridine
  modified_base 91: mod_base = OTHER; note = 2'-O-Methyl-cytidine
  modified_base 92: mod_base = OTHER; note = 2'-O-Methyl-guanosine
  modified_base 93: mod_base = OTHER; note = 2'-O-Methyl-guanosine
  modified_base 94: mod_base = OTHER; note = 2'-O-Methyl-uridine
  modified_base 95: mod_base = OTHER; note = 2'-O-Methyl-guanosine
  modified_base 96: mod_base = OTHER; note = 2'-O-Methyl-cytidine
  modified_base 97: mod_base = OTHER; note = 2'-O-Methyl-uridine phosphorothioate
  modified_base 98: mod_base = OTHER; note = 2'-O-Methyl-uridine phosphorothioate
  modified_base 99: mod_base = OTHER; note = 2'-O-Methyl-uridine phosphorothioate
  modified_base 100: mod_base = OTHER; note = 2'-O-Methyl-uridine

SEQ ID NO: 2477 - RNA, 103 nt, synthetic construct; identical to SEQ ID NO: 1699
  source 1..103: mol_type = other RNA
  modified_base 1: mod_base = OTHER; note = 2'-O-Methyl-guanosine phosphorothioate
  modified_base 2: mod_base = OTHER; note = 2'-O-Methyl-adenosine phosphorothioate
  modified_base 3: mod_base = OTHER; note = 2'-O-Methyl-guanosine phosphorothioate
  modified_base 21: mod_base = OTHER; note = 2'-O-Methyl-guanosine
  modified_base 25: mod_base = OTHER; note = uridine phosphorothioate
  modified_base 28: mod_base = OTHER; note = 2'-O-Methyl-adenosine
  modified_base 29: mod_base = OTHER; note = 2'-O-Methyl-guanosine
  modified_base 30: mod_base = OTHER; note = 2'-O-Methyl-cytidine
  modified_base 31: mod_base = OTHER; note = 2'-O-Methyl-uridine
  modified_base 32: mod_base = OTHER; note = 2'-O-Methyl-adenosine
  modified_base 33: mod_base = OTHER; note = 2'-O-Methyl-guanosine
  modified_base 34: mod_base = OTHER; note = 2'-O-Methyl-adenosine
  modified_base 35: mod_base = OTHER; note = 2'-O-Methyl-adenosine
  modified_base 36: mod_base = OTHER; note = 2'-O-Methyl-adenosine
  modified_base 37: mod_base = OTHER; note = 2'-O-Methyl-uridine
  modified_base 38: mod_base = OTHER; note = 2'-O-Methyl-adenosine
  modified_base 39: mod_base = OTHER; note = 2'-O-Methyl-guanosine
  modified_base 40: mod_base = OTHER; note = 2'-O-Methyl-cytidine
  modified_base 41: mod_base = OTHER; note = 2'-O-Methyl-adenosine
  modified_base 42: mod_base = OTHER; note = 2'-O-Methyl-adenosine
  modified_base 46: mod_base = OTHER; note = 2'-O-Methyl-adenosine
  modified_base 48: mod_base = OTHER; note = 2'-O-Methyl-adenosine
  modified_base 50: mod_base = OTHER; note = 2'-O-Methyl-uridine
  modified_base 52: mod_base = OTHER; note = 2'-O-Methyl-adenosine
  modified_base 53: mod_base = OTHER; note = 2'-O-Methyl-guanosine
  modified_base 54: mod_base = OTHER; note = 2'-O-Methyl-guanosine
  modified_base 55: mod_base = OTHER; note = 2'-O-Methyl-cytidine
  modified_base 56: mod_base = OTHER; note = 2'-O-Methyl-uridine
  modified_base 57: mod_base = OTHER; note = 2'-O-Methyl-adenosine
  modified_base 60: mod_base = OTHER; note = 2'-O-Methyl-cytidine
  modified_base 61: mod_base = OTHER; note = 2'-O-Methyl-cytidine
  modified_base 64: mod_base = OTHER; note = uridine phosphorothioate
  modified_base 66: mod_base = OTHER; note = 2'-O-Methyl-uridine
  modified_base 67: mod_base = OTHER; note = 2'-O-Methyl-cytidine
  modified_base 70: mod_base = OTHER; note = 2'-O-Methyl-cytidine
  modified_base 71: mod_base = OTHER; note = 2'-O-Methyl-uridine
  modified_base 72: mod_base = OTHER; note = 2'-O-Methyl-uridine
  modified_base 73: mod_base = OTHER; note = 2'-O-Methyl-guanosine
  modified_base 74: mod_base = OTHER; note = 2'-O-Methyl-adenosine
  modified_base 75: mod_base = OTHER; note = 2'-O-Methyl-adenosine
  modified_base 76: mod_base = OTHER; note = 2'-O-Methyl-adenosine
  modified_base 77: mod_base = OTHER; note = 2'-O-Methyl-adenosine
  modified_base 78: mod_base = OTHER; note = 2'-O-Methyl-adenosine
  modified_base 79: mod_base = OTHER; note = 2'-O-Methyl-guanosine
  modified_base 80: mod_base = OTHER; note = 2'-O-Methyl-uridine
  modified_base 81: mod_base = OTHER; note = 2'-O-Methyl-guanosine
  modified_base 83: mod_base = OTHER; note = 2'-O-Methyl-cytidine
  modified_base 84: mod_base = OTHER; note = 2'-O-Methyl-adenosine
  modified_base 85: mod_base = OTHER; note = 2'-O-Methyl-cytidine
  modified_base 86: mod_base = OTHER; note = 2'-O-Methyl-cytidine
  modified_base 87: mod_base = OTHER; note = 2'-O-Methyl-guanosine
  modified_base 88: mod_base = OTHER; note = 2'-O-Methyl-adenosine
  modified_base 89: mod_base = OTHER; note = 2'-O-Methyl-guanosine
  modified_base 90: mod_base = OTHER; note = 2'-O-Methyl-uridine
  modified_base 91: mod_base = OTHER; note = 2'-O-Methyl-cytidine
  modified_base 92: mod_base = OTHER; note = 2'-O-Methyl-guanosine
  modified_base 93: mod_base = OTHER; note = 2'-O-Methyl-guanosine
  modified_base 94: mod_base = OTHER; note = 2'-O-Methyl-uridine
  modified_base 95: mod_base = OTHER; note = 2'-O-Methyl-guanosine
  modified_base 96: mod_base = OTHER; note = 2'-O-Methyl-cytidine
  modified_base 97: mod_base = OTHER; note = 2'-O-Methyl-uridine phosphorothioate
  modified_base 98: mod_base = OTHER; note = 2'-O-Methyl-uridine phosphorothioate
  modified_base 99: mod_base = OTHER; note = 2'-O-Methyl-uridine phosphorothioate
  modified_base 100: mod_base = OTHER; note = 2'-O-Methyl-uridine

SEQ ID NO: 2478 - RNA, 103 nt, synthetic construct; identical to SEQ ID NO: 1699
  source 1..103: mol_type = other RNA
  modified_base 1: mod_base = OTHER; note = 2'-O-Methyl-guanosine phosphorothioate
  modified_base 2: mod_base = OTHER; note = 2'-O-Methyl-adenosine phosphorothioate
  modified_base 3: mod_base = OTHER; note = 2'-O-Methyl-guanosine phosphorothioate
  modified_base 21: mod_base = OTHER; note = 2'-O-Methyl-guanosine
  modified_base 25: mod_base = OTHER; note = uridine phosphorothioate
  modified_base 28: mod_base = OTHER; note = 2'-O-Methyl-adenosine
  modified_base 29: mod_base = OTHER; note = 2'-O-Methyl-guanosine
  modified_base 30: mod_base = OTHER; note = 2'-O-Methyl-cytidine
  modified_base 31: mod_base = OTHER; note = 2'-O-Methyl-uridine
  modified_base 32: mod_base = OTHER; note = 2'-O-Methyl-adenosine
  modified_base 34: mod_base = OTHER; note = 2'-O-Methyl-adenosine
  modified_base 35: mod_base = OTHER; note = 2'-O-Methyl-adenosine
  modified_base 36: mod_base = OTHER; note = 2'-O-Methyl-adenosine
  modified_base 37: mod_base = OTHER; note = 2'-O-Methyl-uridine
  modified_base 38: mod_base = OTHER; note = 2'-O-Methyl-adenosine
  modified_base 39: mod_base = OTHER; note = 2'-O-Methyl-guanosine
  modified_base 40: mod_base = OTHER; note = 2'-O-Methyl-cytidine
  modified_base 41: mod_base = OTHER; note = 2'-O-Methyl-adenosine
  modified_base 42: mod_base = OTHER; note = 2'-O-Methyl-adenosine
  modified_base 46: mod_base = OTHER; note = 2'-O-Methyl-adenosine
  modified_base 48: mod_base = OTHER; note = 2'-O-Methyl-adenosine
  modified_base 50: mod_base = OTHER; note = 2'-O-Methyl-uridine
  modified_base 52: mod_base = OTHER; note = 2'-O-Methyl-adenosine
  modified_base 53: mod_base = OTHER; note = 2'-O-Methyl-guanosine
  modified_base 54: mod_base = OTHER; note = 2'-O-Methyl-guanosine
  modified_base 55: mod_base = OTHER; note = 2'-O-Methyl-cytidine
  modified_base 56: mod_base = OTHER; note = 2'-O-Methyl-uridine
  modified_base 57: mod_base = OTHER; note = 2'-O-Methyl-adenosine
  modified_base 60: mod_base = OTHER; note = 2'-O-Methyl-cytidine
  modified_base 61: mod_base = OTHER; note = 2'-O-Methyl-cytidine
  modified_base 64: mod_base = OTHER; note = uridine phosphorothioate
  modified_base 66: mod_base = OTHER; note = 2'-O-Methyl-uridine
  modified_base 67: mod_base = OTHER; note = 2'-O-Methyl-cytidine
  modified_base 70: mod_base = OTHER; note = 2'-O-Methyl-cytidine
  modified_base 71: mod_base = OTHER; note = 2'-O-Methyl-uridine
  modified_base 72: mod_base = OTHER; note = 2'-O-Methyl-uridine
  modified_base 74: mod_base = OTHER; note = 2'-O-Methyl-adenosine
  modified_base 75: mod_base = OTHER; note = 2'-O-Methyl-adenosine
  modified_base 76: mod_base = OTHER; note = 2'-O-Methyl-adenosine
  modified_base 77: mod_base = OTHER; note = 2'-O-Methyl-adenosine
  modified_base 78: mod_base = OTHER; note = 2'-O-Methyl-adenosine
  modified_base 79: mod_base = OTHER; note = 2'-O-Methyl-guanosine
  modified_base 80: mod_base = OTHER; note = 2'-O-Methyl-uridine
  modified_base 81: mod_base = OTHER; note = 2'-O-Methyl-guanosine
  modified_base 83: mod_base = OTHER; note = 2'-O-Methyl-cytidine
  modified_base 84: mod_base = OTHER; note = 2'-O-Methyl-adenosine
  modified_base 85: mod_base = OTHER; note = 2'-O-Methyl-cytidine
  modified_base 86: mod_base = OTHER; note = 2'-O-Methyl-cytidine
  modified_base 87: mod_base = OTHER; note = 2'-O-Methyl-guanosine
  modified_base 88: mod_base = OTHER; note = 2'-O-Methyl-adenosine
  modified_base 89: mod_base = OTHER; note = 2'-O-Methyl-guanosine
  modified_base 90: mod_base = OTHER; note = 2'-O-Methyl-uridine
  modified_base 91: mod_base = OTHER; note = 2'-O-Methyl-cytidine
  modified_base 92: mod_base = OTHER; note = 2'-O-Methyl-guanosine
  modified_base 93: mod_base = OTHER; note = 2'-O-Methyl-guanosine
  modified_base 94: mod_base = OTHER; note = 2'-O-Methyl-uridine
  modified_base 95: mod_base = OTHER; note = 2'-O-Methyl-guanosine
  modified_base 96: mod_base = OTHER; note = 2'-O-Methyl-cytidine
  modified_base 97: mod_base = OTHER; note = 2'-O-Methyl-uridine phosphorothioate
  modified_base 98: mod_base = OTHER; note = 2'-O-Methyl-uridine phosphorothioate
  modified_base 99: mod_base = OTHER; note = 2'-O-Methyl-uridine phosphorothioate
  modified_base 100: mod_base = OTHER; note = 2'-O-Methyl-uridine

SEQ ID NO: 2479 - RNA, 103 nt, synthetic construct; identical to SEQ ID NO: 1700
  source 1..103: mol_type = other RNA
  modified_base 1: mod_base = OTHER; note = 2'-O-Methyl-cytidine phosphorothioate
  modified_base 2: mod_base = OTHER; note = 2'-O-Methyl-adenosine phosphorothioate
  modified_base 3: mod_base = OTHER; note = 2'-O-Methyl-guanosine phosphorothioate
  modified_base 21: mod_base = OTHER; note = 2'-O-Methyl-guanosine
  modified_base 25: mod_base = OTHER; note = uridine phosphorothioate
  modified_base 28: mod_base = OTHER; note = 2'-O-Methyl-adenosine
  modified_base 29: mod_base = OTHER; note = 2'-O-Methyl-guanosine
  modified_base 30: mod_base = OTHER; note = 2'-O-Methyl-cytidine
  modified_base 31: mod_base = OTHER; note = 2'-O-Methyl-uridine
  modified_base 32: mod_base = OTHER; note = 2'-O-Methyl-adenosine
  modified_base 33: mod_base = OTHER; note = 2'-O-Methyl-guanosine
  modified_base 34: mod_base = OTHER; note = 2'-O-Methyl-adenosine
  modified_base 35: mod_base = OTHER; note = 2'-O-Methyl-adenosine
  modified_base 36: mod_base = OTHER; note = 2'-O-Methyl-adenosine
  modified_base 37: mod_base = OTHER; note = 2'-O-Methyl-uridine
  modified_base 38: mod_base = OTHER; note = 2'-O-Methyl-adenosine
  modified_base 39: mod_base = OTHER; note = 2'-O-Methyl-guanosine
  modified_base 40: mod_base = OTHER; note = 2'-O-Methyl-cytidine
  modified_base 41: mod_base = OTHER; note = 2'-O-Methyl-adenosine
  modified_base 42: mod_base = OTHER; note = 2'-O-Methyl-adenosine
  modified_base 46: mod_base = OTHER; note = 2'-O-Methyl-adenosine
  modified_base 48: mod_base = OTHER; note = 2'-O-Methyl-adenosine
  modified_base 50: mod_base = OTHER; note = 2'-O-Methyl-uridine
  modified_base 52: mod_base = OTHER; note = 2'-O-Methyl-adenosine
  modified_base 53: mod_base = OTHER; note = 2'-O-Methyl-guanosine
  modified_base 54: mod_base = OTHER; note = 2'-O-Methyl-guanosine
  modified_base 57: mod_base = OTHER; note = 2'-O-Methyl-adenosine
  modified_base 61: mod_base = OTHER; note = 2'-O-Methyl-cytidine
  modified_base 64: mod_base = OTHER; note = uridine phosphorothioate
  modified_base 66: mod_base = OTHER; note = 2'-O-Methyl-uridine
  modified_base 67: mod_base = OTHER; note = 2'-O-Methyl-cytidine
  modified_base 70: mod_base = OTHER; note = 2'-O-Methyl-cytidine
  modified_base 71: mod_base = OTHER; note = 2'-O-Methyl-uridine
  modified_base 72: mod_base = OTHER; note = 2'-O-Methyl-uridine
  modified_base 74: mod_base = OTHER; note = 2'-O-Methyl-adenosine
  modified_base 75: mod_base = OTHER; note = 2'-O-Methyl-adenosine
  modified_base 76: mod_base = OTHER; note = 2'-O-Methyl-adenosine
  modified_base 77: mod_base = OTHER; note = 2'-O-Methyl-adenosine
  modified_base 78: mod_base = OTHER; note = 2'-O-Methyl-adenosine
  modified_base 79: mod_base = OTHER; note = 2'-O-Methyl-guanosine
  modified_base 80: mod_base = OTHER; note = 2'-O-Methyl-uridine
  modified_base 82: mod_base = OTHER; note = 2'-O-Methyl-guanosine
  modified_base 83: mod_base = OTHER; note = 2'-O-Methyl-cytidine
  modified_base 84: mod_base = OTHER; note = 2'-O-Methyl-adenosine
  modified_base 85: mod_base = OTHER; note = 2'-O-Methyl-cytidine
  modified_base 86: mod_base = OTHER; note = 2'-O-Methyl-cytidine
  modified_base 87: mod_base = OTHER; note = 2'-O-Methyl-guanosine
  modified_base 89: mod_base = OTHER; note = 2'-O-Methyl-guanosine
  modified_base 92: mod_base = OTHER; note = 2'-O-Methyl-guanosine
  modified_base 93: mod_base = OTHER; note = 2'-O-Methyl-guanosine
  modified_base 94: mod_base = OTHER; note = 2'-O-Methyl-uridine
  modified_base 95: mod_base = OTHER; note = 2'-O-Methyl-guanosine
  modified_base 96: mod_base = OTHER; note = 2'-O-Methyl-cytidine
  modified_base 97: mod_base = OTHER; note = 2'-O-Methyl-uridine phosphorothioate
  modified_base 98: mod_base = OTHER; note = 2'-O-Methyl-uridine phosphorothioate
  modified_base 99: mod_base = OTHER; note = 2'-O-Methyl-uridine phosphorothioate
  modified_base 100: mod_base = OTHER; note = 2'-O-Methyl-uridine

SEQ ID NO: 2480 - RNA, 103 nt, synthetic construct; identical to SEQ ID NO: 1700
  source 1..103: mol_type = other RNA
  modified_base 1: mod_base = OTHER; note = 2'-O-Methyl-cytidine phosphorothioate
  modified_base 2: mod_base = OTHER; note = 2'-O-Methyl-adenosine phosphorothioate
  modified_base 3: mod_base = OTHER; note = 2'-O-Methyl-guanosine phosphorothioate
  modified_base 21: mod_base = OTHER; note = 2'-O-Methyl-guanosine
  modified_base 25: mod_base = OTHER; note = uridine phosphorothioate
  modified_base 28: mod_base = OTHER; note = 2'-O-Methyl-adenosine
  modified_base 29: mod_base = OTHER; note = 2'-O-Methyl-guanosine
  modified_base 30: mod_base = OTHER; note = 2'-O-Methyl-cytidine
  modified_base 31: mod_base = OTHER; note = 2'-O-Methyl-uridine
  modified_base 32: mod_base = OTHER; note = 2'-O-Methyl-adenosine
  modified_base 33: mod_base = OTHER; note = 2'-O-Methyl-guanosine
  modified_base 34: mod_base = OTHER; note = 2'-O-Methyl-adenosine
  modified_base 35: mod_base = OTHER; note = 2'-O-Methyl-adenosine
  modified_base 36: mod_base = OTHER; note = 2'-O-Methyl-adenosine
  modified_base 37: mod_base = OTHER; note = 2'-O-Methyl-uridine
  modified_base 38: mod_base = OTHER; note = 2'-O-Methyl-adenosine
  modified_base 39: mod_base = OTHER; note = 2'-O-Methyl-guanosine
  modified_base 40: mod_base = OTHER; note = 2'-O-Methyl-cytidine
  modified_base 41: mod_base = OTHER; note = 2'-O-Methyl-adenosine
  modified_base 42: mod_base = OTHER; note = 2'-O-Methyl-adenosine
  modified_base 46: mod_base = OTHER; note = 2'-O-Methyl-adenosine
  modified_base 48: mod_base = OTHER; note = 2'-O-Methyl-adenosine
  modified_base 50: mod_base = OTHER; note = 2'-O-Methyl-uridine
  modified_base 52: mod_base = OTHER; note = 2'-O-Methyl-adenosine
  modified_base 53: mod_base = OTHER; note = 2'-O-Methyl-guanosine
  modified_base 54: mod_base = OTHER; note = 2'-O-Methyl-guanosine
  modified_base 55: mod_base = OTHER; note = 2'-O-Methyl-cytidine
  modified_base 56: mod_base = OTHER; note = 2'-O-Methyl-uridine
  modified_base 57: mod_base = OTHER; note = 2'-O-Methyl-adenosine
  modified_base 60: mod_base = OTHER; note = 2'-O-Methyl-cytidine
  modified_base 61: mod_base = OTHER; note = 2'-O-Methyl-cytidine
  modified_base 64: mod_base = OTHER; note = uridine phosphorothioate
  modified_base 66: mod_base = OTHER; note = 2'-O-Methyl-uridine
  modified_base 67: mod_base = OTHER; note = 2'-O-Methyl-cytidine
  modified_base 70: mod_base = OTHER; note = 2'-O-Methyl-cytidine
  modified_base 71: mod_base = OTHER; note = 2'-O-Methyl-uridine
  modified_base 72: mod_base = OTHER; note = 2'-O-Methyl-uridine
  modified_base 74: mod_base = OTHER; note = 2'-O-Methyl-adenosine
  modified_base 75: mod_base = OTHER; note = 2'-O-Methyl-adenosine
  modified_base 76: mod_base = OTHER; note = 2'-O-Methyl-adenosine
  modified_base 77: mod_base = OTHER; note = 2'-O-Methyl-adenosine
  modified_base 78: mod_base = OTHER; note = 2'-O-Methyl-adenosine
  modified_base 79: mod_base = OTHER; note = 2'-O-Methyl-guanosine
  modified_base 80: mod_base = OTHER; note = 2'-O-Methyl-uridine
  modified_base 82: mod_base = OTHER; note = 2'-O-Methyl-guanosine
  modified_base 83: mod_base = OTHER; note = 2'-O-Methyl-cytidine
  modified_base 84: mod_base = OTHER; note = 2'-O-Methyl-adenosine
  modified_base 85: mod_base = OTHER; note = 2'-O-Methyl-cytidine
  modified_base 86: mod_base = OTHER; note = 2'-O-Methyl-cytidine
  modified_base 87: mod_base = OTHER; note = 2'-O-Methyl-guanosine
  modified_base 89: mod_base = OTHER; note = 2'-O-Methyl-guanosine
  modified_base 92: mod_base = OTHER; note = 2'-O-Methyl-guanosine
  modified_base 93: mod_base = OTHER; note = 2'-O-Methyl-guanosine
  modified_base 94: mod_base = OTHER; note = 2'-O-Methyl-uridine
  modified_base 95: mod_base = OTHER; note = 2'-O-Methyl-guanosine
  modified_base 96: mod_base = OTHER; note = 2'-O-Methyl-cytidine
  modified_base 97: mod_base = OTHER; note = 2'-O-Methyl-uridine phosphorothioate
  modified_base 98: mod_base = OTHER; note = 2'-O-Methyl-uridine phosphorothioate
  modified_base 99: mod_base = OTHER; note = 2'-O-Methyl-uridine phosphorothioate
  modified_base 100: mod_base = OTHER; note = 2'-O-Methyl-uridine

SEQ ID NO: 2481 - RNA, 103 nt, synthetic construct; identical to SEQ ID NO: 1700
  source 1..103: mol_type = other RNA
  modified_base 1: mod_base = OTHER; note = 2'-O-Methyl-cytidine phosphorothioate
  modified_base 2: mod_base = OTHER; note = 2'-O-Methyl-adenosine phosphorothioate
  modified_base 3: mod_base = OTHER; note = 2'-O-Methyl-guanosine phosphorothioate
  modified_base 21: mod_base = OTHER; note = 2'-O-Methyl-guanosine
  modified_base 25: mod_base = OTHER; note = uridine phosphorothioate
  modified_base 28: mod_base = OTHER; note = 2'-O-Methyl-adenosine
  modified_base 29: mod_base = OTHER; note = 2'-O-Methyl-guanosine
  modified_base 30: mod_base = OTHER; note = 2'-O-Methyl-cytidine
  modified_base 31: mod_base = OTHER; note = 2'-O-Methyl-uridine
  modified_base 32: mod_base = OTHER; note = 2'-O-Methyl-adenosine
  modified_base 33: mod_base = OTHER; note = 2'-O-Methyl-guanosine
  modified_base 34: mod_base = OTHER; note = 2'-O-Methyl-adenosine
  modified_base 35: mod_base = OTHER; note = 2'-O-Methyl-adenosine
  modified_base 36: mod_base = OTHER; note = 2'-O-Methyl-adenosine
  modified_base 37: mod_base = OTHER; note = 2'-O-Methyl-uridine
  modified_base 38: mod_base = OTHER; note = 2'-O-Methyl-adenosine
  modified_base 39: mod_base = OTHER; note = 2'-O-Methyl-guanosine
  modified_base 40: mod_base = OTHER; note = 2'-O-Methyl-cytidine
  modified_base 41: mod_base = OTHER; note = 2'-O-Methyl-adenosine
  modified_base 42: mod_base = OTHER; note = 2'-O-Methyl-adenosine
  modified_base 46: mod_base = OTHER; note = 2'-O-Methyl-adenosine
  modified_base 48: mod_base = OTHER; note = 2'-O-Methyl-adenosine
  modified_base 50: mod_base = OTHER; note = 2'-O-Methyl-uridine
  modified_base 52: mod_base = OTHER; note = 2'-O-Methyl-adenosine
  modified_base 53: mod_base = OTHER; note = 2'-O-Methyl-guanosine
  modified_base 54: mod_base = OTHER; note = 2'-O-Methyl-guanosine
  modified_base 57: mod_base = OTHER; note = 2'-O-Methyl-adenosine
  modified_base 61: mod_base = OTHER; note = 2'-O-Methyl-cytidine
  modified_base 64: mod_base = OTHER; note = uridine phosphorothioate
  modified_base 66: mod_base = OTHER; note = 2'-O-Methyl-uridine
  modified_base 67: mod_base = OTHER; note = 2'-O-Methyl-cytidine
  modified_base 70: mod_base = OTHER; note = 2'-O-Methyl-cytidine
  modified_base 71: mod_base = OTHER; note = 2'-O-Methyl-uridine
  modified_base 72: mod_base = OTHER; note = 2'-O-Methyl-uridine
  modified_base 73: mod_base = OTHER; note = 2'-O-Methyl-guanosine
  modified_base 74: mod_base = OTHER; note = 2'-O-Methyl-adenosine
  modified_base 75: mod_base = OTHER; note = 2'-O-Methyl-adenosine
  modified_base 76: mod_base = OTHER; note = 2'-O-Methyl-adenosine
  modified_base 77: mod_base = OTHER; note = 2'-O-Methyl-adenosine
  modified_base 78: mod_base = OTHER; note = 2'-O-Methyl-adenosine
  modified_base 79: mod_base = OTHER; note = 2'-O-Methyl-guanosine
  modified_base 80: mod_base = OTHER; note = 2'-O-Methyl-uridine
  modified_base 82: mod_base = OTHER; note = 2'-O-Methyl-guanosine
  modified_base 83: mod_base = OTHER; note = 2'-O-Methyl-cytidine
  modified_base 84: mod_base = OTHER; note = 2'-O-Methyl-adenosine
  modified_base 85: mod_base = OTHER; note = 2'-O-Methyl-cytidine
  modified_base 86: mod_base = OTHER; note = 2'-O-Methyl-cytidine
  modified_base 87: mod_base = OTHER; note = 2'-O-Methyl-guanosine
  modified_base 89: mod_base = OTHER; note = 2'-O-Methyl-guanosine
  modified_base 92: mod_base = OTHER; note = 2'-O-Methyl-guanosine
  modified_base 93: mod_base = OTHER; note = 2'-O-Methyl-guanosine
  modified_base 94: mod_base = OTHER; note = 2'-O-Methyl-uridine
  modified_base 95: mod_base = OTHER; note = 2'-O-Methyl-guanosine
  modified_base 96: mod_base = OTHER; note = 2'-O-Methyl-cytidine
  modified_base 97: mod_base = OTHER; note = 2'-O-Methyl-uridine phosphorothioate
  modified_base 98: mod_base = OTHER; note = 2'-O-Methyl-uridine phosphorothioate
  modified_base 99: mod_base = OTHER; note = 2'-O-Methyl-uridine phosphorothioate
  modified_base 100: mod_base = OTHER; note = 2'-O-Methyl-uridine

SEQ ID NO: 2482 - RNA, 103 nt, synthetic construct; identical to SEQ ID NO: 1700
  source 1..103: mol_type = other RNA
  modified_base 1: mod_base = OTHER; note = 2'-O-Methyl-cytidine phosphorothioate
  modified_base 2: mod_base = OTHER; note = 2'-O-Methyl-adenosine phosphorothioate
  modified_base 3: mod_base = OTHER; note = 2'-O-Methyl-guanosine phosphorothioate
  modified_base 21: mod_base = OTHER; note = 2'-O-Methyl-guanosine
  modified_base 25: mod_base = OTHER; note = uridine phosphorothioate
  modified_base 28: mod_base = OTHER; note = 2'-O-Methyl-adenosine
  modified_base 29: mod_base = OTHER; note = 2'-O-Methyl-guanosine
  modified_base 30: mod_base = OTHER; note = 2'-O-Methyl-cytidine
  modified_base 31: mod_base = OTHER; note = 2'-O-Methyl-uridine
  modified_base 32: mod_base = OTHER; note = 2'-O-Methyl-adenosine
  modified_base 33: mod_base = OTHER; note = 2'-O-Methyl-guanosine
  modified_base 34: mod_base = OTHER; note = 2'-O-Methyl-adenosine
  modified_base 35: mod_base = OTHER; note = 2'-O-Methyl-adenosine
  modified_base 36: mod_base = OTHER; note = 2'-O-Methyl-adenosine
  modified_base 37: mod_base = OTHER; note = 2'-O-Methyl-uridine
  modified_base 38: mod_base = OTHER; note = 2'-O-Methyl-adenosine
  modified_base 39: mod_base = OTHER; note = 2'-O-Methyl-guanosine
  modified_base 40: mod_base = OTHER; note = 2'-O-Methyl-cytidine
  modified_base 41: mod_base = OTHER; note = 2'-O-Methyl-adenosine
  modified_base 42: mod_base = OTHER; note = 2'-O-Methyl-adenosine
  modified_base 46: mod_base = OTHER; note = 2'-O-Methyl-adenosine
  modified_base 48: mod_base = OTHER; note = 2'-O-Methyl-adenosine
  modified_base 50: mod_base = OTHER; note = 2'-O-Methyl-uridine
  modified_base 52: mod_base = OTHER; note = 2'-O-Methyl-adenosine
  modified_base 53: mod_base = OTHER; note = 2'-O-Methyl-guanosine
  modified_base 54: mod_base = OTHER; note = 2'-O-Methyl-guanosine
  modified_base 57: mod_base = OTHER; note = 2'-O-Methyl-adenosine
  modified_base 61: mod_base = OTHER; note = 2'-O-Methyl-cytidine
  modified_base 64: mod_base = OTHER; note = uridine phosphorothioate
  modified_base 66: mod_base = OTHER; note = 2'-O-Methyl-uridine
  modified_base 67: mod_base = OTHER; note = 2'-O-Methyl-cytidine
  modified_base 70: mod_base = OTHER; note = 2'-O-Methyl-cytidine
  modified_base 71: mod_base = OTHER; note = 2'-O-Methyl-uridine
  modified_base 72: mod_base = OTHER; note = 2'-O-Methyl-uridine
  modified_base 73: mod_base = OTHER; note = 2'-O-Methyl-guanosine
  modified_base 74: mod_base = OTHER; note = 2'-O-Methyl-adenosine
  modified_base 75: mod_base = OTHER; note = 2'-O-Methyl-adenosine
  modified_base 76: mod_base = OTHER; note = 2'-O-Methyl-adenosine
  modified_base 77: mod_base = OTHER; note = 2'-O-Methyl-adenosine
  modified_base 78: mod_base = OTHER; note = 2'-O-Methyl-adenosine
  modified_base 79: mod_base = OTHER; note = 2'-O-Methyl-guanosine
  modified_base 80: mod_base = OTHER; note = 2'-O-Methyl-uridine
  modified_base 82: mod_base = OTHER; note = 2'-O-Methyl-guanosine
  modified_base 83: mod_base = OTHER; note = 2'-O-Methyl-cytidine
  modified_base 84: mod_base = OTHER; note = 2'-O-Methyl-adenosine
  modified_base 85: mod_base = OTHER; note = 2'-O-Methyl-cytidine
  modified_base 86: mod_base = OTHER; note = 2'-O-Methyl-cytidine
  modified_base 87: mod_base = OTHER; note = 2'-O-Methyl-guanosine
  modified_base 89: mod_base = OTHER; note = 2'-O-Methyl-guanosine
  modified_base 91: mod_base = OTHER; note = 2'-O-Methyl-cytidine
  modified_base 92: mod_base = OTHER; note = 2'-O-Methyl-guanosine
  modified_base 93: mod_base = OTHER; note = 2'-O-Methyl-guanosine
  modified_base 94: mod_base = OTHER; note = 2'-O-Methyl-uridine
  modified_base 95: mod_base = OTHER; note = 2'-O-Methyl-guanosine
  modified_base 96: mod_base = OTHER; note = 2'-O-Methyl-cytidine
  modified_base 97: mod_base = OTHER; note = 2'-O-Methyl-uridine phosphorothioate
  modified_base 98: mod_base = OTHER; note = 2'-O-Methyl-uridine phosphorothioate
  modified_base 99: mod_base = OTHER; note = 2'-O-Methyl-uridine phosphorothioate
  modified_base 100: mod_base = OTHER; note = 2'-O-Methyl-uridine

SEQ ID NO: 2483 - RNA, 103 nt, synthetic construct; identical to SEQ ID NO: 1700
  source 1..103: mol_type = other RNA
  modified_base 1: mod_base = OTHER; note = 2'-O-Methyl-cytidine phosphorothioate
  modified_base 2: mod_base = OTHER; note = 2'-O-Methyl-adenosine phosphorothioate
  modified_base 3: mod_base = OTHER; note = 2'-O-Methyl-guanosine phosphorothioate
  modified_base 21: mod_base = OTHER; note = 2'-O-Methyl-guanosine
  modified_base 25: mod_base = OTHER; note = uridine phosphorothioate
  modified_base 28: mod_base = OTHER; note = 2'-O-Methyl-adenosine
  modified_base 29: mod_base = OTHER; note = 2'-O-Methyl-guanosine
  modified_base 30: mod_base = OTHER; note = 2'-O-Methyl-cytidine
  modified_base 31: mod_base = OTHER; note = 2'-O-Methyl-uridine
  modified_base 32: mod_base = OTHER; note = 2'-O-Methyl-adenosine
  modified_base 34: mod_base = OTHER; note = 2'-O-Methyl-adenosine
  modified_base 35: mod_base = OTHER; note = 2'-O-Methyl-adenosine
  modified_base 36: mod_base = OTHER; note = 2'-O-Methyl-adenosine
  modified_base 37: mod_base = OTHER; note = 2'-O-Methyl-uridine
  modified_base 38: mod_base = OTHER; note = 2'-O-Methyl-adenosine
  modified_base 39: mod_base = OTHER; note = 2'-O-Methyl-guanosine
  modified_base 40: mod_base = OTHER; note = 2'-O-Methyl-cytidine
  modified_base 41: mod_base = OTHER; note = 2'-O-Methyl-adenosine
  modified_base 42: mod_base = OTHER; note = 2'-O-Methyl-adenosine
  modified_base 46: mod_base = OTHER; note = 2'-O-Methyl-adenosine
  modified_base 48: mod_base = OTHER; note = 2'-O-Methyl-adenosine
  modified_base 50: mod_base = OTHER; note = 2'-O-Methyl-uridine
  modified_base 52: mod_base = OTHER; note = 2'-O-Methyl-adenosine
  modified_base 53: mod_base = OTHER; note = 2'-O-Methyl-guanosine
  modified_base 54: mod_base = OTHER; note = 2'-O-Methyl-guanosine
  modified_base 57: mod_base = OTHER; note = 2'-O-Methyl-adenosine
  modified_base 61: mod_base = OTHER; note = 2'-O-Methyl-cytidine
  modified_base 64: mod_base = OTHER; note = uridine phosphorothioate
  modified_base 66: mod_base = OTHER; note = 2'-O-Methyl-uridine
  modified_base 67: mod_base = OTHER; note = 2'-O-Methyl-cytidine
  modified_base 70: mod_base = OTHER; note = 2'-O-Methyl-cytidine
  modified_base 71: mod_base = OTHER; note = 2'-O-Methyl-uridine
  modified_base 72: mod_base = OTHER; note = 2'-O-Methyl-uridine
  modified_base 73: mod_base = OTHER; note = 2'-O-Methyl-guanosine
  modified_base 74: mod_base = OTHER; note = 2'-O-Methyl-adenosine
  modified_base 75: mod_base = OTHER; note = 2'-O-Methyl-adenosine
  modified_base 76: mod_base = OTHER; note = 2'-O-Methyl-adenosine
  modified_base 77: mod_base = OTHER; note = 2'-O-Methyl-adenosine
  modified_base 78: mod_base = OTHER; note = 2'-O-Methyl-adenosine
  modified_base 79: mod_base = OTHER; note = 2'-O-Methyl-guanosine
  modified_base 80: mod_base = OTHER; note = 2'-O-Methyl-uridine
  modified_base 82: mod_base = OTHER; note = 2'-O-Methyl-guanosine
  modified_base 83: mod_base = OTHER; note = 2'-O-Methyl-cytidine
  modified_base 84: mod_base = OTHER; note = 2'-O-Methyl-adenosine
  modified_base 85: mod_base = OTHER; note = 2'-O-Methyl-cytidine
  modified_base 86: mod_base = OTHER; note = 2'-O-Methyl-cytidine
  modified_base 87: mod_base = OTHER; note = 2'-O-Methyl-guanosine
  modified_base 89: mod_base = OTHER; note = 2'-O-Methyl-guanosine
  modified_base 92: mod_base = OTHER; note = 2'-O-Methyl-guanosine
  modified_base 93: mod_base = OTHER; note = 2'-O-Methyl-guanosine
  modified_base 94: mod_base = OTHER; note = 2'-O-Methyl-uridine
  modified_base 95: mod_base = OTHER; note = 2'-O-Methyl-guanosine
  modified_base 96: mod_base = OTHER; note = 2'-O-Methyl-cytidine
  modified_base 97: mod_base = OTHER; note = 2'-O-Methyl-uridine phosphorothioate
  modified_base 98: mod_base = OTHER; note = 2'-O-Methyl-uridine phosphorothioate
  modified_base 99: mod_base = OTHER; note = 2'-O-Methyl-uridine phosphorothioate
  modified_base 100: mod_base = OTHER; note = 2'-O-Methyl-uridine

SEQ ID NO: 2484 - RNA, 103 nt, synthetic construct; identical to SEQ ID NO: 1700
  source 1..103: mol_type = other RNA
  modified_base 1: mod_base = OTHER; note = 2'-O-Methyl-cytidine phosphorothioate
  modified_base 2: mod_base = OTHER; note = 2'-O-Methyl-adenosine phosphorothioate
  modified_base 3: mod_base = OTHER; note = 2'-O-Methyl-guanosine phosphorothioate
  modified_base 21: mod_base = OTHER; note = 2'-O-Methyl-guanosine
  modified_base 25: mod_base = OTHER; note = uridine phosphorothioate
  modified_base 28: mod_base = OTHER; note = 2'-O-Methyl-adenosine
  modified_base 29: mod_base = OTHER; note = 2'-O-Methyl-guanosine
  modified_base 30: mod_base = OTHER; note = 2'-O-Methyl-cytidine
  modified_base 31: mod_base = OTHER; note = 2'-O-Methyl-uridine
  modified_base 32: mod_base = OTHER; note = 2'-O-Methyl-adenosine
  modified_base 34: mod_base = OTHER; note = 2'-O-Methyl-adenosine
  modified_base 35: mod_base = OTHER; note = 2'-O-Methyl-adenosine
  modified_base 36: mod_base = OTHER; note = 2'-O-Methyl-adenosine
  modified_base 37: mod_base = OTHER; note = 2'-O-Methyl-uridine
  modified_base 38: mod_base = OTHER; note = 2'-O-Methyl-adenosine
  modified_base 39: mod_base = OTHER; note = 2'-O-Methyl-guanosine
  modified_base 40: mod_base = OTHER; note = 2'-O-Methyl-cytidine
  modified_base 41: mod_base = OTHER; note = 2'-O-Methyl-adenosine
  modified_base 42: mod_base = OTHER; note = 2'-O-Methyl-adenosine
  modified_base 46: mod_base = OTHER; note = 2'-O-Methyl-adenosine
  modified_base 48: mod_base = OTHER; note = 2'-O-Methyl-adenosine
  modified_base 50: mod_base = OTHER; note = 2'-O-Methyl-uridine
  modified_base 52: mod_base = OTHER; note = 2'-O-Methyl-adenosine
  modified_base 53: mod_base = OTHER; note = 2'-O-Methyl-guanosine
  modified_base 54: mod_base = OTHER; note = 2'-O-Methyl-guanosine
  modified_base 57: mod_base = OTHER; note = 2'-O-Methyl-adenosine
  modified_base 61: mod_base = OTHER; note = 2'-O-Methyl-cytidine
  modified_base 64: mod_base = OTHER; note = uridine phosphorothioate
  modified_base 66: mod_base = OTHER; note = 2'-O-Methyl-uridine
  modified_base 67: mod_base = OTHER; note = 2'-O-Methyl-cytidine
  modified_base 70: mod_base = OTHER; note = 2'-O-Methyl-cytidine
  modified_base 71: mod_base = OTHER; note = 2'-O-Methyl-uridine
  modified_base 72: mod_base = OTHER; note = 2'-O-Methyl-uridine
  modified_base 73: mod_base = OTHER; note = 2'-O-Methyl-guanosine
  modified_base 74: mod_base = OTHER; note = 2'-O-Methyl-adenosine
  modified_base 75: mod_base = OTHER; note = 2'-O-Methyl-adenosine
  modified_base 76: mod_base = OTHER; note = 2'-O-Methyl-adenosine
  modified_base 77: mod_base = OTHER; note = 2'-O-Methyl-adenosine
  modified_base 78: mod_base = OTHER; note = 2'-O-Methyl-adenosine
  modified_base 79: mod_base = OTHER; note = 2'-O-Methyl-guanosine
  modified_base 80: mod_base = OTHER; note = 2'-O-Methyl-uridine
  modified_base 82: mod_base = OTHER; note = 2'-O-Methyl-guanosine
  modified_base 83: mod_base = OTHER; note = 2'-O-Methyl-cytidine
  modified_base 84: mod_base = OTHER; note = 2'-O-Methyl-adenosine
  modified_base 85: mod_base = OTHER; note = 2'-O-Methyl-cytidine
  modified_base 86: mod_base = OTHER; note = 2'-O-Methyl-cytidine
  modified_base 87: mod_base = OTHER; note = 2'-O-Methyl-guanosine
  modified_base 89: mod_base = OTHER; note = 2'-O-Methyl-guanosine
  modified_base 91: mod_base = OTHER; note = 2'-O-Methyl-cytidine
  modified_base 92: mod_base = OTHER; note = 2'-O-Methyl-guanosine
  modified_base 93: mod_base = OTHER; note = 2'-O-Methyl-guanosine
  modified_base 94: mod_base = OTHER; note = 2'-O-Methyl-uridine
  modified_base 95: mod_base = OTHER; note = 2'-O-Methyl-guanosine
  modified_base 96: mod_base = OTHER; note = 2'-O-Methyl-cytidine
  modified_base 97: mod_base = OTHER; note = 2'-O-Methyl-uridine phosphorothioate
  modified_base 98: mod_base = OTHER; note = 2'-O-Methyl-uridine phosphorothioate
  modified_base 99: mod_base = OTHER; note = 2'-O-Methyl-uridine phosphorothioate
  modified_base 100: mod_base = OTHER; note = 2'-O-Methyl-uridine

SEQ ID NO: 2485 - RNA, 103 nt, synthetic construct; identical to SEQ ID NO: 1700
  source 1..103: mol_type = other RNA
  modified_base 1: mod_base = OTHER; note = 2'-O-Methyl-cytidine phosphorothioate
  modified_base 2: mod_base = OTHER; note = 2'-O-Methyl-adenosine phosphorothioate
  modified_base 3: mod_base = OTHER; note = 2'-O-Methyl-guanosine phosphorothioate
  modified_base 21: mod_base = OTHER; note = 2'-O-Methyl-guanosine
  modified_base 25: mod_base = OTHER; note = uridine phosphorothioate
  modified_base 28: mod_base = OTHER; note = 2'-O-Methyl-adenosine
  modified_base 29: mod_base = OTHER; note = 2'-O-Methyl-guanosine
  modified_base 30: mod_base = OTHER; note = 2'-O-Methyl-cytidine
  modified_base 31: mod_base = OTHER; note = 2'-O-Methyl-uridine
  modified_base 32: mod_base = OTHER; note = 2'-O-Methyl-adenosine
  modified_base 34: mod_base = OTHER; note = 2'-O-Methyl-adenosine
  modified_base 35: mod_base = OTHER; note = 2'-O-Methyl-adenosine
  modified_base 36: mod_base = OTHER; note = 2'-O-Methyl-adenosine
  modified_base 37: mod_base = OTHER; note = 2'-O-Methyl-uridine
  modified_base 38: mod_base = OTHER; note = 2'-O-Methyl-adenosine
  modified_base 39: mod_base = OTHER; note = 2'-O-Methyl-guanosine
  modified_base 40: mod_base = OTHER; note = 2'-O-Methyl-cytidine
  modified_base 41: mod_base = OTHER; note = 2'-O-Methyl-adenosine
  modified_base 42: mod_base = OTHER; note = 2'-O-Methyl-adenosine
  modified_base 46: mod_base = OTHER; note = 2'-O-Methyl-adenosine
  modified_base 48: mod_base = OTHER; note = 2'-O-Methyl-adenosine
  modified_base 50: mod_base = OTHER; note = 2'-O-Methyl-uridine
  modified_base 52: mod_base = OTHER; note = 2'-O-Methyl-adenosine
  modified_base 53: mod_base = OTHER; note = 2'-O-Methyl-guanosine
  modified_base 54: mod_base = OTHER; note = 2'-O-Methyl-guanosine
  modified_base 55: mod_base = OTHER; note = 2'-O-Methyl-cytidine
  modified_base 56: mod_base = OTHER; note = 2'-O-Methyl-uridine
  modified_base 57: mod_base = OTHER; note = 2'-O-Methyl-adenosine
  modified_base 60: mod_base = OTHER; note = 2'-O-Methyl-cytidine
  modified_base 61: mod_base = OTHER; note = 2'-O-Methyl-cytidine
  modified_base 64: mod_base = OTHER; note = uridine phosphorothioate
  modified_base 66: mod_base = OTHER; note = 2'-O-Methyl-uridine
  modified_base 67: mod_base = OTHER; note = 2'-O-Methyl-cytidine
  modified_base 70: mod_base = OTHER; note = 2'-O-Methyl-cytidine
  modified_base 71: mod_base = OTHER; note = 2'-O-Methyl-uridine
  modified_base 72: mod_base = OTHER; note = 2'-O-Methyl-uridine
  modified_base 74: mod_base = OTHER; note = 2'-O-Methyl-adenosine
  modified_base 75: mod_base = OTHER; note = 2'-O-Methyl-adenosine
  modified_base 76: mod_base = OTHER; note = 2'-O-Methyl-adenosine
  modified_base 77: mod_base = OTHER; note = 2'-O-Methyl-adenosine
  modified_base 78: mod_base = OTHER; note = 2'-O-Methyl-adenosine
  modified_base 79: mod_base = OTHER; note = 2'-O-Methyl-guanosine
  modified_base 80: mod_base = OTHER; note = 2'-O-Methyl-uridine
  modified_base 82: mod_base = OTHER; note = 2'-O-Methyl-guanosine
  modified_base 83: mod_base = OTHER; note = 2'-O-Methyl-cytidine
  modified_base 84: mod_base = OTHER; note = 2'-O-Methyl-adenosine
  modified_base 85: mod_base = OTHER; note = 2'-O-Methyl-cytidine
  modified_base 86: mod_base = OTHER; note = 2'-O-Methyl-cytidine
  modified_base 87: mod_base = OTHER; note = 2'-O-Methyl-guanosine
  modified_base 89: mod_base = OTHER; note = 2'-O-Methyl-guanosine
  modified_base 92: mod_base = OTHER; note = 2'-O-Methyl-guanosine
  modified_base 93: mod_base = OTHER; note = 2'-O-Methyl-guanosine
  modified_base 94: mod_base = OTHER; note = 2'-O-Methyl-uridine
  modified_base 95: mod_base = OTHER; note = 2'-O-Methyl-guanosine
  modified_base 96: mod_base = OTHER; note = 2'-O-Methyl-cytidine
  modified_base 97: mod_base = OTHER; note = 2'-O-Methyl-uridine phosphorothioate
  modified_base 98: mod_base = OTHER; note = 2'-O-Methyl-uridine phosphorothioate
  modified_base 99: mod_base = OTHER; note = 2'-O-Methyl-uridine phosphorothioate
  modified_base 100: mod_base = OTHER; note = 2'-O-Methyl-uridine

SEQ ID NO: 2486 - RNA, 103 nt, synthetic construct; identical to SEQ ID NO: 1643
  source 1..103: mol_type = other RNA
  modified_base 1: mod_base = OTHER; note = 2'-O-Methyl-cytidine phosphorothioate
  modified_base 2: mod_base = OTHER; note = 2'-O-Methyl-cytidine phosphorothioate
  modified_base 3: mod_base = OTHER; note = 2'-O-Methyl-cytidine phosphorothioate
  modified_base 21: mod_base = OTHER; note = 2'-O-Methyl-guanosine
  modified_base 25: mod_base = OTHER; note = uridine phosphorothioate
  modified_base 28: mod_base = OTHER; note = 2'-O-Methyl-adenosine
  modified_base 29: mod_base = OTHER; note = 2'-O-Methyl-guanosine
  modified_base 30: mod_base = OTHER; note = 2'-O-Methyl-cytidine
  modified_base 31: mod_base = OTHER; note = 2'-O-Methyl-uridine
  modified_base 32: mod_base = OTHER; note = 2'-O-Methyl-adenosine
  modified_base 33: mod_base = OTHER; note = 2'-O-Methyl-guanosine
  modified_base 34: mod_base = OTHER; note = 2'-O-Methyl-adenosine
  modified_base 35: mod_base = OTHER; note = 2'-O-Methyl-adenosine
  modified_base 36: mod_base = OTHER; note = 2'-O-Methyl-adenosine
  modified_base 37: mod_base = OTHER; note = 2'-O-Methyl-uridine
  modified_base 38: mod_base = OTHER; note = 2'-O-Methyl-adenosine
  modified_base 39: mod_base = OTHER; note = 2'-O-Methyl-guanosine
  modified_base 40: mod_base = OTHER; note = 2'-O-Methyl-cytidine
  modified_base 41: mod_base = OTHER; note = 2'-O-Methyl-adenosine
  modified_base 42: mod_base = OTHER; note = 2'-O-Methyl-adenosine
  modified_base 45: mod_base = OTHER; note = uridine phosphorothioate
  modified_base 46: mod_base = OTHER; note = 2'-O-Methyl-adenosine
  modified_base 48: mod_base = OTHER; note = 2'-O-Methyl-adenosine
  modified_base 50: mod_base = OTHER; note = 2'-O-Methyl-uridine
  modified_base 52: mod_base = OTHER; note = 2'-O-Methyl-adenosine
  modified_base 53: mod_base = OTHER; note = 2'-O-Methyl-guanosine
  modified_base 54: mod_base = OTHER; note = 2'-O-Methyl-guanosine
  modified_base 55: mod_base = OTHER; note = 2'-O-Methyl-cytidine
  modified_base 56: mod_base = OTHER; note = 2'-O-Methyl-uridine
  modified_base 57: mod_base = OTHER; note = 2'-O-Methyl-adenosine
  modified_base 60: mod_base = OTHER; note = 2'-O-Methyl-cytidine
  modified_base 61: mod_base = OTHER; note = 2'-O-Methyl-cytidine
  modified_base 64: mod_base = OTHER; note = uridine phosphorothioate
  modified_base 66: mod_base = OTHER; note = 2'-O-Methyl-uridine
  modified_base 67: mod_base = OTHER; note = 2'-O-Methyl-cytidine
  modified_base 70: mod_base = OTHER; note = 2'-O-Methyl-cytidine
  modified_base 71: mod_base = OTHER; note = 2'-O-Methyl-uridine
  modified_base 72: mod_base = OTHER; note = 2'-O-Methyl-uridine
  modified_base 73: mod_base = OTHER; note = 2'-O-Methyl-guanosine
  modified_base 74: mod_base = OTHER; note = 2'-O-Methyl-adenosine
  modified_base 75: mod_base = OTHER; note = 2'-O-Methyl-adenosine
  modified_base 76: mod_base = OTHER; note = 2'-O-Methyl-adenosine
  modified_base 77: mod_base = OTHER; note = 2'-O-Methyl-adenosine
  modified_base 78: mod_base = OTHER; note = 2'-O-Methyl-adenosine
  modified_base 79: mod_base = OTHER; note = 2'-O-Methyl-guanosine
  modified_base 80: mod_base = OTHER; note = 2'-O-Methyl-uridine
  modified_base 81: mod_base = OTHER; note = 2'-O-Methyl-guanosine
  modified_base 83: mod_base = OTHER; note = 2'-O-Methyl-cytidine
  modified_base 84: mod_base = OTHER; note = 2'-O-Methyl-adenosine
  modified_base 85: mod_base = OTHER; note = 2'-O-Methyl-cytidine
  modified_base 86: mod_base = OTHER; note = 2'-O-Methyl-cytidine
  modified_base 87: mod_base = OTHER; note = 2'-O-Methyl-guanosine
  modified_base 88: mod_base = OTHER; note = 2'-O-Methyl-adenosine
  modified_base 89: mod_base = OTHER; note = 2'-O-Methyl-guanosine
  modified_base 90: mod_base = OTHER; note = 2'-O-Methyl-uridine
  modified_base 91: mod_base = OTHER; note = 2'-O-Methyl-cytidine
  modified_base 92: mod_base = OTHER; note = 2'-O-Methyl-guanosine
  modified_base 93: mod_base = OTHER; note = 2'-O-Methyl-guanosine
  modified_base 94: mod_base = OTHER; note = 2'-O-Methyl-uridine
  modified_base 95: mod_base = OTHER; note = 2'-O-Methyl-guanosine
  modified_base 96: mod_base = OTHER; note = 2'-O-Methyl-cytidine
  modified_base 97: mod_base = OTHER; note = 2'-O-Methyl-uridine phosphorothioate
  modified_base 98: mod_base = OTHER; note = 2'-O-Methyl-uridine phosphorothioate
  modified_base 99: mod_base = OTHER; note = 2'-O-Methyl-uridine phosphorothioate
  modified_base 100: mod_base = OTHER; note = 2'-O-Methyl-uridine

SEQ ID NO: 2487 - RNA, 103 nt, synthetic construct; identical to SEQ ID NO: 1643
  source 1..103: mol_type = other RNA
  modified_base 1: mod_base = OTHER; note = 2'-O-Methyl-cytidine phosphorothioate
  modified_base 2: mod_base = OTHER; note = 2'-O-Methyl-cytidine phosphorothioate
  modified_base 3: mod_base = OTHER; note = 2'-O-Methyl-cytidine phosphorothioate
  modified_base 21: mod_base = OTHER; note = 2'-O-Methyl-guanosine
  modified_base 25: mod_base = OTHER; note = uridine phosphorothioate
  modified_base 28: mod_base = OTHER; note = 2'-O-Methyl-adenosine
  modified_base 29: mod_base = OTHER; note = 2'-O-Methyl-guanosine
  modified_base 30: mod_base = OTHER; note = 2'-O-Methyl-cytidine
  modified_base 31: mod_base = OTHER; note = 2'-O-Methyl-uridine
  modified_base 32: mod_base = OTHER; note = 2'-O-Methyl-adenosine
  modified_base 34: mod_base = OTHER; note = 2'-O-Methyl-adenosine
  modified_base 35: mod_base = OTHER; note = 2'-O-Methyl-adenosine
  modified_base 36: mod_base = OTHER; note = 2'-O-Methyl-adenosine
  modified_base 37: mod_base = OTHER; note = 2'-O-Methyl-uridine
  modified_base 38: mod_base = OTHER; note = 2'-O-Methyl-adenosine
  modified_base 39: mod_base = OTHER; note = 2'-O-Methyl-guanosine
  modified_base 40: mod_base = OTHER; note = 2'-O-Methyl-cytidine
  modified_base 41: mod_base = OTHER; note = 2'-O-Methyl-adenosine
  modified_base 42: mod_base = OTHER; note = 2'-O-Methyl-adenosine
  modified_base 45: mod_base = OTHER; note = uridine phosphorothioate
  modified_base 46: mod_base = OTHER; note = 2'-O-Methyl-adenosine
  modified_base 48: mod_base = OTHER; note = 2'-O-Methyl-adenosine
  modified_base 50: mod_base = OTHER; note = 2'-O-Methyl-uridine
  modified_base 52: mod_base = OTHER; note = 2'-O-Methyl-adenosine
  modified_base 53: mod_base = OTHER; note = 2'-O-Methyl-guanosine
  modified_base 54: mod_base = OTHER; note = 2'-O-Methyl-guanosine
  modified_base 55: mod_base = OTHER; note = 2'-O-Methyl-cytidine
  modified_base 56: mod_base = OTHER; note = 2'-O-Methyl-uridine
  modified_base 57: mod_base = OTHER; note = 2'-O-Methyl-adenosine
  modified_base 60: mod_base = OTHER; note = 2'-O-Methyl-cytidine
  modified_base 61: mod_base = OTHER; note = 2'-O-Methyl-cytidine
  modified_base 64: mod_base = OTHER; note = uridine phosphorothioate
  modified_base 66: mod_base = OTHER; note = 2'-O-Methyl-uridine
  modified_base 67: mod_base = OTHER; note = 2'-O-Methyl-cytidine
  modified_base 70: mod_base = OTHER; note = 2'-O-Methyl-cytidine
  modified_base 71: mod_base = OTHER; note = 2'-O-Methyl-uridine
  modified_base 72: mod_base = OTHER; note = 2'-O-Methyl-uridine
  modified_base 74: mod_base = OTHER; note = 2'-O-Methyl-adenosine
  modified_base 75: mod_base = OTHER; note = 2'-O-Methyl-adenosine
  modified_base 76: mod_base = OTHER; note = 2'-O-Methyl-adenosine
  modified_base 77: mod_base = OTHER; note = 2'-O-Methyl-adenosine
  modified_base 78: mod_base = OTHER; note = 2'-O-Methyl-adenosine
  modified_base 79: mod_base = OTHER; note = 2'-O-Methyl-guanosine
  modified_base 80: mod_base = OTHER; note = 2'-O-Methyl-uridine
  modified_base 81: mod_base = OTHER; note = 2'-O-Methyl-guanosine
  modified_base 83: mod_base = OTHER; note = 2'-O-Methyl-cytidine
  modified_base 84: mod_base = OTHER; note = 2'-O-Methyl-adenosine
  modified_base 85: mod_base = OTHER; note = 2'-O-Methyl-cytidine
  modified_base 86: mod_base = OTHER; note = 2'-O-Methyl-cytidine
  modified_base 87: mod_base = OTHER; note = 2'-O-Methyl-guanosine
  modified_base 88: mod_base = OTHER; note = 2'-O-Methyl-adenosine
  modified_base 89: mod_base = OTHER; note = 2'-O-Methyl-guanosine
  modified_base 90: mod_base = OTHER; note = 2'-O-Methyl-uridine
  modified_base 91: mod_base = OTHER; note = 2'-O-Methyl-cytidine
  modified_base 92: mod_base = OTHER; note = 2'-O-Methyl-guanosine
  modified_base 93: mod_base = OTHER; note = 2'-O-Methyl-guanosine
  modified_base 94: mod_base = OTHER; note = 2'-O-Methyl-uridine
  modified_base 95: mod_base = OTHER; note = 2'-O-Methyl-guanosine
  modified_base 96: mod_base = OTHER; note = 2'-O-Methyl-cytidine
  modified_base 97: mod_base = OTHER; note = 2'-O-Methyl-uridine phosphorothioate
  modified_base 98: mod_base = OTHER; note = 2'-O-Methyl-uridine phosphorothioate
  modified_base 99: mod_base = OTHER; note = 2'-O-Methyl-uridine phosphorothioate
  modified_base 100: mod_base = OTHER; note = 2'-O-Methyl-uridine

SEQ ID NO: 2488 - RNA, 103 nt, synthetic construct; identical to SEQ ID NO: 1699
  source 1..103: mol_type = other RNA
  modified_base 1: mod_base = OTHER; note = 2'-O-Methyl-guanosine phosphorothioate
  modified_base 2: mod_base = OTHER; note = 2'-O-Methyl-adenosine phosphorothioate
  modified_base 3: mod_base = OTHER; note = 2'-O-Methyl-guanosine phosphorothioate
  modified_base 21: mod_base = OTHER; note = 2'-O-Methyl-guanosine
  modified_base 25: mod_base = OTHER; note = uridine phosphorothioate
  modified_base 28: mod_base = OTHER; note = 2'-O-Methyl-adenosine
  modified_base 29: mod_base = OTHER; note = 2'-O-Methyl-guanosine
  modified_base 30: mod_base = OTHER; note = 2'-O-Methyl-cytidine
  modified_base 31: mod_base = OTHER; note = 2'-O-Methyl-uridine
  modified_base 32: mod_base = OTHER; note = 2'-O-Methyl-adenosine
  modified_base 33: mod_base = OTHER; note = 2'-O-Methyl-guanosine
  modified_base 34: mod_base = OTHER; note = 2'-O-Methyl-adenosine
  modified_base 35: mod_base = OTHER; note = 2'-O-Methyl-adenosine
  modified_base 36: mod_base = OTHER; note = 2'-O-Methyl-adenosine
  modified_base 37: mod_base = OTHER; note = 2'-O-Methyl-uridine
  modified_base 38: mod_base = OTHER; note = 2'-O-Methyl-adenosine
  modified_base 39: mod_base = OTHER; note = 2'-O-Methyl-guanosine
  modified_base 40: mod_base = OTHER; note = 2'-O-Methyl-cytidine
  modified_base 41: mod_base = OTHER; note = 2'-O-Methyl-adenosine
  modified_base 42: mod_base = OTHER; note = 2'-O-Methyl-adenosine
  modified_base 45: mod_base = OTHER; note = uridine phosphorothioate
  modified_base 46: mod_base = OTHER; note = 2'-O-Methyl-adenosine
  modified_base 48: mod_base = OTHER; note = 2'-O-Methyl-adenosine
  modified_base 50: mod_base = OTHER; note = 2'-O-Methyl-uridine
  modified_base 52: mod_base = OTHER; note = 2'-O-Methyl-adenosine
  modified_base 53: mod_base = OTHER; note = 2'-O-Methyl-guanosine
  modified_base 54: mod_base = OTHER; note = 2'-O-Methyl-guanosine
  modified_base 55: mod_base = OTHER; note = 2'-O-Methyl-cytidine
  modified_base 56: mod_base = OTHER; note = 2'-O-Methyl-uridine
  modified_base 57: mod_base = OTHER; note = 2'-O-Methyl-adenosine
  modified_base 60: mod_base = OTHER; note = 2'-O-Methyl-cytidine
  modified_base 61: mod_base = OTHER; note = 2'-O-Methyl-cytidine
  modified_base 64: mod_base = OTHER; note = uridine phosphorothioate
  modified_base 66: mod_base = OTHER; note = 2'-O-Methyl-uridine
  modified_base 67: mod_base = OTHER; note = 2'-O-Methyl-cytidine
  modified_base 70: mod_base = OTHER; note = 2'-O-Methyl-cytidine
  modified_base 71: mod_base = OTHER; note = 2'-O-Methyl-uridine
  modified_base 72: mod_base = OTHER; note = 2'-O-Methyl-uridine
  modified_base 73: mod_base = OTHER; note = 2'-O-Methyl-guanosine
  modified_base 74: mod_base = OTHER; note = 2'-O-Methyl-adenosine
  modified_base 75: mod_base = OTHER; note = 2'-O-Methyl-adenosine
  modified_base 76: mod_base = OTHER; note = 2'-O-Methyl-adenosine
  modified_base 77: mod_base = OTHER; note = 2'-O-Methyl-adenosine
  modified_base 78: mod_base = OTHER; note = 2'-O-Methyl-adenosine
  modified_base 79: mod_base = OTHER; note = 2'-O-Methyl-guanosine
  modified_base 80: mod_base = OTHER; note = 2'-O-Methyl-uridine
  modified_base 81: mod_base = OTHER; note = 2'-O-Methyl-guanosine
  modified_base 83: mod_base = OTHER; note = 2'-O-Methyl-cytidine
  modified_base 84: mod_base = OTHER; note = 2'-O-Methyl-adenosine
  modified_base 85: mod_base = OTHER; note = 2'-O-Methyl-cytidine
  modified_base 86: mod_base = OTHER; note = 2'-O-Methyl-cytidine
  modified_base 87: mod_base = OTHER; note = 2'-O-Methyl-guanosine
  modified_base 88: mod_base = OTHER; note = 2'-O-Methyl-adenosine
  modified_base 89: mod_base = OTHER; note = 2'-O-Methyl-guanosine
  modified_base 90: mod_base = OTHER; note = 2'-O-Methyl-uridine
  modified_base 91: mod_base = OTHER; note = 2'-O-Methyl-cytidine
  modified_base 92: mod_base = OTHER; note = 2'-O-Methyl-guanosine
  modified_base 93: mod_base = OTHER; note = 2'-O-Methyl-guanosine
  modified_base 94: mod_base = OTHER; note = 2'-O-Methyl-uridine
  modified_base 95: mod_base = OTHER; note = 2'-O-Methyl-guanosine
  modified_base 96: mod_base = OTHER; note = 2'-O-Methyl-cytidine
  modified_base 97: mod_base = OTHER; note = 2'-O-Methyl-uridine phosphorothioate
  modified_base 98: mod_base = OTHER; note = 2'-O-Methyl-uridine phosphorothioate
  modified_base 99: mod_base = OTHER; note = 2'-O-Methyl-uridine phosphorothioate
  modified_base 100: mod_base = OTHER; note = 2'-O-Methyl-uridine

SEQ ID NO: 2489 - RNA, 103 nt, synthetic construct; identical to SEQ ID NO: 1699
  source 1..103: mol_type = other RNA
  modified_base 1: mod_base = OTHER; note = 2'-O-Methyl-guanosine phosphorothioate
  modified_base 2: mod_base = OTHER; note = 2'-O-Methyl-adenosine phosphorothioate
  modified_base 3: mod_base = OTHER; note = 2'-O-Methyl-guanosine phosphorothioate
  modified_base 21: mod_base = OTHER; note = 2'-O-Methyl-guanosine
  modified_base 25: mod_base = OTHER; note = uridine phosphorothioate
  modified_base 28: mod_base = OTHER; note = 2'-O-Methyl-adenosine
  modified_base 29: mod_base = OTHER; note = 2'-O-Methyl-guanosine
  modified_base 30: mod_base = OTHER; note = 2'-O-Methyl-cytidine
  modified_base 31: mod_base = OTHER; note = 2'-O-Methyl-uridine
  modified_base 32: mod_base = OTHER; note = 2'-O-Methyl-adenosine
  modified_base 34: mod_base = OTHER; note = 2'-O-Methyl-adenosine
  modified_base 35: mod_base = OTHER; note = 2'-O-Methyl-adenosine
  modified_base 36: mod_base = OTHER; note = 2'-O-Methyl-adenosine
  modified_base 37: mod_base = OTHER; note = 2'-O-Methyl-uridine
  modified_base 38: mod_base = OTHER; note = 2'-O-Methyl-adenosine
  modified_base 39: mod_base = OTHER; note = 2'-O-Methyl-guanosine
  modified_base 40: mod_base = OTHER; note = 2'-O-Methyl-cytidine
  modified_base 41: mod_base = OTHER; note = 2'-O-Methyl-adenosine
  modified_base 42: mod_base = OTHER; note = 2'-O-Methyl-adenosine
  modified_base 45: mod_base = OTHER; note = uridine phosphorothioate
  modified_base 46: mod_base = OTHER; note = 2'-O-Methyl-adenosine
  modified_base 48: mod_base = OTHER; note = 2'-O-Methyl-adenosine
  modified_base 50: mod_base = OTHER; note = 2'-O-Methyl-uridine
  modified_base 52: mod_base = OTHER; note = 2'-O-Methyl-adenosine
  modified_base 53: mod_base = OTHER; note = 2'-O-Methyl-guanosine
  modified_base 54: mod_base = OTHER; note = 2'-O-Methyl-guanosine
  modified_base 55: mod_base = OTHER; note = 2'-O-Methyl-cytidine
  modified_base 56: mod_base = OTHER; note = 2'-O-Methyl-uridine
  modified_base 57: mod_base = OTHER; note = 2'-O-Methyl-adenosine
  modified_base 60: mod_base = OTHER; note = 2'-O-Methyl-cytidine
  modified_base 61: mod_base = OTHER; note = 2'-O-Methyl-cytidine
  modified_base 64: mod_base = OTHER; note = uridine phosphorothioate
  modified_base 66: mod_base = OTHER; note = 2'-O-Methyl-uridine
  modified_base 67: mod_base = OTHER; note = 2'-O-Methyl-cytidine
  modified_base 70: mod_base = OTHER; note = 2'-O-Methyl-cytidine
  modified_base 71: mod_base = OTHER; note = 2'-O-Methyl-uridine
  modified_base 72: mod_base = OTHER; note = 2'-O-Methyl-uridine
  modified_base 74: mod_base = OTHER; note = 2'-O-Methyl-adenosine
  modified_base 75: mod_base = OTHER; note = 2'-O-Methyl-adenosine
  modified_base 76: mod_base = OTHER; note = 2'-O-Methyl-adenosine
  modified_base 77: mod_base = OTHER; note = 2'-O-Methyl-adenosine
  modified_base 78: mod_base = OTHER; note = 2'-O-Methyl-adenosine
  modified_base 79: mod_base = OTHER; note = 2'-O-Methyl-guanosine
  modified_base 80: mod_base = OTHER; note = 2'-O-Methyl-uridine
  modified_base 81: mod_base = OTHER; note = 2'-O-Methyl-guanosine
  modified_base 83: mod_base = OTHER; note = 2'-O-Methyl-cytidine
  modified_base 84: mod_base = OTHER; note = 2'-O-Methyl-adenosine
  modified_base 85: mod_base = OTHER; note = 2'-O-Methyl-cytidine
  modified_base 86: mod_base = OTHER; note = 2'-O-Methyl-cytidine
  modified_base 87: mod_base = OTHER; note = 2'-O-Methyl-guanosine
  modified_base 88: mod_base = OTHER; note = 2'-O-Methyl-adenosine
  modified_base 89: mod_base = OTHER; note = 2'-O-Methyl-guanosine
  modified_base 90: mod_base = OTHER; note = 2'-O-Methyl-uridine
  modified_base 91: mod_base = OTHER; note = 2'-O-Methyl-cytidine
  modified_base 92: mod_base = OTHER; note = 2'-O-Methyl-guanosine
  modified_base 93: mod_base = OTHER; note = 2'-O-Methyl-guanosine
  modified_base 94: mod_base = OTHER; note = 2'-O-Methyl-uridine
  modified_base 95: mod_base = OTHER; note = 2'-O-Methyl-guanosine
  modified_base 96: mod_base = OTHER; note = 2'-O-Methyl-cytidine
  modified_base 97: mod_base = OTHER; note = 2'-O-Methyl-uridine phosphorothioate
  modified_base 98: mod_base = OTHER; note = 2'-O-Methyl-uridine phosphorothioate
  modified_base 99: mod_base = OTHER; note = 2'-O-Methyl-uridine phosphorothioate
  modified_base 100: mod_base = OTHER; note = 2'-O-Methyl-uridine

SEQ ID NO: 2490 - RNA, 103 nt, synthetic construct; identical to SEQ ID NO: 1700
  source 1..103: mol_type = other RNA
  modified_base 1: mod_base = OTHER; note = 2'-O-Methyl-cytidine phosphorothioate
  modified_base 2: mod_base = OTHER; note = 2'-O-Methyl-adenosine phosphorothioate
  modified_base 3: mod_base = OTHER; note = 2'-O-Methyl-guanosine phosphorothioate
  modified_base 21: mod_base = OTHER; note = 2'-O-Methyl-guanosine
  modified_base 25: mod_base = OTHER; note = uridine phosphorothioate
  modified_base 28: mod_base = OTHER; note = 2'-O-Methyl-adenosine
  modified_base 29: mod_base = OTHER; note = 2'-O-Methyl-guanosine
  modified_base 30: mod_base = OTHER; note = 2'-O-Methyl-cytidine
  modified_base 31: mod_base = OTHER; note = 2'-O-Methyl-uridine
  modified_base 32: mod_base = OTHER; note = 2'-O-Methyl-adenosine
  modified_base 33: mod_base = OTHER; note = 2'-O-Methyl-guanosine
  modified_base 34: mod_base = OTHER; note = 2'-O-Methyl-adenosine
  modified_base 35: mod_base = OTHER; note = 2'-O-Methyl-adenosine
  modified_base 36: mod_base = OTHER; note = 2'-O-Methyl-adenosine
  modified_base 37: mod_base = OTHER; note = 2'-O-Methyl-uridine
  modified_base 38: mod_base = OTHER; note = 2'-O-Methyl-adenosine
  modified_base 39: mod_base = OTHER; note = 2'-O-Methyl-guanosine
  modified_base 40: mod_base = OTHER; note = 2'-O-Methyl-cytidine
  modified_base 41: mod_base = OTHER; note = 2'-O-Methyl-adenosine
  modified_base 42: mod_base = OTHER; note = 2'-O-Methyl-adenosine
  modified_base 45: mod_base = OTHER; note = uridine phosphorothioate
  modified_base 46: mod_base = OTHER; note = 2'-O-Methyl-adenosine
  modified_base 48: mod_base = OTHER; note = 2'-O-Methyl-adenosine
  modified_base 50: mod_base = OTHER; note = 2'-O-Methyl-uridine
  modified_base 52: mod_base = OTHER; note = 2'-O-Methyl-adenosine
  modified_base 53: mod_base = OTHER; note = 2'-O-Methyl-guanosine
  modified_base 54: mod_base = OTHER; note = 2'-O-Methyl-guanosine
  modified_base 57: mod_base = OTHER; note = 2'-O-Methyl-adenosine
  modified_base 61: mod_base = OTHER; note = 2'-O-Methyl-cytidine
  modified_base 64: mod_base = OTHER; note = uridine phosphorothioate
  modified_base 66: mod_base = OTHER; note = 2'-O-Methyl-uridine
  modified_base 67: mod_base = OTHER; note = 2'-O-Methyl-cytidine
  modified_base 70: mod_base = OTHER; note = 2'-O-Methyl-cytidine
  modified_base 71: mod_base = OTHER; note = 2'-O-Methyl-uridine
  modified_base 72: mod_base = OTHER; note = 2'-O-Methyl-uridine
  modified_base 74: mod_base = OTHER; note = 2'-O-Methyl-adenosine
  modified_base 75: mod_base = OTHER; note = 2'-O-Methyl-adenosine
  modified_base 76: mod_base = OTHER; note = 2'-O-Methyl-adenosine
  modified_base 77: mod_base = OTHER; note = 2'-O-Methyl-adenosine
  modified_base 78: mod_base = OTHER; note = 2'-O-Methyl-adenosine
  modified_base 79: mod_base = OTHER; note = 2'-O-Methyl-guanosine
  modified_base 80: mod_base = OTHER; note = 2'-O-Methyl-uridine
  modified_base 82: mod_base = OTHER; note = 2'-O-Methyl-guanosine
  modified_base 83: mod_base = OTHER; note = 2'-O-Methyl-cytidine
  modified_base 84: mod_base = OTHER; note = 2'-O-Methyl-adenosine
  modified_base 85: mod_base = OTHER; note = 2'-O-Methyl-cytidine
  modified_base 86: mod_base = OTHER; note = 2'-O-Methyl-cytidine
  modified_base 87: mod_base = OTHER; note = 2'-O-Methyl-guanosine
  modified_base 89: mod_base = OTHER; note = 2'-O-Methyl-guanosine
  modified_base 92: mod_base = OTHER; note = 2'-O-Methyl-guanosine
  modified_base 93: mod_base = OTHER; note = 2'-O-Methyl-guanosine
  modified_base 94: mod_base = OTHER; note = 2'-O-Methyl-uridine
  modified_base 95: mod_base = OTHER; note = 2'-O-Methyl-guanosine
  modified_base 96: mod_base = OTHER; note = 2'-O-Methyl-cytidine
  modified_base 97: mod_base = OTHER; note = 2'-O-Methyl-uridine phosphorothioate
  modified_base 98: mod_base = OTHER; note = 2'-O-Methyl-uridine phosphorothioate
  modified_base 99: mod_base = OTHER; note = 2'-O-Methyl-uridine phosphorothioate
  modified_base 100: mod_base = OTHER; note = 2'-O-Methyl-uridine

SEQ ID NO: 2491 - RNA, 103 nt, synthetic construct; identical to SEQ ID NO: 1700
  source 1..103: mol_type = other RNA
  modified_base 1: mod_base = OTHER; note = 2'-O-Methyl-cytidine phosphorothioate
  modified_base 2: mod_base = OTHER; note = 2'-O-Methyl-adenosine phosphorothioate
  modified_base 3: mod_base = OTHER; note = 2'-O-Methyl-guanosine phosphorothioate
  modified_base 21: mod_base = OTHER; note = 2'-O-Methyl-guanosine
  modified_base 25: mod_base = OTHER; note = uridine phosphorothioate
  modified_base 28: mod_base = OTHER; note = 2'-O-Methyl-adenosine
  modified_base 29: mod_base = OTHER; note = 2'-O-Methyl-guanosine
  modified_base 30: mod_base = OTHER; note = 2'-O-Methyl-cytidine
  modified_base 31: mod_base = OTHER; note = 2'-O-Methyl-uridine
  modified_base 32: mod_base = OTHER; note = 2'-O-Methyl-adenosine
  modified_base 33: mod_base = OTHER; note = 2'-O-Methyl-guanosine
  modified_base 34: mod_base = OTHER; note = 2'-O-Methyl-adenosine
  modified_base 35: mod_base = OTHER; note = 2'-O-Methyl-adenosine
  modified_base 36: mod_base = OTHER; note = 2'-O-Methyl-adenosine
  modified_base 37: mod_base = OTHER; note = 2'-O-Methyl-uridine
  modified_base 38: mod_base = OTHER; note = 2'-O-Methyl-adenosine
  modified_base 39: mod_base = OTHER; note = 2'-O-Methyl-guanosine
  modified_base 40: mod_base = OTHER; note = 2'-O-Methyl-cytidine
  modified_base 41: mod_base = OTHER; note = 2'-O-Methyl-adenosine
  modified_base 42: mod_base = OTHER; note = 2'-O-Methyl-adenosine
  modified_base 45: mod_base = OTHER; note = uridine phosphorothioate
  modified_base 46: mod_base = OTHER; note = 2'-O-Methyl-adenosine
  modified_base 48: mod_base = OTHER; note = 2'-O-Methyl-adenosine
  modified_base 50: mod_base = OTHER; note = 2'-O-Methyl-uridine
  modified_base 52: mod_base = OTHER; note = 2'-O-Methyl-adenosine
  modified_base 53: mod_base = OTHER; note = 2'-O-Methyl-guanosine
  modified_base 54: mod_base = OTHER; note = 2'-O-Methyl-guanosine
  modified_base 55: mod_base = OTHER; note = 2'-O-Methyl-cytidine
  modified_base 56: mod_base = OTHER; note = 2'-O-Methyl-uridine
  modified_base 57: mod_base = OTHER; note = 2'-O-Methyl-adenosine
  modified_base 60: mod_base = OTHER; note = 2'-O-Methyl-cytidine
  modified_base 61: mod_base = OTHER; note = 2'-O-Methyl-cytidine
  modified_base 64: mod_base = OTHER; note = uridine phosphorothioate
  modified_base 66: mod_base = OTHER; note = 2'-O-Methyl-uridine
  modified_base 67: mod_base = OTHER; note = 2'-O-Methyl-cytidine
  modified_base 70: mod_base = OTHER; note = 2'-O-Methyl-cytidine
  modified_base 71: mod_base = OTHER; note = 2'-O-Methyl-uridine
  modified_base 72: mod_base = OTHER; note = 2'-O-Methyl-uridine
  modified_base 74: mod_base = OTHER; note = 2'-O-Methyl-adenosine
  modified_base 75: mod_base = OTHER; note = 2'-O-Methyl-adenosine
  modified_base 76: mod_base = OTHER; note = 2'-O-Methyl-adenosine
  modified_base 77: mod_base = OTHER; note = 2'-O-Methyl-adenosine
  modified_base 78: mod_base = OTHER; note = 2'-O-Methyl-adenosine
  modified_base 79: mod_base = OTHER; note = 2'-O-Methyl-guanosine
  modified_base 80: mod_base = OTHER; note = 2'-O-Methyl-uridine
  modified_base 82: mod_base = OTHER; note = 2'-O-Methyl-guanosine
  modified_base 83: mod_base = OTHER; note = 2'-O-Methyl-cytidine
  modified_base 84: mod_base = OTHER; note = 2'-O-Methyl-adenosine
  modified_base 85: mod_base = OTHER; note = 2'-O-Methyl-cytidine
  modified_base 86: mod_base = OTHER; note = 2'-O-Methyl-cytidine
  modified_base 87: mod_base = OTHER; note = 2'-O-Methyl-guanosine
  modified_base 89: mod_base = OTHER; note = 2'-O-Methyl-guanosine
  modified_base 92: mod_base = OTHER; note = 2'-O-Methyl-guanosine
  modified_base 93: mod_base = OTHER; note = 2'-O-Methyl-guanosine
  modified_base 94: mod_base = OTHER; note = 2'-O-Methyl-uridine
  modified_base 95: mod_base = OTHER; note = 2'-O-Methyl-guanosine
  modified_base 96: mod_base = OTHER; note = 2'-O-Methyl-cytidine
  modified_base 97: mod_base = OTHER; note = 2'-O-Methyl-uridine phosphorothioate
  modified_base 98: mod_base = OTHER; note = 2'-O-Methyl-uridine phosphorothioate
  modified_base 99: mod_base = OTHER; note = 2'-O-Methyl-uridine phosphorothioate
  modified_base 100: mod_base = OTHER; note = 2'-O-Methyl-uridine

SEQ ID NO: 2492 - RNA, 103 nt, synthetic construct; identical to SEQ ID NO: 1700
  source 1..103: mol_type = other RNA
  modified_base 1: mod_base = OTHER; note = 2'-O-Methyl-cytidine phosphorothioate
  modified_base 2: mod_base = OTHER; note = 2'-O-Methyl-adenosine phosphorothioate
  modified_base 3: mod_base = OTHER; note = 2'-O-Methyl-guanosine phosphorothioate
  modified_base 21: mod_base = OTHER; note = 2'-O-Methyl-guanosine
  modified_base 25: mod_base = OTHER; note = uridine phosphorothioate
  modified_base 28: mod_base = OTHER; note = 2'-O-Methyl-adenosine
  modified_base 29: mod_base = OTHER; note = 2'-O-Methyl-guanosine
  modified_base 30: mod_base = OTHER; note = 2'-O-Methyl-cytidine
  modified_base 31: mod_base = OTHER; note = 2'-O-Methyl-uridine
  modified_base 32: mod_base = OTHER; note = 2'-O-Methyl-adenosine
  modified_base 33: mod_base = OTHER; note = 2'-O-Methyl-guanosine
  modified_base 34: mod_base = OTHER; note = 2'-O-Methyl-adenosine
  modified_base 35: mod_base = OTHER; note = 2'-O-Methyl-adenosine
  modified_base 36: mod_base = OTHER; note = 2'-O-Methyl-adenosine
  modified_base 37: mod_base = OTHER; note = 2'-O-Methyl-uridine
  modified_base 38: mod_base = OTHER; note = 2'-O-Methyl-adenosine
  modified_base 39: mod_base = OTHER; note = 2'-O-Methyl-guanosine
  modified_base 40: mod_base = OTHER; note = 2'-O-Methyl-cytidine
  modified_base 41: mod_base = OTHER; note = 2'-O-Methyl-adenosine
  modified_base 42: mod_base = OTHER; note = 2'-O-Methyl-adenosine
  modified_base 45: mod_base = OTHER; note = uridine phosphorothioate
  modified_base 46: mod_base = OTHER; note = 2'-O-Methyl-adenosine
  modified_base 48: mod_base = OTHER; note = 2'-O-Methyl-adenosine
  modified_base 50: mod_base = OTHER; note = 2'-O-Methyl-uridine
  modified_base 52: mod_base = OTHER; note = 2'-O-Methyl-adenosine
  modified_base 53: mod_base = OTHER; note = 2'-O-Methyl-guanosine
  modified_base 54: mod_base = OTHER; note = 2'-O-Methyl-guanosine
  modified_base 57: mod_base = OTHER; note = 2'-O-Methyl-adenosine
  modified_base 61: mod_base = OTHER; note = 2'-O-Methyl-cytidine
  modified_base 64: mod_base = OTHER; note = uridine phosphorothioate
  modified_base 66: mod_base = OTHER; note = 2'-O-Methyl-uridine
  modified_base 67: mod_base = OTHER; note = 2'-O-Methyl-cytidine
  modified_base 70: mod_base = OTHER; note = 2'-O-Methyl-cytidine
  modified_base 71: mod_base = OTHER; note = 2'-O-Methyl-uridine
  modified_base 72: mod_base = OTHER; note = 2'-O-Methyl-uridine
  modified_base 73: mod_base = OTHER; note = 2'-O-Methyl-guanosine
  modified_base 74: mod_base = OTHER; note = 2'-O-Methyl-adenosine
  modified_base 75: mod_base = OTHER; note = 2'-O-Methyl-adenosine
  modified_base 76: mod_base = OTHER; note = 2'-O-Methyl-adenosine
  modified_base 77: mod_base = OTHER; note = 2'-O-Methyl-adenosine
  modified_base 78: mod_base = OTHER; note = 2'-O-Methyl-adenosine
  modified_base 79: mod_base = OTHER; note = 2'-O-Methyl-guanosine
  modified_base 80: mod_base = OTHER; note = 2'-O-Methyl-uridine
  modified_base 82: mod_base = OTHER; note = 2'-O-Methyl-guanosine
  modified_base 83: mod_base = OTHER; note = 2'-O-Methyl-cytidine
  modified_base 84: mod_base = OTHER; note = 2'-O-Methyl-adenosine
  modified_base 85: mod_base = OTHER; note = 2'-O-Methyl-cytidine
  modified_base 86: mod_base = OTHER; note = 2'-O-Methyl-cytidine
  modified_base 87: mod_base = OTHER; note = 2'-O-Methyl-guanosine
  modified_base 89: mod_base = OTHER; note = 2'-O-Methyl-guanosine
  modified_base 92: mod_base = OTHER; note = 2'-O-Methyl-guanosine
  modified_base 93: mod_base = OTHER; note = 2'-O-Methyl-guanosine
  modified_base 94: mod_base = OTHER; note = 2'-O-Methyl-uridine
  modified_base 95: mod_base = OTHER; note = 2'-O-Methyl-guanosine
  modified_base 96: mod_base = OTHER; note = 2'-O-Methyl-cytidine
  modified_base 97: mod_base = OTHER; note = 2'-O-Methyl-uridine phosphorothioate
  modified_base 98: mod_base = OTHER; note = 2'-O-Methyl-uridine phosphorothioate
  modified_base 99: mod_base = OTHER; note = 2'-O-Methyl-uridine phosphorothioate
  modified_base 100: mod_base = OTHER; note = 2'-O-Methyl-uridine

SEQ ID NO: 2493 - RNA, 103 nt, synthetic construct; identical to SEQ ID NO: 1700
  source 1..103: mol_type = other RNA
  modified_base 1: mod_base = OTHER; note = 2'-O-Methyl-cytidine phosphorothioate
  modified_base 2: mod_base = OTHER; note = 2'-O-Methyl-adenosine phosphorothioate
  modified_base 3: mod_base = OTHER; note = 2'-O-Methyl-guanosine phosphorothioate
  modified_base 21: mod_base = OTHER; note = 2'-O-Methyl-guanosine
  modified_base 25: mod_base = OTHER; note = uridine phosphorothioate
  modified_base 28: mod_base = OTHER; note = 2'-O-Methyl-adenosine
  modified_base 29: mod_base = OTHER; note = 2'-O-Methyl-guanosine
  modified_base 30: mod_base = OTHER; note = 2'-O-Methyl-cytidine
  modified_base 31: mod_base = OTHER; note = 2'-O-Methyl-uridine
  modified_base 32: mod_base = OTHER; note = 2'-O-Methyl-adenosine
  modified_base 33: mod_base = OTHER; note = 2'-O-Methyl-guanosine
  modified_base 34: mod_base = OTHER; note = 2'-O-Methyl-adenosine
  modified_base 35: mod_base = OTHER; note = 2'-O-Methyl-adenosine
  modified_base 36: mod_base = OTHER; note = 2'-O-Methyl-adenosine
  modified_base 37: mod_base = OTHER; note = 2'-O-Methyl-uridine
  modified_base 38: mod_base = OTHER; note = 2'-O-Methyl-adenosine
  modified_base 39: mod_base = OTHER; note = 2'-O-Methyl-guanosine
  modified_base 40: mod_base = OTHER; note = 2'-O-Methyl-cytidine
  modified_base 41: mod_base = OTHER; note = 2'-O-Methyl-adenosine
  modified_base 42: mod_base = OTHER; note = 2'-O-Methyl-adenosine
  modified_base 45: mod_base = OTHER; note = uridine phosphorothioate
  modified_base 46: mod_base = OTHER; note = 2'-O-Methyl-adenosine
  modified_base 48: mod_base = OTHER; note = 2'-O-Methyl-adenosine
  modified_base 50: mod_base = OTHER; note = 2'-O-Methyl-uridine
  modified_base 52: mod_base = OTHER; note = 2'-O-Methyl-adenosine
  modified_base 53: mod_base = OTHER; note = 2'-O-Methyl-guanosine
  modified_base 54: mod_base = OTHER; note = 2'-O-Methyl-guanosine
  modified_base 57: mod_base = OTHER; note = 2'-O-Methyl-adenosine
  modified_base 61: mod_base = OTHER; note = 2'-O-Methyl-cytidine
  modified_base 64: mod_base = OTHER; note = uridine phosphorothioate
  modified_base 66: mod_base = OTHER; note = 2'-O-Methyl-uridine
  modified_base 67: mod_base = OTHER; note = 2'-O-Methyl-cytidine
  modified_base 70: mod_base = OTHER; note = 2'-O-Methyl-cytidine
  modified_base 71: mod_base = OTHER; note = 2'-O-Methyl-uridine
  modified_base 72: mod_base = OTHER; note = 2'-O-Methyl-uridine
  modified_base 73: mod_base = OTHER; note = 2'-O-Methyl-guanosine
  modified_base 74: mod_base = OTHER; note = 2'-O-Methyl-adenosine
  modified_base 75: mod_base = OTHER; note = 2'-O-Methyl-adenosine
  modified_base 76: mod_base = OTHER; note = 2'-O-Methyl-adenosine
  modified_base 77: mod_base = OTHER; note = 2'-O-Methyl-adenosine
  modified_base 78: mod_base = OTHER; note = 2'-O-Methyl-adenosine
  modified_base 79: mod_base = OTHER; note = 2'-O-Methyl-guanosine
  modified_base 80: mod_base = OTHER; note = 2'-O-Methyl-uridine
  modified_base 82: mod_base = OTHER; note = 2'-O-Methyl-guanosine
  modified_base 83: mod_base = OTHER; note = 2'-O-Methyl-cytidine
  modified_base 84: mod_base = OTHER; note = 2'-O-Methyl-adenosine
  modified_base 85: mod_base = OTHER; note = 2'-O-Methyl-cytidine
  modified_base 86: mod_base = OTHER; note = 2'-O-Methyl-cytidine
  modified_base 87: mod_base = OTHER; note = 2'-O-Methyl-guanosine
  modified_base 89: mod_base = OTHER; note = 2'-O-Methyl-guanosine
  modified_base 91: mod_base = OTHER; note = 2'-O-Methyl-cytidine
  modified_base 92: mod_base = OTHER; note = 2'-O-Methyl-guanosine
  modified_base 93: mod_base = OTHER; note = 2'-O-Methyl-guanosine
  modified_base 94: mod_base = OTHER; note = 2'-O-Methyl-uridine
  modified_base 95: mod_base = OTHER; note = 2'-O-Methyl-guanosine
  modified_base 96: mod_base = OTHER; note = 2'-O-Methyl-cytidine
  modified_base 97: mod_base = OTHER; note = 2'-O-Methyl-uridine phosphorothioate
  modified_base 98: mod_base = OTHER; note = 2'-O-Methyl-uridine phosphorothioate
  modified_base 99: mod_base = OTHER; note = 2'-O-Methyl-uridine phosphorothioate
  modified_base 100: mod_base = OTHER; note = 2'-O-Methyl-uridine

SEQ ID NO: 2494 - RNA, 103 nt, synthetic construct; identical to SEQ ID NO: 1700
  source 1..103: mol_type = other RNA
  modified_base 1: mod_base = OTHER; note = 2'-O-Methyl-cytidine phosphorothioate
  modified_base 2: mod_base = OTHER; note = 2'-O-Methyl-adenosine phosphorothioate
  modified_base 3: mod_base = OTHER; note = 2'-O-Methyl-guanosine phosphorothioate
  modified_base 21: mod_base = OTHER; note = 2'-O-Methyl-guanosine
  modified_base 25: mod_base = OTHER; note = uridine phosphorothioate
  modified_base 28: mod_base = OTHER; note = 2'-O-Methyl-adenosine
  modified_base 29: mod_base = OTHER; note = 2'-O-Methyl-guanosine
  modified_base 30: mod_base = OTHER; note = 2'-O-Methyl-cytidine
  modified_base 31: mod_base = OTHER; note = 2'-O-Methyl-uridine
  modified_base 32: mod_base = OTHER; note = 2'-O-Methyl-adenosine
  modified_base 34: mod_base = OTHER; note = 2'-O-Methyl-adenosine
  modified_base 35: mod_base = OTHER; note = 2'-O-Methyl-adenosine
  modified_base 36: mod_base = OTHER; note = 2'-O-Methyl-adenosine
  modified_base 37: mod_base = OTHER; note = 2'-O-Methyl-uridine
  modified_base 38: mod_base = OTHER; note = 2'-O-Methyl-adenosine
  modified_base 39: mod_base = OTHER; note = 2'-O-Methyl-guanosine
  modified_base 40: mod_base = OTHER; note = 2'-O-Methyl-cytidine
  modified_base 41: mod_base = OTHER; note = 2'-O-Methyl-adenosine
  modified_base 42: mod_base = OTHER; note = 2'-O-Methyl-adenosine
  modified_base 45: mod_base = OTHER; note = uridine phosphorothioate
  modified_base 46: mod_base = OTHER; note = 2'-O-Methyl-adenosine
  modified_base 48: mod_base = OTHER; note = 2'-O-Methyl-adenosine
  modified_base 50: mod_base = OTHER; note = 2'-O-Methyl-uridine
  modified_base 52: mod_base = OTHER; note = 2'-O-Methyl-adenosine
  modified_base 53: mod_base = OTHER; note = 2'-O-Methyl-guanosine
  modified_base 54: mod_base = OTHER; note = 2'-O-Methyl-guanosine
  modified_base 57: mod_base = OTHER; note = 2'-O-Methyl-adenosine
  modified_base 61: mod_base = OTHER; note = 2'-O-Methyl-cytidine
  modified_base 64: mod_base = OTHER; note = uridine phosphorothioate
  modified_base 66: mod_base = OTHER; note = 2'-O-Methyl-uridine
  modified_base 67: mod_base = OTHER; note = 2'-O-Methyl-cytidine
  modified_base 70: mod_base = OTHER; note = 2'-O-Methyl-cytidine
  modified_base 71: mod_base = OTHER; note = 2'-O-Methyl-uridine
  modified_base 72: mod_base = OTHER; note = 2'-O-Methyl-uridine
  modified_base 73: mod_base = OTHER; note = 2'-O-Methyl-guanosine
  modified_base 74: mod_base = OTHER; note = 2'-O-Methyl-adenosine
  modified_base 75: mod_base = OTHER; note = 2'-O-Methyl-adenosine
  modified_base 76: mod_base = OTHER; note = 2'-O-Methyl-adenosine
  modified_base 77: mod_base = OTHER; note = 2'-O-Methyl-adenosine
  modified_base 78: mod_base = OTHER; note = 2'-O-Methyl-adenosine
  modified_base 79: mod_base = OTHER; note = 2'-O-Methyl-guanosine
  modified_base 80: mod_base = OTHER; note = 2'-O-Methyl-uridine
  modified_base 82: mod_base = OTHER; note = 2'-O-Methyl-guanosine
  modified_base 83: mod_base = OTHER; note = 2'-O-Methyl-cytidine
  modified_base 84: mod_base = OTHER; note = 2'-O-Methyl-adenosine
  modified_base 85: mod_base = OTHER; note = 2'-O-Methyl-cytidine
  modified_base 86: mod_base = OTHER; note = 2'-O-Methyl-cytidine
  modified_base 87: mod_base = OTHER; note = 2'-O-Methyl-guanosine
  modified_base 89: mod_base = OTHER; note = 2'-O-Methyl-guanosine
  modified_base 92: mod_base = OTHER; note = 2'-O-Methyl-guanosine
  modified_base 93: mod_base = OTHER; note = 2'-O-Methyl-guanosine
  modified_base 94: mod_base = OTHER; note = 2'-O-Methyl-uridine
  modified_base 95: mod_base = OTHER; note = 2'-O-Methyl-guanosine
  modified_base 96: mod_base = OTHER; note = 2'-O-Methyl-cytidine
  modified_base 97: mod_base = OTHER; note = 2'-O-Methyl-uridine phosphorothioate
  modified_base 98: mod_base = OTHER; note = 2'-O-Methyl-uridine phosphorothioate
  modified_base 99: mod_base = OTHER; note = 2'-O-Methyl-uridine phosphorothioate
  modified_base 100: mod_base = OTHER; note = 2'-O-Methyl-uridine

SEQ ID NO: 2495 - RNA, 103 nt, synthetic construct; identical to SEQ ID NO: 1700
  source 1..103: mol_type = other RNA
  modified_base 1: mod_base = OTHER; note = 2'-O-Methyl-cytidine phosphorothioate
  modified_base 2: mod_base = OTHER; note = 2'-O-Methyl-adenosine phosphorothioate
  modified_base 3: mod_base = OTHER; note = 2'-O-Methyl-guanosine phosphorothioate
  modified_base 21: mod_base = OTHER; note = 2'-O-Methyl-guanosine
  modified_base 25: mod_base = OTHER; note = uridine phosphorothioate
  modified_base 28: mod_base = OTHER; note = 2'-O-Methyl-adenosine
  modified_base 29: mod_base = OTHER; note = 2'-O-Methyl-guanosine
  modified_base 30: mod_base = OTHER; note = 2'-O-Methyl-cytidine
  modified_base 31: mod_base = OTHER; note = 2'-O-Methyl-uridine
  modified_base 32: mod_base = OTHER; note = 2'-O-Methyl-adenosine
  modified_base 34: mod_base = OTHER; note = 2'-O-Methyl-adenosine
  modified_base 35: mod_base = OTHER; note = 2'-O-Methyl-adenosine
  modified_base 36: mod_base = OTHER; note = 2'-O-Methyl-adenosine
  modified_base 37: mod_base = OTHER; note = 2'-O-Methyl-uridine
  modified_base 38: mod_base = OTHER; note = 2'-O-Methyl-adenosine
  modified_base 39: mod_base = OTHER; note = 2'-O-Methyl-guanosine
  modified_base 40: mod_base = OTHER; note = 2'-O-Methyl-cytidine
  modified_base 41: mod_base = OTHER; note = 2'-O-Methyl-adenosine
  modified_base 42: mod_base = OTHER; note = 2'-O-Methyl-adenosine
  modified_base 45: mod_base = OTHER; note = uridine phosphorothioate
  modified_base 46: mod_base = OTHER; note = 2'-O-Methyl-adenosine
  modified_base 48: mod_base = OTHER; note = 2'-O-Methyl-adenosine
  modified_base 50: mod_base = OTHER; note = 2'-O-Methyl-uridine
  modified_base 52: mod_base = OTHER; note = 2'-O-Methyl-adenosine
  modified_base 53: mod_base = OTHER; note = 2'-O-Methyl-guanosine
  modified_base 54: mod_base = OTHER; note = 2'-O-Methyl-guanosine
  modified_base 57: mod_base = OTHER; note = 2'-O-Methyl-adenosine
  modified_base 61: mod_base = OTHER; note = 2'-O-Methyl-cytidine
  modified_base 64: mod_base = OTHER; note = uridine phosphorothioate
  modified_base 66: mod_base = OTHER; note = 2'-O-Methyl-uridine
  modified_base 67: mod_base = OTHER; note = 2'-O-Methyl-cytidine
  modified_base 70: mod_base = OTHER; note = 2'-O-Methyl-cytidine
  modified_base 71: mod_base = OTHER; note = 2'-O-Methyl-uridine
  modified_base 72: mod_base = OTHER; note = 2'-O-Methyl-uridine
  modified_base 73: mod_base = OTHER; note = 2'-O-Methyl-guanosine
  modified_base 74: mod_base = OTHER; note = 2'-O-Methyl-adenosine
  modified_base 75: mod_base = OTHER; note = 2'-O-Methyl-adenosine
  modified_base 76: mod_base = OTHER; note = 2'-O-Methyl-adenosine
  modified_base 77: mod_base = OTHER; note = 2'-O-Methyl-adenosine
  modified_base 78: mod_base = OTHER; note = 2'-O-Methyl-adenosine
  modified_base 79: mod_base = OTHER; note = 2'-O-Methyl-guanosine
  modified_base 80: mod_base = OTHER; note = 2'-O-Methyl-uridine
  modified_base 82: mod_base = OTHER; note = 2'-O-Methyl-guanosine
  modified_base 83: mod_base = OTHER; note = 2'-O-Methyl-cytidine
  modified_base 84: mod_base = OTHER; note = 2'-O-Methyl-adenosine
  modified_base 85: mod_base = OTHER; note = 2'-O-Methyl-cytidine
  modified_base 86: mod_base = OTHER; note = 2'-O-Methyl-cytidine
  modified_base 87: mod_base = OTHER; note = 2'-O-Methyl-guanosine
  modified_base 89: mod_base = OTHER; note = 2'-O-Methyl-guanosine
  modified_base 91: mod_base = OTHER; note = 2'-O-Methyl-cytidine
  modified_base 92: mod_base = OTHER; note = 2'-O-Methyl-guanosine
  modified_base 93: mod_base = OTHER; note = 2'-O-Methyl-guanosine
  modified_base 94: mod_base = OTHER; note = 2'-O-Methyl-uridine
  modified_base 95: mod_base = OTHER; note = 2'-O-Methyl-guanosine
  modified_base 96: mod_base = OTHER; note = 2'-O-Methyl-cytidine
  modified_base 97: mod_base = OTHER; note = 2'-O-Methyl-uridine phosphorothioate
  modified_base 98: mod_base = OTHER; note = 2'-O-Methyl-uridine phosphorothioate
  modified_base 99: mod_base = OTHER; note = 2'-O-Methyl-uridine phosphorothioate
  modified_base 100: mod_base = OTHER; note = 2'-O-Methyl-uridine

SEQ ID NO: 2496 - RNA, 103 nt, synthetic construct; identical to SEQ ID NO: 1700
  source 1..103: mol_type = other RNA
  modified_base 1: mod_base = OTHER; note = 2'-O-Methyl-cytidine phosphorothioate
  modified_base 2: mod_base = OTHER; note = 2'-O-Methyl-adenosine phosphorothioate
  modified_base 3: mod_base = OTHER; note = 2'-O-Methyl-guanosine phosphorothioate
  modified_base 21: mod_base = OTHER; note = 2'-O-Methyl-guanosine
  modified_base 25: mod_base = OTHER; note = uridine phosphorothioate
  modified_base 28: mod_base = OTHER; note = 2'-O-Methyl-adenosine
  modified_base 29: mod_base = OTHER; note = 2'-O-Methyl-guanosine
  modified_base 30: mod_base = OTHER; note = 2'-O-Methyl-cytidine
  modified_base 31: mod_base = OTHER; note = 2'-O-Methyl-uridine
  modified_base 32: mod_base = OTHER; note = 2'-O-Methyl-adenosine
  modified_base 34: mod_base = OTHER; note = 2'-O-Methyl-adenosine
  modified_base 35: mod_base = OTHER; note = 2'-O-Methyl-adenosine
  modified_base 36: mod_base = OTHER; note = 2'-O-Methyl-adenosine
  modified_base 37: mod_base = OTHER; note = 2'-O-Methyl-uridine
  modified_base 38: mod_base = OTHER; note = 2'-O-Methyl-adenosine
  modified_base 39: mod_base = OTHER; note = 2'-O-Methyl-guanosine
  modified_base 40: mod_base = OTHER; note = 2'-O-Methyl-cytidine
  modified_base 41: mod_base = OTHER; note = 2'-O-Methyl-adenosine
  modified_base 42: mod_base = OTHER; note = 2'-O-Methyl-adenosine
  modified_base 45: mod_base = OTHER; note = uridine phosphorothioate
  modified_base 46: mod_base = OTHER; note = 2'-O-Methyl-adenosine
  modified_base 48: mod_base = OTHER; note = 2'-O-Methyl-adenosine
  modified_base 50: mod_base = OTHER; note = 2'-O-Methyl-uridine
  modified_base 52: mod_base = OTHER; note = 2'-O-Methyl-adenosine
  modified_base 53: mod_base = OTHER; note = 2'-O-Methyl-guanosine
  modified_base 54: mod_base = OTHER; note = 2'-O-Methyl-guanosine
  modified_base 55: mod_base = OTHER; note = 2'-O-Methyl-cytidine
  modified_base 56: mod_base = OTHER; note = 2'-O-Methyl-uridine
  modified_base 57: mod_base = OTHER; note = 2'-O-Methyl-adenosine
  modified_base 60: mod_base = OTHER; note = 2'-O-Methyl-cytidine
  modified_base 61: mod_base = OTHER; note = 2'-O-Methyl-cytidine
  modified_base 64: mod_base = OTHER; note = uridine phosphorothioate
  modified_base 66: mod_base = OTHER; note = 2'-O-Methyl-uridine
  modified_base 67: mod_base = OTHER; note = 2'-O-Methyl-cytidine
  modified_base 70: mod_base = OTHER; note = 2'-O-Methyl-cytidine
  modified_base 71: mod_base = OTHER; note = 2'-O-Methyl-uridine
  modified_base 72: mod_base = OTHER; note = 2'-O-Methyl-uridine
  modified_base 74: mod_base = OTHER; note = 2'-O-Methyl-adenosine
  modified_base 75: mod_base = OTHER; note = 2'-O-Methyl-adenosine
  modified_base 76: mod_base = OTHER; note = 2'-O-Methyl-adenosine
  modified_base 77: mod_base = OTHER; note = 2'-O-Methyl-adenosine
  modified_base 78: mod_base = OTHER; note = 2'-O-Methyl-adenosine
  modified_base 79: mod_base = OTHER; note = 2'-O-Methyl-guanosine
  modified_base 80: mod_base = OTHER; note = 2'-O-Methyl-uridine
  modified_base 82: mod_base = OTHER; note = 2'-O-Methyl-guanosine
  modified_base 83: mod_base = OTHER; note = 2'-O-Methyl-cytidine
  modified_base 84: mod_base = OTHER; note = 2'-O-Methyl-adenosine
  modified_base 85: mod_base = OTHER; note = 2'-O-Methyl-cytidine
  modified_base 86: mod_base = OTHER; note = 2'-O-Methyl-cytidine
  modified_base 87: mod_base = OTHER; note = 2'-O-Methyl-guanosine
  modified_base 89: mod_base = OTHER; note = 2'-O-Methyl-guanosine
  modified_base 92: mod_base = OTHER; note = 2'-O-Methyl-guanosine
  modified_base 93: mod_base = OTHER; note = 2'-O-Methyl-guanosine
  modified_base 94: mod_base = OTHER; note = 2'-O-Methyl-uridine
  modified_base 95: mod_base = OTHER; note = 2'-O-Methyl-guanosine
  modified_base 96: mod_base = OTHER; note = 2'-O-Methyl-cytidine
  modified_base 97: mod_base = OTHER; note = 2'-O-Methyl-uridine phosphorothioate
  modified_base 98: mod_base = OTHER; note = 2'-O-Methyl-uridine phosphorothioate
  modified_base 99: mod_base = OTHER; note = 2'-O-Methyl-uridine phosphorothioate
  modified_base 100: mod_base = OTHER; note = 2'-O-Methyl-uridine

SEQ ID NO: 2497 - RNA, 103 nt, synthetic construct; identical to SEQ ID NO: 1700
  source 1..103: mol_type = other RNA
  modified_base 1: mod_base = OTHER; note = 2'-O-Methyl-cytidine phosphorothioate
  modified_base 2: mod_base = OTHER; note = 2'-O-Methyl-adenosine phosphorothioate
  modified_base 3: mod_base = OTHER; note = 2'-O-Methyl-guanosine
  modified_base 21: mod_base = OTHER; note = 2'-O-Methyl-guanosine
  modified_base 28: mod_base = OTHER; note = 2'-O-Methyl-adenosine
  modified_base 29: mod_base = OTHER; note = 2'-O-Methyl-guanosine
  modified_base 30: mod_base = OTHER; note = 2'-O-Methyl-cytidine
  modified_base 31: mod_base = OTHER; note = 2'-O-Methyl-uridine
  modified_base 32: mod_base = OTHER; note = 2'-O-Methyl-adenosine
  modified_base 33: mod_base = OTHER; note = 2'-O-Methyl-guanosine
  modified_base 34: mod_base = OTHER; note = 2'-O-Methyl-adenosine
  modified_base 35: mod_base = OTHER; note = 2'-O-Methyl-adenosine
  modified_base 36: mod_base = OTHER; note = 2'-O-Methyl-adenosine
  modified_base 37: mod_base = OTHER; note = 2'-O-Methyl-uridine
  modified_base 38: mod_base = OTHER; note = 2'-O-Methyl-adenosine
  modified_base 39: mod_base = OTHER; note = 2'-O-Methyl-guanosine
  modified_base 40: mod_base = OTHER; note = 2'-O-Methyl-cytidine
  modified_base 41: mod_base = OTHER; note = 2'-O-Methyl-adenosine
  modified_base 42: mod_base = OTHER; note = 2'-O-Methyl-adenosine
  modified_base 46: mod_base = OTHER; note = 2'-O-Methyl-adenosine
  modified_base 48: mod_base = OTHER; note = 2'-O-Methyl-adenosine
  modified_base 50: mod_base = OTHER; note = 2'-O-Methyl-uridine
  modified_base 52: mod_base = OTHER; note = 2'-O-Methyl-adenosine
  modified_base 53: mod_base = OTHER; note = 2'-O-Methyl-guanosine
  modified_base 54: mod_base = OTHER; note = 2'-O-Methyl-guanosine
  modified_base 55: mod_base = OTHER; note = 2'-O-Methyl-cytidine
  modified_base 56: mod_base = OTHER; note = 2'-O-Methyl-uridine
  modified_base 57: mod_base = OTHER; note = 2'-O-Methyl-adenosine
  modified_base 60: mod_base = OTHER; note = 2'-O-Methyl-cytidine
  modified_base 61: mod_base = OTHER; note = 2'-O-Methyl-cytidine
  modified_base 66: mod_base = OTHER; note = 2'-O-Methyl-uridine
  modified_base 67: mod_base = OTHER; note = 2'-O-Methyl-cytidine
  modified_base 70: mod_base = OTHER; note = 2'-O-Methyl-cytidine
  modified_base 71: mod_base = OTHER; note = 2'-O-Methyl-uridine
  modified_base 72: mod_base = OTHER; note = 2'-O-Methyl-uridine
  modified_base 73: mod_base = OTHER; note = 2'-O-Methyl-guanosine
  modified_base 74: mod_base = OTHER; note = 2'-O-Methyl-adenosine
  modified_base 75: mod_base = OTHER; note = 2'-O-Methyl-adenosine
  modified_base 76: mod_base = OTHER; note = 2'-O-Methyl-adenosine
  modified_base 77: mod_base = OTHER; note = 2'-O-Methyl-adenosine
  modified_base 78: mod_base = OTHER; note = 2'-O-Methyl-adenosine
  modified_base 79: mod_base = OTHER; note = 2'-O-Methyl-guanosine
  modified_base 80: mod_base = OTHER; note = 2'-O-Methyl-uridine
  modified_base 81: mod_base = OTHER; note = 2'-O-Methyl-guanosine
  modified_base 83: mod_base = OTHER; note = 2'-O-Methyl-cytidine
  modified_base 84: mod_base = OTHER; note = 2'-O-Methyl-adenosine
  modified_base 85: mod_base = OTHER; note = 2'-O-Methyl-cytidine
  modified_base 86: mod_base = OTHER; note = 2'-O-Methyl-cytidine
  modified_base 87: mod_base = OTHER; note = 2'-O-Methyl-guanosine
  modified_base 88: mod_base = OTHER; note = 2'-O-Methyl-adenosine
  modified_base 89: mod_base = OTHER; note = 2'-O-Methyl-guanosine
  modified_base 90: mod_base = OTHER; note = 2'-O-Methyl-uridine
  modified_base 91: mod_base = OTHER; note = 2'-O-Methyl-cytidine
  modified_base 92: mod_base = OTHER; note = 2'-O-Methyl-guanosine
  modified_base 93: mod_base = OTHER; note = 2'-O-Methyl-guanosine
  modified_base 94: mod_base = OTHER; note = 2'-O-Methyl-uridine
  modified_base 95: mod_base = OTHER; note = 2'-O-Methyl-guanosine
  modified_base 96: mod_base = OTHER; note = 2'-O-Methyl-cytidine
  modified_base 97: mod_base = OTHER; note = 2'-O-Methyl-uridine phosphorothioate
  modified_base 98: mod_base = OTHER; note = 2'-O-Methyl-uridine phosphorothioate
  modified_base 99: mod_base = OTHER; note = 2'-O-Methyl-uridine phosphorothioate
  modified_base 100: mod_base = OTHER; note = 2'-O-Methyl-uridine

SEQ ID NO: 2498 - RNA, 103 nt, synthetic construct; identical to SEQ ID NO: 1643
  source 1..103: mol_type = other RNA
  modified_base 1: mod_base = OTHER; note = 2'-O-Methyl-cytidine phosphorothioate
  modified_base 2: mod_base = OTHER; note = 2'-O-Methyl-cytidine phosphorothioate
  modified_base 3: mod_base = OTHER; note = 2'-O-Methyl-cytidine
  modified_base 21: mod_base = OTHER; note = 2'-O-Methyl-guanosine
  modified_base 28: mod_base = OTHER; note = 2'-O-Methyl-adenosine
  modified_base 29: mod_base = OTHER; note = 2'-O-Methyl-guanosine
  modified_base 30: mod_base = OTHER; note = 2'-O-Methyl-cytidine
  modified_base 31: mod_base = OTHER; note = 2'-O-Methyl-uridine
  modified_base 32: mod_base = OTHER; note = 2'-O-Methyl-adenosine
  modified_base 33: mod_base = OTHER; note = 2'-O-Methyl-guanosine
  modified_base 34: mod_base = OTHER; note = 2'-O-Methyl-adenosine
  modified_base 35: mod_base = OTHER; note = 2'-O-Methyl-adenosine
  modified_base 36: mod_base = OTHER; note = 2'-O-Methyl-adenosine
  modified_base 37: mod_base = OTHER; note = 2'-O-Methyl-uridine
  modified_base 38: mod_base = OTHER; note = 2'-O-Methyl-adenosine
  modified_base 39: mod_base = OTHER; note = 2'-O-Methyl-guanosine
  modified_base 40: mod_base = OTHER; note = 2'-O-Methyl-cytidine
  modified_base 41: mod_base = OTHER; note = 2'-O-Methyl-adenosine
  modified_base 42: mod_base = OTHER; note = 2'-O-Methyl-adenosine
  modified_base 46: mod_base = OTHER; note = 2'-O-Methyl-adenosine
  modified_base 48: mod_base = OTHER; note = 2'-O-Methyl-adenosine
  modified_base 50: mod_base = OTHER; note = 2'-O-Methyl-uridine
  modified_base 52: mod_base = OTHER; note = 2'-O-Methyl-adenosine
  modified_base 53: mod_base = OTHER; note = 2'-O-Methyl-guanosine
  modified_base 54: mod_base = OTHER; note = 2'-O-Methyl-guanosine
  modified_base 55: mod_base = OTHER; note = 2'-O-Methyl-cytidine
  modified_base 56: mod_base = OTHER; note = 2'-O-Methyl-uridine
  modified_base 57: mod_base = OTHER; note = 2'-O-Methyl-adenosine
  modified_base 60: mod_base = OTHER; note = 2'-O-Methyl-cytidine
  modified_base 61: mod_base = OTHER; note = 2'-O-Methyl-cytidine
  modified_base 66: mod_base = OTHER; note = 2'-O-Methyl-uridine
  modified_base 67: mod_base = OTHER; note = 2'-O-Methyl-cytidine
  modified_base 70: mod_base = OTHER; note = 2'-O-Methyl-cytidine
  modified_base 71: mod_base = OTHER; note = 2'-O-Methyl-uridine
  modified_base 72: mod_base = OTHER; note = 2'-O-Methyl-uridine
  modified_base 73: mod_base = OTHER; note = 2'-O-Methyl-guanosine
  modified_base 74: mod_base = OTHER; note = 2'-O-Methyl-adenosine
  modified_base 75: mod_base = OTHER; note = 2'-O-Methyl-adenosine
  modified_base 76: mod_base = OTHER; note = 2'-O-Methyl-adenosine
  modified_base 77: mod_base = OTHER; note = 2'-O-Methyl-adenosine
  modified_base 78: mod_base = OTHER; note = 2'-O-Methyl-adenosine
  modified_base 79: mod_base = OTHER; note = 2'-O-Methyl-guanosine
  modified_base 80: mod_base = OTHER; note = 2'-O-Methyl-uridine
  modified_base 81: mod_base = OTHER; note = 2'-O-Methyl-guanosine
  modified_base 83: mod_base = OTHER; note = 2'-O-Methyl-cytidine
  modified_base 84: mod_base = OTHER; note = 2'-O-Methyl-adenosine
  modified_base 85: mod_base = OTHER; note = 2'-O-Methyl-cytidine
  modified_base 86: mod_base = OTHER; note = 2'-O-Methyl-cytidine
  modified_base 87: mod_base = OTHER; note = 2'-O-Methyl-guanosine
  modified_base 88: mod_base = OTHER; note = 2'-O-Methyl-adenosine
  modified_base 89: mod_base = OTHER; note = 2'-O-Methyl-guanosine
  modified_base 90: mod_base = OTHER; note = 2'-O-Methyl-uridine
  modified_base 91: mod_base = OTHER; note = 2'-O-Methyl-cytidine
  modified_base 92: mod_base = OTHER; note = 2'-O-Methyl-guanosine
  modified_base 93: mod_base = OTHER; note = 2'-O-Methyl-guanosine
  modified_base 94: mod_base = OTHER; note = 2'-O-Methyl-uridine
  modified_base 95: mod_base = OTHER; note = 2'-O-Methyl-guanosine
  modified_base 96: mod_base = OTHER; note = 2'-O-Methyl-cytidine
  modified_base 97: mod_base = OTHER; note = 2'-O-Methyl-uridine phosphorothioate
  modified_base 98: mod_base = OTHER; note = 2'-O-Methyl-uridine phosphorothioate
  modified_base 99: mod_base = OTHER; note = 2'-O-Methyl-uridine phosphorothioate
  modified_base 100: mod_base = OTHER; note = 2'-O-Methyl-uridine

SEQ ID NO: 2499 - RNA, 103 nt, synthetic construct; identical to SEQ ID NO: 1643
  source 1..103: mol_type = other RNA
  modified_base 1: mod_base = OTHER; note = 2'-O-Methyl-cytidine phosphorothioate
  modified_base 2: mod_base = OTHER; note = 2'-O-Methyl-cytidine phosphorothioate
  modified_base 3: mod_base = OTHER; note = 2'-O-Methyl-cytidine
  modified_base 21: mod_base = OTHER; note = 2'-O-Methyl-guanosine
  modified_base 28: mod_base = OTHER; note = 2'-O-Methyl-adenosine
  modified_base 29: mod_base = OTHER; note = 2'-O-Methyl-guanosine
  modified_base 30: mod_base = OTHER; note = 2'-O-Methyl-cytidine
  modified_base 31: mod_base = OTHER; note = 2'-O-Methyl-uridine
  modified_base 32: mod_base = OTHER; note = 2'-O-Methyl-adenosine
  modified_base 34: mod_base = OTHER; note = 2'-O-Methyl-adenosine
  modified_base 35: mod_base = OTHER; note = 2'-O-Methyl-adenosine
  modified_base 36: mod_base = OTHER; note = 2'-O-Methyl-adenosine
  modified_base 37: mod_base = OTHER; note = 2'-O-Methyl-uridine
  modified_base 38: mod_base = OTHER; note = 2'-O-Methyl-adenosine
  modified_base 39: mod_base = OTHER; note = 2'-O-Methyl-guanosine
  modified_base 40: mod_base = OTHER; note = 2'-O-Methyl-cytidine
  modified_base 41: mod_base = OTHER; note = 2'-O-Methyl-adenosine
  modified_base 42: mod_base = OTHER; note = 2'-O-Methyl-adenosine
  modified_base 46: mod_base = OTHER; note = 2'-O-Methyl-adenosine
  modified_base 48: mod_base = OTHER; note = 2'-O-Methyl-adenosine
  modified_base 50: mod_base = OTHER; note = 2'-O-Methyl-uridine
  modified_base 52: mod_base = OTHER; note = 2'-O-Methyl-adenosine
  modified_base 53: mod_base = OTHER; note = 2'-O-Methyl-guanosine
  modified_base 54: mod_base = OTHER; note = 2'-O-Methyl-guanosine
  modified_base 55: mod_base = OTHER; note = 2'-O-Methyl-cytidine
  modified_base 56: mod_base = OTHER; note = 2'-O-Methyl-uridine
  modified_base 57: mod_base = OTHER; note = 2'-O-Methyl-adenosine
  modified_base 60: mod_base = OTHER; note = 2'-O-Methyl-cytidine
  modified_base 61: mod_base = OTHER; note = 2'-O-Methyl-cytidine
  modified_base 66: mod_base = OTHER; note = 2'-O-Methyl-uridine
  modified_base 67: mod_base = OTHER; note = 2'-O-Methyl-cytidine
  modified_base 70: mod_base = OTHER; note = 2'-O-Methyl-cytidine
  modified_base 71: mod_base = OTHER; note = 2'-O-Methyl-uridine
  modified_base 72: mod_base = OTHER; note = 2'-O-Methyl-uridine
  modified_base 74: mod_base = OTHER; note = 2'-O-Methyl-adenosine
  modified_base 75: mod_base = OTHER; note = 2'-O-Methyl-adenosine
  modified_base 76: mod_base = OTHER; note = 2'-O-Methyl-adenosine
  modified_base 77: mod_base = OTHER; note = 2'-O-Methyl-adenosine
  modified_base 78: mod_base = OTHER; note = 2'-O-Methyl-adenosine
  modified_base 79: mod_base = OTHER; note = 2'-O-Methyl-guanosine
  modified_base 80: mod_base = OTHER; note = 2'-O-Methyl-uridine
  modified_base 81: mod_base = OTHER; note = 2'-O-Methyl-guanosine
  modified_base 83: mod_base = OTHER; note = 2'-O-Methyl-cytidine
  modified_base 84: mod_base = OTHER; note = 2'-O-Methyl-adenosine
  modified_base 85: mod_base = OTHER; note = 2'-O-Methyl-cytidine
  modified_base 86: mod_base = OTHER; note = 2'-O-Methyl-cytidine
  modified_base 87: mod_base = OTHER; note = 2'-O-Methyl-guanosine
  modified_base 88: mod_base = OTHER; note = 2'-O-Methyl-adenosine
  modified_base 89: mod_base = OTHER; note = 2'-O-Methyl-guanosine
  modified_base 90: mod_base = OTHER; note = 2'-O-Methyl-uridine
  modified_base 91: mod_base = OTHER; note = 2'-O-Methyl-cytidine
  modified_base 92: mod_base = OTHER; note = 2'-O-Methyl-guanosine
  modified_base 93: mod_base = OTHER; note = 2'-O-Methyl-guanosine
  modified_base 94: mod_base = OTHER; note = 2'-O-Methyl-uridine
  modified_base 95: mod_base = OTHER; note = 2'-O-Methyl-guanosine
  modified_base 96: mod_base = OTHER; note = 2'-O-Methyl-cytidine
  modified_base 97: mod_base = OTHER; note = 2'-O-Methyl-uridine phosphorothioate
  modified_base 98: mod_base = OTHER; note = 2'-O-Methyl-uridine phosphorothioate
  modified_base 99: mod_base = OTHER; note = 2'-O-Methyl-uridine phosphorothioate
  modified_base 100: mod_base = OTHER; note = 2'-O-Methyl-uridine

SEQ ID NO: 2500 - RNA, 103 nt, synthetic construct; identical to SEQ ID NO: 1699
  source 1..103: mol_type = other RNA
  modified_base 1: mod_base = OTHER; note = 2'-O-Methyl-guanosine phosphorothioate
  modified_base 2: mod_base = OTHER; note = 2'-O-Methyl-adenosine phosphorothioate
  modified_base 3: mod_base = OTHER; note = 2'-O-Methyl-guanosine
  modified_base 21: mod_base = OTHER; note = 2'-O-Methyl-guanosine
  modified_base 28: mod_base = OTHER; note = 2'-O-Methyl-adenosine
  modified_base 29: mod_base = OTHER; note = 2'-O-Methyl-guanosine
  modified_base 30: mod_base = OTHER; note = 2'-O-Methyl-cytidine
  modified_base 31: mod_base = OTHER; note = 2'-O-Methyl-uridine
  modified_base 32: mod_base = OTHER; note = 2'-O-Methyl-adenosine
  modified_base 33: mod_base = OTHER; note = 2'-O-Methyl-guanosine
  modified_base 34: mod_base = OTHER; note = 2'-O-Methyl-adenosine
  modified_base 35: mod_base = OTHER; note = 2'-O-Methyl-adenosine
  modified_base 36: mod_base = OTHER; note = 2'-O-Methyl-adenosine
  modified_base 37: mod_base = OTHER; note = 2'-O-Methyl-uridine
  modified_base 38: mod_base = OTHER; note = 2'-O-Methyl-adenosine
  modified_base 39: mod_base = OTHER; note = 2'-O-Methyl-guanosine
  modified_base 40: mod_base = OTHER; note = 2'-O-Methyl-cytidine
  modified_base 41: mod_base = OTHER; note = 2'-O-Methyl-adenosine
  modified_base 42: mod_base = OTHER; note = 2'-O-Methyl-adenosine
  modified_base 46: mod_base = OTHER; note = 2'-O-Methyl-adenosine
  modified_base 48: mod_base = OTHER; note = 2'-O-Methyl-adenosine
  modified_base 50: mod_base = OTHER; note = 2'-O-Methyl-uridine
  modified_base 52: mod_base = OTHER; note = 2'-O-Methyl-adenosine
  modified_base 53: mod_base = OTHER; note = 2'-O-Methyl-guanosine
  modified_base 54: mod_base = OTHER; note = 2'-O-Methyl-guanosine
  modified_base 55: mod_base = OTHER; note = 2'-O-Methyl-cytidine
  modified_base 56: mod_base = OTHER; note = 2'-O-Methyl-uridine
  modified_base 57: mod_base = OTHER; note = 2'-O-Methyl-adenosine
  modified_base 60: mod_base = OTHER; note = 2'-O-Methyl-cytidine
  modified_base 61: mod_base = OTHER; note = 2'-O-Methyl-cytidine
  modified_base 66: mod_base = OTHER; note = 2'-O-Methyl-uridine
  modified_base 67: mod_base = OTHER; note = 2'-O-Methyl-cytidine
  modified_base 70: mod_base = OTHER; note = 2'-O-Methyl-cytidine
  modified_base 71: mod_base = OTHER; note = 2'-O-Methyl-uridine
  modified_base 72: mod_base = OTHER; note = 2'-O-Methyl-uridine
  modified_base 73: mod_base = OTHER; note = 2'-O-Methyl-guanosine
  modified_base 74: mod_base = OTHER; note = 2'-O-Methyl-adenosine
  modified_base 75: mod_base = OTHER; note = 2'-O-Methyl-adenosine
  modified_base 76: mod_base = OTHER; note = 2'-O-Methyl-adenosine
  modified_base 77: mod_base = OTHER; note = 2'-O-Methyl-adenosine
  modified_base 78: mod_base = OTHER; note = 2'-O-Methyl-adenosine
  modified_base 79: mod_base = OTHER; note = 2'-O-Methyl-guanosine
  modified_base 80: mod_base = OTHER; note = 2'-O-Methyl-uridine
  modified_base 81: mod_base = OTHER; note = 2'-O-Methyl-guanosine
  modified_base 83: mod_base = OTHER; note = 2'-O-Methyl-cytidine
  modified_base 84: mod_base = OTHER; note = 2'-O-Methyl-adenosine
  modified_base 85: mod_base = OTHER; note = 2'-O-Methyl-cytidine
  modified_base 86: mod_base = OTHER; note = 2'-O-Methyl-cytidine
  modified_base 87: mod_base = OTHER; note = 2'-O-Methyl-guanosine
  modified_base 88: mod_base = OTHER; note = 2'-O-Methyl-adenosine
  modified_base 89: mod_base = OTHER; note = 2'-O-Methyl-guanosine
  modified_base 90: mod_base = OTHER; note = 2'-O-Methyl-uridine
  modified_base 91: mod_base = OTHER; note = 2'-O-Methyl-cytidine
  modified_base 92: mod_base = OTHER; note = 2'-O-Methyl-guanosine
  modified_base 93: mod_base = OTHER; note = 2'-O-Methyl-guanosine
  modified_base 94: mod_base = OTHER; note = 2'-O-Methyl-uridine
  modified_base 95: mod_base = OTHER; note = 2'-O-Methyl-guanosine
  modified_base 96: mod_base = OTHER; note = 2'-O-Methyl-cytidine
  modified_base 97: mod_base = OTHER; note = 2'-O-Methyl-uridine phosphorothioate
  modified_base 98: mod_base = OTHER; note = 2'-O-Methyl-uridine phosphorothioate
  modified_base 99: mod_base = OTHER; note = 2'-O-Methyl-uridine phosphorothioate
  modified_base 100: mod_base = OTHER; note = 2'-O-Methyl-uridine

SEQ ID NO: 2501 - RNA, 103 nt, synthetic construct; identical to SEQ ID NO: 1699
  source 1..103: mol_type = other RNA
  modified_base 1: mod_base = OTHER; note = 2'-O-Methyl-guanosine phosphorothioate
  modified_base 2: mod_base = OTHER; note = 2'-O-Methyl-adenosine phosphorothioate
  modified_base 3: mod_base = OTHER; note = 2'-O-Methyl-guanosine
  modified_base 21: mod_base = OTHER; note = 2'-O-Methyl-guanosine
  modified_base 28: mod_base = OTHER; note = 2'-O-Methyl-adenosine
  modified_base 29: mod_base = OTHER; note = 2'-O-Methyl-guanosine
  modified_base 30: mod_base = OTHER; note = 2'-O-Methyl-cytidine
  modified_base 31: mod_base = OTHER; note = 2'-O-Methyl-uridine
  modified_base 32: mod_base = OTHER; note = 2'-O-Methyl-adenosine
  modified_base 34: mod_base = OTHER; note = 2'-O-Methyl-adenosine
  modified_base 35: mod_base = OTHER; note = 2'-O-Methyl-adenosine
  modified_base 36: mod_base = OTHER; note = 2'-O-Methyl-adenosine
  modified_base 37: mod_base = OTHER; note = 2'-O-Methyl-uridine
  modified_base 38: mod_base = OTHER; note = 2'-O-Methyl-adenosine
  modified_base 39: mod_base = OTHER; note = 2'-O-Methyl-guanosine
  modified_base 40: mod_base = OTHER; note = 2'-O-Methyl-cytidine
  modified_base 41: mod_base = OTHER; note = 2'-O-Methyl-adenosine
  modified_base 42: mod_base = OTHER; note = 2'-O-Methyl-adenosine
  modified_base 46: mod_base = OTHER; note = 2'-O-Methyl-adenosine
  modified_base 48: mod_base = OTHER; note = 2'-O-Methyl-adenosine
  modified_base 50: mod_base = OTHER; note = 2'-O-Methyl-uridine
  modified_base 52: mod_base = OTHER; note = 2'-O-Methyl-adenosine
  modified_base 53: mod_base = OTHER; note = 2'-O-Methyl-guanosine
  modified_base 54: mod_base = OTHER; note = 2'-O-Methyl-guanosine
  modified_base 55: mod_base = OTHER; note = 2'-O-Methyl-cytidine
  modified_base 56: mod_base = OTHER; note = 2'-O-Methyl-uridine
  modified_base 57: mod_base = OTHER; note = 2'-O-Methyl-adenosine
  modified_base 60: mod_base = OTHER; note = 2'-O-Methyl-cytidine
  modified_base 61: mod_base = OTHER; note = 2'-O-Methyl-cytidine
  modified_base 66: mod_base = OTHER; note = 2'-O-Methyl-uridine
  modified_base 67: mod_base = OTHER; note = 2'-O-Methyl-cytidine
  modified_base 70: mod_base = OTHER; note = 2'-O-Methyl-cytidine
  modified_base 71: mod_base = OTHER; note = 2'-O-Methyl-uridine
  modified_base 72: mod_base = OTHER; note = 2'-O-Methyl-uridine
  modified_base 74: mod_base = OTHER; note = 2'-O-Methyl-adenosine
  modified_base 75: mod_base = OTHER; note = 2'-O-Methyl-adenosine
  modified_base 76: mod_base = OTHER; note = 2'-O-Methyl-adenosine
  modified_base 77: mod_base = OTHER; note = 2'-O-Methyl-adenosine
  modified_base 78: mod_base = OTHER; note = 2'-O-Methyl-adenosine
  modified_base 79: mod_base = OTHER; note = 2'-O-Methyl-guanosine
  modified_base 80: mod_base = OTHER; note = 2'-O-Methyl-uridine
  modified_base 81: mod_base = OTHER; note = 2'-O-Methyl-guanosine
  modified_base 83: mod_base = OTHER; note = 2'-O-Methyl-cytidine
  modified_base 84: mod_base = OTHER; note = 2'-O-Methyl-adenosine
  modified_base 85: mod_base = OTHER; note = 2'-O-Methyl-cytidine
  modified_base 86: mod_base = OTHER; note = 2'-O-Methyl-cytidine
  modified_base 87: mod_base = OTHER; note = 2'-O-Methyl-guanosine
  modified_base 88: mod_base = OTHER; note = 2'-O-Methyl-adenosine
  modified_base 89: mod_base = OTHER; note = 2'-O-Methyl-guanosine
  modified_base 90: mod_base = OTHER; note = 2'-O-Methyl-uridine
  modified_base 91: mod_base = OTHER; note = 2'-O-Methyl-cytidine
  modified_base 92: mod_base = OTHER; note = 2'-O-Methyl-guanosine
  modified_base 93: mod_base = OTHER; note = 2'-O-Methyl-guanosine
  modified_base 94: mod_base = OTHER; note = 2'-O-Methyl-uridine
  modified_base 95: mod_base = OTHER; note = 2'-O-Methyl-guanosine
  modified_base 96: mod_base = OTHER; note = 2'-O-Methyl-cytidine
  modified_base 97: mod_base = OTHER; note = 2'-O-Methyl-uridine phosphorothioate
  modified_base 98: mod_base = OTHER; note = 2'-O-Methyl-uridine phosphorothioate
  modified_base 99: mod_base = OTHER; note = 2'-O-Methyl-uridine phosphorothioate
  modified_base 100: mod_base = OTHER; note = 2'-O-Methyl-uridine

SEQ ID NO: 2502 - RNA, 103 nt, synthetic construct; identical to SEQ ID NO: 1700
  source 1..103: mol_type = other RNA
  modified_base 1: mod_base = OTHER; note = 2'-O-Methyl-cytidine phosphorothioate
  modified_base 2: mod_base = OTHER; note = 2'-O-Methyl-adenosine phosphorothioate
  modified_base 3: mod_base = OTHER; note = 2'-O-Methyl-guanosine
  modified_base 21: mod_base = OTHER; note = 2'-O-Methyl-guanosine
  modified_base 28: mod_base = OTHER; note = 2'-O-Methyl-adenosine
  modified_base 29: mod_base = OTHER; note = 2'-O-Methyl-guanosine
  modified_base 30: mod_base = OTHER; note = 2'-O-Methyl-cytidine
  modified_base 31: mod_base = OTHER; note = 2'-O-Methyl-uridine
  modified_base 32: mod_base = OTHER; note = 2'-O-Methyl-adenosine
  modified_base 34: mod_base = OTHER; note = 2'-O-Methyl-adenosine
  modified_base 35: mod_base = OTHER; note = 2'-O-Methyl-adenosine
  modified_base 36: mod_base = OTHER; note = 2'-O-Methyl-adenosine
  modified_base 37: mod_base = OTHER; note = 2'-O-Methyl-uridine
  modified_base 38: mod_base = OTHER; note = 2'-O-Methyl-adenosine
  modified_base 39: mod_base = OTHER; note = 2'-O-Methyl-guanosine
  modified_base 40: mod_base = OTHER; note = 2'-O-Methyl-cytidine
  modified_base 41: mod_base = OTHER; note = 2'-O-Methyl-adenosine
  modified_base 42: mod_base = OTHER; note = 2'-O-Methyl-adenosine
  modified_base 46: mod_base = OTHER; note = 2'-O-Methyl-adenosine
  modified_base 48: mod_base = OTHER; note = 2'-O-Methyl-adenosine
  modified_base 50: mod_base = OTHER; note = 2'-O-Methyl-uridine
  modified_base 52: mod_base = OTHER; note = 2'-O-Methyl-adenosine
  modified_base 53: mod_base = OTHER; note = 2'-O-Methyl-guanosine
  modified_base 54: mod_base = OTHER; note = 2'-O-Methyl-guanosine
  modified_base 55: mod_base = OTHER; note = 2'-O-Methyl-cytidine
  modified_base 56: mod_base = OTHER; note = 2'-O-Methyl-uridine
  modified_base 57: mod_base = OTHER; note = 2'-O-Methyl-adenosine
  modified_base 60: mod_base = OTHER; note = 2'-O-Methyl-cytidine
  modified_base 61: mod_base = OTHER; note = 2'-O-Methyl-cytidine
  modified_base 66: mod_base = OTHER; note = 2'-O-Methyl-uridine
  modified_base 67: mod_base = OTHER; note = 2'-O-Methyl-cytidine
  modified_base 70: mod_base = OTHER; note = 2'-O-Methyl-cytidine
  modified_base 71: mod_base = OTHER; note = 2'-O-Methyl-uridine
  modified_base 72: mod_base = OTHER; note = 2'-O-Methyl-uridine
  modified_base 74: mod_base = OTHER; note = 2'-O-Methyl-adenosine
  modified_base 75: mod_base = OTHER; note = 2'-O-Methyl-adenosine
  modified_base 76: mod_base = OTHER; note = 2'-O-Methyl-adenosine
  modified_base 77: mod_base = OTHER; note = 2'-O-Methyl-adenosine
  modified_base 78: mod_base = OTHER; note = 2'-O-Methyl-adenosine
  modified_base 79: mod_base = OTHER; note = 2'-O-Methyl-guanosine
  modified_base 80: mod_base = OTHER; note = 2'-O-Methyl-uridine
  modified_base 81: mod_base = OTHER; note = 2'-O-Methyl-guanosine
  modified_base 83: mod_base = OTHER; note = 2'-O-Methyl-cytidine
  modified_base 84: mod_base = OTHER; note = 2'-O-Methyl-adenosine
  modified_base 85: mod_base = OTHER; note = 2'-O-Methyl-cytidine
  modified_base 86: mod_base = OTHER; note = 2'-O-Methyl-cytidine
  modified_base 87: mod_base = OTHER; note = 2'-O-Methyl-guanosine
  modified_base 88: mod_base = OTHER; note = 2'-O-Methyl-adenosine
  modified_base 89: mod_base = OTHER; note = 2'-O-Methyl-guanosine
  modified_base 90: mod_base = OTHER; note = 2'-O-Methyl-uridine
  modified_base 91: mod_base = OTHER; note = 2'-O-Methyl-cytidine
  modified_base 92: mod_base = OTHER; note = 2'-O-Methyl-guanosine
  modified_base 93: mod_base = OTHER; note = 2'-O-Methyl-guanosine
  modified_base 94: mod_base = OTHER; note = 2'-O-Methyl-uridine
  modified_base 95: mod_base = OTHER; note = 2'-O-Methyl-guanosine
  modified_base 96: mod_base = OTHER; note = 2'-O-Methyl-cytidine
  modified_base 97: mod_base = OTHER; note = 2'-O-Methyl-uridine phosphorothioate
  modified_base 98: mod_base = OTHER; note = 2'-O-Methyl-uridine phosphorothioate
  modified_base 99: mod_base = OTHER; note = 2'-O-Methyl-uridine phosphorothioate
  modified_base 100: mod_base = OTHER; note = 2'-O-Methyl-uridine

SEQ ID NO: 2503 - RNA, 103 nt, synthetic construct; identical to SEQ ID NO: 1700
  source 1..103: mol_type = other RNA
  modified_base 1: mod_base = OTHER; note = 2'-O-Methyl-cytidine phosphorothioate
  modified_base 2: mod_base = OTHER; note = 2'-O-Methyl-adenosine phosphorothioate
  modified_base 3: mod_base = OTHER; note = 2'-O-Methyl-guanosine
  modified_base 21: mod_base = OTHER; note = 2'-O-Methyl-guanosine
  modified_base 28: mod_base = OTHER; note = 2'-O-Methyl-adenosine
  modified_base 29: mod_base = OTHER; note = 2'-O-Methyl-guanosine
  modified_base 30: mod_base = OTHER; note = 2'-O-Methyl-cytidine
  modified_base 31: mod_base = OTHER; note = 2'-O-Methyl-uridine
  modified_base 32: mod_base = OTHER; note = 2'-O-Methyl-adenosine
  modified_base 33: mod_base = OTHER; note = 2'-O-Methyl-guanosine
  modified_base 34: mod_base = OTHER; note = 2'-O-Methyl-adenosine
  modified_base 35: mod_base = OTHER; note = 2'-O-Methyl-adenosine
  modified_base 36: mod_base = OTHER; note = 2'-O-Methyl-adenosine
  modified_base 37: mod_base = OTHER; note = 2'-O-Methyl-uridine
  modified_base 38: mod_base = OTHER; note = 2'-O-Methyl-adenosine
  modified_base 39: mod_base = OTHER; note = 2'-O-Methyl-guanosine
  modified_base 40: mod_base = OTHER; note = 2'-O-Methyl-cytidine
  modified_base 41: mod_base = OTHER; note = 2'-O-Methyl-adenosine
  modified_base 42: mod_base = OTHER; note = 2'-O-Methyl-adenosine
  modified_base 46: mod_base = OTHER; note = 2'-O-Methyl-adenosine
  modified_base 48: mod_base = OTHER; note = 2'-O-Methyl-adenosine
  modified_base 50: mod_base = OTHER; note = 2'-O-Methyl-uridine
  modified_base 52: mod_base = OTHER; note = 2'-O-Methyl-adenosine
  modified_base 53: mod_base = OTHER; note = 2'-O-Methyl-guanosine
  modified_base 54: mod_base = OTHER; note = 2'-O-Methyl-guanosine
  modified_base 57: mod_base = OTHER; note = 2'-O-Methyl-adenosine
  modified_base 61: mod_base = OTHER; note = 2'-O-Methyl-cytidine
  modified_base 66: mod_base = OTHER; note = 2'-O-Methyl-uridine
  modified_base 67: mod_base = OTHER; note = 2'-O-Methyl-cytidine
  modified_base 70: mod_base = OTHER; note = 2'-O-Methyl-cytidine
  modified_base 71: mod_base = OTHER; note = 2'-O-Methyl-uridine
  modified_base 72: mod_base = OTHER; note = 2'-O-Methyl-uridine
  modified_base 74: mod_base = OTHER; note = 2'-O-Methyl-adenosine
  modified_base 75: mod_base = OTHER; note = 2'-O-Methyl-adenosine
  modified_base 76: mod_base = OTHER; note = 2'-O-Methyl-adenosine
  modified_base 77: mod_base = OTHER; note = 2'-O-Methyl-adenosine
  modified_base 78: mod_base = OTHER; note = 2'-O-Methyl-adenosine
  modified_base 79: mod_base = OTHER; note = 2'-O-Methyl-guanosine
  modified_base 80: mod_base = OTHER; note = 2'-O-Methyl-uridine
  modified_base 82: mod_base = OTHER; note = 2'-O-Methyl-guanosine
  modified_base 83: mod_base = OTHER; note = 2'-O-Methyl-cytidine
  modified_base 84: mod_base = OTHER; note = 2'-O-Methyl-adenosine
  modified_base 85: mod_base = OTHER; note = 2'-O-Methyl-cytidine
  modified_base 86: mod_base = OTHER; note = 2'-O-Methyl-cytidine
  modified_base 87: mod_base = OTHER; note = 2'-O-Methyl-guanosine
  modified_base 89: mod_base = OTHER; note = 2'-O-Methyl-guanosine
  modified_base 92: mod_base = OTHER; note = 2'-O-Methyl-guanosine
  modified_base 93: mod_base = OTHER; note = 2'-O-Methyl-guanosine
  modified_base 94: mod_base = OTHER; note = 2'-O-Methyl-uridine
  modified_base 95: mod_base = OTHER; note = 2'-O-Methyl-guanosine
  modified_base 96: mod_base = OTHER; note = 2'-O-Methyl-cytidine
  modified_base 97: mod_base = OTHER; note = 2'-O-Methyl-uridine phosphorothioate
  modified_base 98: mod_base = OTHER; note = 2'-O-Methyl-uridine phosphorothioate
  modified_base 99: mod_base = OTHER; note = 2'-O-Methyl-uridine phosphorothioate
  modified_base 100: mod_base = OTHER; note = 2'-O-Methyl-uridine

SEQ ID NO: 2504 - RNA, 103 nt, synthetic construct; identical to SEQ ID NO: 1700
  source 1..103: mol_type = other RNA
  modified_base 1: mod_base = OTHER; note = 2'-O-Methyl-cytidine phosphorothioate
  modified_base 2: mod_base = OTHER; note = 2'-O-Methyl-adenosine phosphorothioate
  modified_base 3: mod_base = OTHER; note = 2'-O-Methyl-guanosine
  modified_base 21: mod_base = OTHER; note = 2'-O-Methyl-guanosine
  modified_base 28: mod_base = OTHER; note = 2'-O-Methyl-adenosine
  modified_base 29: mod_base = OTHER; note = 2'-O-Methyl-guanosine
  modified_base 30: mod_base = OTHER; note = 2'-O-Methyl-cytidine
  modified_base 31: mod_base = OTHER; note = 2'-O-Methyl-uridine
  modified_base 32: mod_base = OTHER; note = 2'-O-Methyl-adenosine
  modified_base 33: mod_base = OTHER; note = 2'-O-Methyl-guanosine
  modified_base 34: mod_base = OTHER; note = 2'-O-Methyl-adenosine
  modified_base 35: mod_base = OTHER; note = 2'-O-Methyl-adenosine
  modified_base 36: mod_base = OTHER; note = 2'-O-Methyl-adenosine
  modified_base 37: mod_base = OTHER; note = 2'-O-Methyl-uridine
  modified_base 38: mod_base = OTHER; note = 2'-O-Methyl-adenosine
  modified_base 39: mod_base = OTHER; note = 2'-O-Methyl-guanosine
  modified_base 40: mod_base = OTHER; note = 2'-O-Methyl-cytidine
  modified_base 41: mod_base = OTHER; note = 2'-O-Methyl-adenosine
  modified_base 42: mod_base = OTHER; note = 2'-O-Methyl-adenosine
  modified_base 46: mod_base = OTHER; note = 2'-O-Methyl-adenosine
  modified_base 48: mod_base = OTHER; note = 2'-O-Methyl-adenosine
  modified_base 50: mod_base = OTHER; note = 2'-O-Methyl-uridine
  modified_base 52: mod_base = OTHER; note = 2'-O-Methyl-adenosine
  modified_base 53: mod_base = OTHER; note = 2'-O-Methyl-guanosine
  modified_base 54: mod_base = OTHER; note = 2'-O-Methyl-guanosine
  modified_base 55: mod_base = OTHER; note = 2'-O-Methyl-cytidine
  modified_base 56: mod_base = OTHER; note = 2'-O-Methyl-uridine
  modified_base 57: mod_base = OTHER; note = 2'-O-Methyl-adenosine
  modified_base 60: mod_base = OTHER; note = 2'-O-Methyl-cytidine
  modified_base 61: mod_base = OTHER; note = 2'-O-Methyl-cytidine
  modified_base 66: mod_base = OTHER; note = 2'-O-Methyl-uridine
  modified_base 67: mod_base = OTHER; note = 2'-O-Methyl-cytidine
  modified_base 70: mod_base = OTHER; note = 2'-O-Methyl-cytidine
  modified_base 71: mod_base = OTHER; note = 2'-O-Methyl-uridine
  modified_base 72: mod_base = OTHER; note = 2'-O-Methyl-uridine
  modified_base 74: mod_base = OTHER; note = 2'-O-Methyl-adenosine
  modified_base 75: mod_base = OTHER; note = 2'-O-Methyl-adenosine
  modified_base 76: mod_base = OTHER; note = 2'-O-Methyl-adenosine
  modified_base 77: mod_base = OTHER; note = 2'-O-Methyl-adenosine
  modified_base 78: mod_base = OTHER; note = 2'-O-Methyl-adenosine
  modified_base 79: mod_base = OTHER; note = 2'-O-Methyl-guanosine
  modified_base 80: mod_base = OTHER; note = 2'-O-Methyl-uridine
  modified_base 82: mod_base = OTHER; note = 2'-O-Methyl-guanosine
  modified_base 83: mod_base = OTHER; note = 2'-O-Methyl-cytidine
  modified_base 84: mod_base = OTHER; note = 2'-O-Methyl-adenosine
  modified_base 85: mod_base = OTHER; note = 2'-O-Methyl-cytidine
  modified_base 86: mod_base = OTHER; note = 2'-O-Methyl-cytidine
  modified_base 87: mod_base = OTHER; note = 2'-O-Methyl-guanosine
  modified_base 89: mod_base = OTHER; note = 2'-O-Methyl-guanosine
  modified_base 92: mod_base = OTHER; note = 2'-O-Methyl-guanosine
  modified_base 93: mod_base = OTHER; note = 2'-O-Methyl-guanosine
  modified_base 94: mod_base = OTHER; note = 2'-O-Methyl-uridine
  modified_base 95: mod_base = OTHER; note = 2'-O-Methyl-guanosine
  modified_base 96: mod_base = OTHER; note = 2'-O-Methyl-cytidine
  modified_base 97: mod_base = OTHER; note = 2'-O-Methyl-uridine phosphorothioate
  modified_base 98: mod_base = OTHER; note = 2'-O-Methyl-uridine phosphorothioate
  modified_base 99: mod_base = OTHER; note = 2'-O-Methyl-uridine phosphorothioate
  modified_base 100: mod_base = OTHER; note = 2'-O-Methyl-uridine

SEQ ID NO: 2505 - RNA, 103 nt, synthetic construct; identical to SEQ ID NO: 1700
  source 1..103: mol_type = other RNA
  modified_base 1: mod_base = OTHER; note = 2'-O-Methyl-cytidine phosphorothioate
  modified_base 2: mod_base = OTHER; note = 2'-O-Methyl-adenosine phosphorothioate
  modified_base 3: mod_base = OTHER; note = 2'-O-Methyl-guanosine
  modified_base 21: mod_base = OTHER; note = 2'-O-Methyl-guanosine
  modified_base 28: mod_base = OTHER; note = 2'-O-Methyl-adenosine
  modified_base 29: mod_base = OTHER; note = 2'-O-Methyl-guanosine
  modified_base 30: mod_base = OTHER; note = 2'-O-Methyl-cytidine
  modified_base 31: mod_base = OTHER; note = 2'-O-Methyl-uridine
  modified_base 32: mod_base = OTHER; note = 2'-O-Methyl-adenosine
  modified_base 33: mod_base = OTHER; note = 2'-O-Methyl-guanosine
  modified_base 34: mod_base = OTHER; note = 2'-O-Methyl-adenosine
  modified_base 35: mod_base = OTHER; note = 2'-O-Methyl-adenosine
  modified_base 36: mod_base = OTHER; note = 2'-O-Methyl-adenosine
  modified_base 37: mod_base = OTHER; note = 2'-O-Methyl-uridine
  modified_base 38: mod_base = OTHER; note = 2'-O-Methyl-adenosine
  modified_base 39: mod_base = OTHER; note = 2'-O-Methyl-guanosine
  modified_base 40: mod_base = OTHER; note = 2'-O-Methyl-cytidine
  modified_base 41: mod_base = OTHER; note = 2'-O-Methyl-adenosine
  modified_base 42: mod_base = OTHER; note = 2'-O-Methyl-adenosine
  modified_base 46: mod_base = OTHER; note = 2'-O-Methyl-adenosine
  modified_base 48: mod_base = OTHER; note = 2'-O-Methyl-adenosine
  modified_base 50: mod_base = OTHER; note = 2'-O-Methyl-uridine
  modified_base 52: mod_base = OTHER; note = 2'-O-Methyl-adenosine
  modified_base 53: mod_base = OTHER; note = 2'-O-Methyl-guanosine
  modified_base 54: mod_base = OTHER; note = 2'-O-Methyl-guanosine
  modified_base 57: mod_base = OTHER; note = 2'-O-Methyl-adenosine
  modified_base 61: mod_base = OTHER; note = 2'-O-Methyl-cytidine
  modified_base 66: mod_base = OTHER; note = 2'-O-Methyl-uridine
  modified_base 67: mod_base = OTHER; note = 2'-O-Methyl-cytidine
  modified_base 70: mod_base = OTHER; note = 2'-O-Methyl-cytidine
  modified_base 71: mod_base = OTHER; note = 2'-O-Methyl-uridine
  modified_base 72: mod_base = OTHER; note = 2'-O-Methyl-uridine
  modified_base 73: mod_base = OTHER; note = 2'-O-Methyl-guanosine
  modified_base 74: mod_base = OTHER; note = 2'-O-Methyl-adenosine
  modified_base 75: mod_base = OTHER; note = 2'-O-Methyl-adenosine
  modified_base 76: mod_base = OTHER; note = 2'-O-Methyl-adenosine
  modified_base 77: mod_base = OTHER; note = 2'-O-Methyl-adenosine
  modified_base 78: mod_base = OTHER; note = 2'-O-Methyl-adenosine
  modified_base 79: mod_base = OTHER; note = 2'-O-Methyl-guanosine
  modified_base 80: mod_base = OTHER; note = 2'-O-Methyl-uridine
  modified_base 82: mod_base = OTHER; note = 2'-O-Methyl-guanosine
  modified_base 83: mod_base = OTHER; note = 2'-O-Methyl-cytidine
  modified_base 84: mod_base = OTHER; note = 2'-O-Methyl-adenosine
  modified_base 85: mod_base = OTHER; note = 2'-O-Methyl-cytidine
  modified_base 86: mod_base = OTHER; note = 2'-O-Methyl-cytidine
  modified_base 87: mod_base = OTHER; note = 2'-O-Methyl-guanosine
  modified_base 89: mod_base = OTHER; note = 2'-O-Methyl-guanosine
  modified_base 92: mod_base = OTHER; note = 2'-O-Methyl-guanosine
  modified_base 93: mod_base = OTHER; note = 2'-O-Methyl-guanosine
  modified_base 94: mod_base = OTHER; note = 2'-O-Methyl-uridine
  modified_base 95: mod_base = OTHER; note = 2'-O-Methyl-guanosine
  modified_base 96: mod_base = OTHER; note = 2'-O-Methyl-cytidine
  modified_base 97: mod_base = OTHER; note = 2'-O-Methyl-uridine phosphorothioate
  modified_base 98: mod_base = OTHER; note = 2'-O-Methyl-uridine phosphorothioate
  modified_base 99: mod_base = OTHER; note = 2'-O-Methyl-uridine phosphorothioate
  modified_base 100: mod_base = OTHER; note = 2'-O-Methyl-uridine

SEQ ID NO: 2506 - RNA, 103 nt, synthetic construct; identical to SEQ ID NO: 1700
  source 1..103: mol_type = other RNA
  modified_base 1: mod_base = OTHER; note = 2'-O-Methyl-cytidine phosphorothioate
  modified_base 2: mod_base = OTHER; note = 2'-O-Methyl-adenosine phosphorothioate
  modified_base 3: mod_base = OTHER; note = 2'-O-Methyl-guanosine
  modified_base 21: mod_base = OTHER; note = 2'-O-Methyl-guanosine
  modified_base 28: mod_base = OTHER; note = 2'-O-Methyl-adenosine
  modified_base 29: mod_base = OTHER; note = 2'-O-Methyl-guanosine
  modified_base 30: mod_base = OTHER; note = 2'-O-Methyl-cytidine
  modified_base 31: mod_base = OTHER; note = 2'-O-Methyl-uridine
  modified_base 32: mod_base = OTHER; note = 2'-O-Methyl-adenosine
  modified_base 34: mod_base = OTHER; note = 2'-O-Methyl-adenosine
  modified_base 35: mod_base = OTHER; note = 2'-O-Methyl-adenosine
  modified_base 36: mod_base = OTHER; note = 2'-O-Methyl-adenosine
  modified_base 37: mod_base = OTHER; note = 2'-O-Methyl-uridine
  modified_base 38: mod_base = OTHER; note = 2'-O-Methyl-adenosine
  modified_base 39: mod_base = OTHER; note = 2'-O-Methyl-guanosine
  modified_base 40: mod_base = OTHER; note = 2'-O-Methyl-cytidine
  modified_base 41: mod_base = OTHER; note = 2'-O-Methyl-adenosine
  modified_base 42: mod_base = OTHER; note = 2'-O-Methyl-adenosine
  modified_base 46: mod_base = OTHER; note = 2'-O-Methyl-adenosine
  modified_base 48: mod_base = OTHER; note = 2'-O-Methyl-adenosine
  modified_base 50: mod_base = OTHER; note = 2'-O-Methyl-uridine
  modified_base 52: mod_base = OTHER; note = 2'-O-Methyl-adenosine
  modified_base 53: mod_base = OTHER; note = 2'-O-Methyl-guanosine
  modified_base 54: mod_base = OTHER; note = 2'-O-Methyl-guanosine
  modified_base 57: mod_base = OTHER; note = 2'-O-Methyl-adenosine
  modified_base 61: mod_base = OTHER; note = 2'-O-Methyl-cytidine
  modified_base 66: mod_base = OTHER; note = 2'-O-Methyl-uridine
  modified_base 67: mod_base = OTHER; note = 2'-O-Methyl-cytidine
  modified_base 70: mod_base = OTHER; note = 2'-O-Methyl-cytidine
  modified_base 71: mod_base = OTHER; note = 2'-O-Methyl-uridine
  modified_base 72: mod_base = OTHER; note = 2'-O-Methyl-uridine
  modified_base 73: mod_base = OTHER; note = 2'-O-Methyl-guanosine
  modified_base 74: mod_base = OTHER; note = 2'-O-Methyl-adenosine
  modified_base 75: mod_base = OTHER; note = 2'-O-Methyl-adenosine
  modified_base 76: mod_base = OTHER; note = 2'-O-Methyl-adenosine
  modified_base 77: mod_base = OTHER; note = 2'-O-Methyl-adenosine
  modified_base 78: mod_base = OTHER; note = 2'-O-Methyl-adenosine
  modified_base 79: mod_base = OTHER; note = 2'-O-Methyl-guanosine
  modified_base 80: mod_base = OTHER; note = 2'-O-Methyl-uridine
  modified_base 82: mod_base = OTHER; note = 2'-O-Methyl-guanosine
  modified_base 83: mod_base = OTHER; note = 2'-O-Methyl-cytidine
  modified_base 84: mod_base = OTHER; note = 2'-O-Methyl-adenosine
  modified_base 85: mod_base = OTHER; note = 2'-O-Methyl-cytidine
  modified_base 86: mod_base = OTHER; note = 2'-O-Methyl-cytidine
  modified_base 87: mod_base = OTHER; note = 2'-O-Methyl-guanosine
  modified_base 89: mod_base = OTHER; note = 2'-O-Methyl-guanosine
  modified_base 92: mod_base = OTHER; note = 2'-O-Methyl-guanosine
  modified_base 93: mod_base = OTHER; note = 2'-O-Methyl-guanosine
  modified_base 94: mod_base = OTHER; note = 2'-O-Methyl-uridine
  modified_base 95: mod_base = OTHER; note = 2'-O-Methyl-guanosine
  modified_base 96: mod_base = OTHER; note = 2'-O-Methyl-cytidine
  modified_base 97: mod_base = OTHER; note = 2'-O-Methyl-uridine phosphorothioate
  modified_base 98: mod_base = OTHER; note = 2'-O-Methyl-uridine phosphorothioate
  modified_base 99: mod_base = OTHER; note = 2'-O-Methyl-uridine phosphorothioate
  modified_base 100: mod_base = OTHER; note = 2'-O-Methyl-uridine

SEQ ID NO: 2507 - RNA, 103 nt, synthetic construct; identical to SEQ ID NO: 1700
  source 1..103: mol_type = other RNA
  modified_base 1: mod_base = OTHER; note = 2'-O-Methyl-cytidine phosphorothioate
  modified_base 2: mod_base = OTHER; note = 2'-O-Methyl-adenosine phosphorothioate
  modified_base 3: mod_base = OTHER; note = 2'-O-Methyl-guanosine
  modified_base 21: mod_base = OTHER; note = 2'-O-Methyl-guanosine
  modified_base 28: mod_base = OTHER; note = 2'-O-Methyl-adenosine
  modified_base 29: mod_base = OTHER; note = 2'-O-Methyl-guanosine
  modified_base 30: mod_base = OTHER; note = 2'-O-Methyl-cytidine
  modified_base 31: mod_base = OTHER; note = 2'-O-Methyl-uridine
  modified_base 32: mod_base = OTHER; note = 2'-O-Methyl-adenosine
  modified_base 34: mod_base = OTHER; note = 2'-O-Methyl-adenosine
  modified_base 35: mod_base = OTHER; note = 2'-O-Methyl-adenosine
  modified_base 36: mod_base = OTHER; note = 2'-O-Methyl-adenosine
  modified_base 37: mod_base = OTHER; note = 2'-O-Methyl-uridine
  modified_base 38: mod_base = OTHER; note = 2'-O-Methyl-adenosine
  modified_base 39: mod_base = OTHER; note = 2'-O-Methyl-guanosine
  modified_base 40: mod_base = OTHER; note = 2'-O-Methyl-cytidine
  modified_base 41: mod_base = OTHER; note = 2'-O-Methyl-adenosine
  modified_base 42: mod_base = OTHER; note = 2'-O-Methyl-adenosine
  modified_base 46: mod_base = OTHER; note = 2'-O-Methyl-adenosine
  modified_base 48: mod_base = OTHER; note = 2'-O-Methyl-adenosine
  modified_base 50: mod_base = OTHER; note = 2'-O-Methyl-uridine
  modified_base 52: mod_base = OTHER; note = 2'-O-Methyl-adenosine
  modified_base 53: mod_base = OTHER; note = 2'-O-Methyl-guanosine
  modified_base 54: mod_base = OTHER; note = 2'-O-Methyl-guanosine
  modified_base 57: mod_base = OTHER; note = 2'-O-Methyl-adenosine
  modified_base 61: mod_base = OTHER; note = 2'-O-Methyl-cytidine
  modified_base 66: mod_base = OTHER; note = 2'-O-Methyl-uridine
  modified_base 67: mod_base = OTHER; note = 2'-O-Methyl-cytidine
  modified_base 70: mod_base = OTHER; note = 2'-O-Methyl-cytidine
  modified_base 71: mod_base = OTHER; note = 2'-O-Methyl-uridine
  modified_base 72: mod_base = OTHER; note = 2'-O-Methyl-uridine
  modified_base 73: mod_base = OTHER; note = 2'-O-Methyl-guanosine
  modified_base 74: mod_base = OTHER; note = 2'-O-Methyl-adenosine
  modified_base 75: mod_base = OTHER; note = 2'-O-Methyl-adenosine
  modified_base 76: mod_base = OTHER; note = 2'-O-Methyl-adenosine
  modified_base 77: mod_base = OTHER; note = 2'-O-Methyl-adenosine
  modified_base 78: mod_base = OTHER; note = 2'-O-Methyl-adenosine
  modified_base 79: mod_base = OTHER; note = 2'-O-Methyl-guanosine
  modified_base 80: mod_base = OTHER; note = 2'-O-Methyl-uridine
  modified_base 82: mod_base = OTHER; note = 2'-O-Methyl-guanosine
  modified_base 83: mod_base = OTHER; note = 2'-O-Methyl-cytidine
  modified_base 84: mod_base = OTHER; note = 2'-O-Methyl-adenosine
  modified_base 85: mod_base = OTHER; note = 2'-O-Methyl-cytidine
  modified_base 86: mod_base = OTHER; note = 2'-O-Methyl-cytidine
  modified_base 87: mod_base = OTHER; note = 2'-O-Methyl-guanosine
  modified_base 89: mod_base = OTHER; note = 2'-O-Methyl-guanosine
  modified_base 91: mod_base = OTHER; note = 2'-O-Methyl-cytidine
  modified_base 92: mod_base = OTHER; note = 2'-O-Methyl-guanosine
  modified_base 93: mod_base = OTHER; note = 2'-O-Methyl-guanosine
  modified_base 94: mod_base = OTHER; note = 2'-O-Methyl-uridine
  modified_base 95: mod_base = OTHER; note = 2'-O-Methyl-guanosine
  modified_base 96: mod_base = OTHER; note = 2'-O-Methyl-cytidine
  modified_base 97: mod_base = OTHER; note = 2'-O-Methyl-uridine phosphorothioate
  modified_base 98: mod_base = OTHER; note = 2'-O-Methyl-uridine phosphorothioate
  modified_base 99: mod_base = OTHER; note = 2'-O-Methyl-uridine phosphorothioate
  modified_base 100: mod_base = OTHER; note = 2'-O-Methyl-uridine

SEQ ID NO: 2508 - RNA, 103 nt, synthetic construct; identical to SEQ ID NO: 1700
  source 1..103: mol_type = other RNA
  modified_base 1: mod_base = OTHER; note = 2'-O-Methyl-cytidine phosphorothioate
  modified_base 2: mod_base = OTHER; note = 2'-O-Methyl-adenosine phosphorothioate
  modified_base 3: mod_base = OTHER; note = 2'-O-Methyl-guanosine
  modified_base 21: mod_base = OTHER; note = 2'-O-Methyl-guanosine
  modified_base 28: mod_base = OTHER; note = 2'-O-Methyl-adenosine
  modified_base 29: mod_base = OTHER; note = 2'-O-Methyl-guanosine
  modified_base 30: mod_base = OTHER; note = 2'-O-Methyl-cytidine
  modified_base 31: mod_base = OTHER; note = 2'-O-Methyl-uridine
  modified_base 32: mod_base = OTHER; note = 2'-O-Methyl-adenosine
  modified_base 34: mod_base = OTHER; note = 2'-O-Methyl-adenosine
  modified_base 35: mod_base = OTHER; note = 2'-O-Methyl-adenosine
  modified_base 36: mod_base = OTHER; note = 2'-O-Methyl-adenosine
  modified_base 37: mod_base = OTHER; note = 2'-O-Methyl-uridine
  modified_base 38: mod_base = OTHER; note = 2'-O-Methyl-adenosine
  modified_base 39: mod_base = OTHER; note = 2'-O-Methyl-guanosine
  modified_base 40: mod_base = OTHER; note = 2'-O-Methyl-cytidine
  modified_base 41: mod_base = OTHER; note = 2'-O-Methyl-adenosine
  modified_base 42: mod_base = OTHER; note = 2'-O-Methyl-adenosine
  modified_base 46: mod_base = OTHER; note = 2'-O-Methyl-adenosine
  modified_base 48: mod_base = OTHER; note = 2'-O-Methyl-adenosine
  modified_base 50: mod_base = OTHER; note = 2'-O-Methyl-uridine
  modified_base 52: mod_base = OTHER; note = 2'-O-Methyl-adenosine
  modified_base 53: mod_base = OTHER; note = 2'-O-Methyl-guanosine
  modified_base 54: mod_base = OTHER; note = 2'-O-Methyl-guanosine
  modified_base 55: mod_base = OTHER; note = 2'-O-Methyl-cytidine
  modified_base 56: mod_base = OTHER; note = 2'-O-Methyl-uridine
  modified_base 57: mod_base = OTHER; note = 2'-O-Methyl-adenosine
  modified_base 60: mod_base = OTHER; note = 2'-O-Methyl-cytidine
  modified_base 61: mod_base = OTHER; note = 2'-O-Methyl-cytidine
  modified_base 66: mod_base = OTHER; note = 2'-O-Methyl-uridine
  modified_base 67: mod_base = OTHER; note = 2'-O-Methyl-cytidine
  modified_base 70: mod_base = OTHER; note = 2'-O-Methyl-cytidine
  modified_base 71: mod_base = OTHER; note = 2'-O-Methyl-uridine
  modified_base 72: mod_base = OTHER; note = 2'-O-Methyl-uridine
  modified_base 74: mod_base = OTHER; note = 2'-O-Methyl-adenosine
  modified_base 75: mod_base = OTHER; note = 2'-O-Methyl-adenosine
  modified_base 76: mod_base = OTHER; note = 2'-O-Methyl-adenosine
  modified_base 77: mod_base = OTHER; note = 2'-O-Methyl-adenosine
  modified_base 78: mod_base = OTHER; note = 2'-O-Methyl-adenosine
  modified_base 79: mod_base = OTHER; note = 2'-O-Methyl-guanosine
  modified_base 80: mod_base = OTHER; note = 2'-O-Methyl-uridine
  modified_base 82: mod_base = OTHER; note = 2'-O-Methyl-guanosine
  modified_base 83: mod_base = OTHER; note = 2'-O-Methyl-cytidine
  modified_base 84: mod_base = OTHER; note = 2'-O-Methyl-adenosine
  modified_base 85: mod_base = OTHER; note = 2'-O-Methyl-cytidine
  modified_base 86: mod_base = OTHER; note = 2'-O-Methyl-cytidine
  modified_base 87: mod_base = OTHER; note = 2'-O-Methyl-guanosine
  modified_base 89: mod_base = OTHER; note = 2'-O-Methyl-guanosine
  modified_base 92: mod_base = OTHER; note = 2'-O-Methyl-guanosine
  modified_base 93: mod_base = OTHER; note = 2'-O-Methyl-guanosine
  modified_base 94: mod_base = OTHER; note = 2'-O-Methyl-uridine
  modified_base 95: mod_base = OTHER; note = 2'-O-Methyl-guanosine
  modified_base 96: mod_base = OTHER; note = 2'-O-Methyl-cytidine
  modified_base 97: mod_base = OTHER; note = 2'-O-Methyl-uridine phosphorothioate
  modified_base 98: mod_base = OTHER; note = 2'-O-Methyl-uridine phosphorothioate
  modified_base 99: mod_base = OTHER; note = 2'-O-Methyl-uridine phosphorothioate
  modified_base 100: mod_base = OTHER; note = 2'-O-Methyl-uridine

SEQ ID NO: 2509 - RNA, 103 nt, synthetic construct; identical to SEQ ID NO: 1643
  source 1..103: mol_type = other RNA
  modified_base 1: mod_base = OTHER; note = 2'-O-Methyl-cytidine phosphorothioate
  modified_base 2: mod_base = OTHER; note = 2'-O-Methyl-cytidine phosphorothioate
  modified_base 3: mod_base = OTHER; note = 2'-O-Methyl-cytidine
  modified_base 21: mod_base = OTHER; note = 2'-O-Methyl-guanosine
  modified_base 28: mod_base = OTHER; note = 2'-O-Methyl-adenosine
  modified_base 29: mod_base = OTHER; note = 2'-O-Methyl-guanosine
  modified_base 30: mod_base = OTHER; note = 2'-O-Methyl-cytidine
  modified_base 31: mod_base = OTHER; note = 2'-O-Methyl-uridine
  modified_base 32: mod_base = OTHER; note = 2'-O-Methyl-adenosine
  modified_base 33: mod_base = OTHER; note = 2'-O-Methyl-guanosine
  modified_base 34: mod_base = OTHER; note = 2'-O-Methyl-adenosine
  modified_base 35: mod_base = OTHER; note = 2'-O-Methyl-adenosine
  modified_base 36: mod_base = OTHER; note = 2'-O-Methyl-adenosine
  modified_base 37: mod_base = OTHER; note = 2'-O-Methyl-uridine
  modified_base 38: mod_base = OTHER; note = 2'-O-Methyl-adenosine
  modified_base 39: mod_base = OTHER; note = 2'-O-Methyl-guanosine
  modified_base 40: mod_base = OTHER; note = 2'-O-Methyl-cytidine
  modified_base 41: mod_base = OTHER; note = 2'-O-Methyl-adenosine
  modified_base 42: mod_base = OTHER; note = 2'-O-Methyl-adenosine
  modified_base 46: mod_base = OTHER; note = 2'-O-Methyl-adenosine
  modified_base 48: mod_base = OTHER; note = 2'-O-Methyl-adenosine
  modified_base 50: mod_base = OTHER; note = 2'-O-Methyl-uridine
  modified_base 52: mod_base = OTHER; note = 2'-O-Methyl-adenosine
  modified_base 53: mod_base = OTHER; note = 2'-O-Methyl-guanosine
  modified_base 54: mod_base = OTHER; note = 2'-O-Methyl-guanosine
  modified_base 55: mod_base = OTHER; note = 2'-O-Methyl-cytidine
  modified_base 56: mod_base = OTHER; note = 2'-O-Methyl-uridine
  modified_base 57: mod_base = OTHER; note = 2'-O-Methyl-adenosine
  modified_base 60: mod_base = OTHER; note = 2'-O-Methyl-cytidine
  modified_base 61: mod_base = OTHER; note = 2'-O-Methyl-cytidine
  modified_base 64: mod_base = OTHER; note = uridine phosphorothioate
  modified_base 66: mod_base = OTHER; note = 2'-O-Methyl-uridine
  modified_base 67: mod_base = OTHER; note = 2'-O-Methyl-cytidine
  modified_base 70: mod_base = OTHER; note = 2'-O-Methyl-cytidine
  modified_base 71: mod_base = OTHER; note = 2'-O-Methyl-uridine
  modified_base 72: mod_base = OTHER; note = 2'-O-Methyl-uridine
  modified_base 73: mod_base = OTHER; note = 2'-O-Methyl-guanosine
  modified_base 74: mod_base = OTHER; note = 2'-O-Methyl-adenosine
  modified_base 75: mod_base = OTHER; note = 2'-O-Methyl-adenosine
  modified_base 76: mod_base = OTHER; note = 2'-O-Methyl-adenosine
  modified_base 77: mod_base = OTHER; note = 2'-O-Methyl-adenosine
  modified_base 78: mod_base = OTHER; note = 2'-O-Methyl-adenosine
  modified_base 79: mod_base = OTHER; note = 2'-O-Methyl-guanosine
  modified_base 80: mod_base = OTHER; note = 2'-O-Methyl-uridine
  modified_base 81: mod_base = OTHER; note = 2'-O-Methyl-guanosine
  modified_base 83: mod_base = OTHER; note = 2'-O-Methyl-cytidine
  modified_base 84: mod_base = OTHER; note = 2'-O-Methyl-adenosine
  modified_base 85: mod_base = OTHER; note = 2'-O-Methyl-cytidine
  modified_base 86: mod_base = OTHER; note = 2'-O-Methyl-cytidine
  modified_base 87: mod_base = OTHER; note = 2'-O-Methyl-guanosine
  modified_base 88: mod_base = OTHER; note = 2'-O-Methyl-adenosine
  modified_base 89: mod_base = OTHER; note = 2'-O-Methyl-guanosine
  modified_base 90: mod_base = OTHER; note = 2'-O-Methyl-uridine
  modified_base 91: mod_base = OTHER; note = 2'-O-Methyl-cytidine
  modified_base 92: mod_base = OTHER; note = 2'-O-Methyl-guanosine
  modified_base 93: mod_base = OTHER; note = 2'-O-Methyl-guanosine
  modified_base 94: mod_base = OTHER; note = 2'-O-Methyl-uridine
  modified_base 95: mod_base = OTHER; note = 2'-O-Methyl-guanosine
  modified_base 96: mod_base = OTHER; note = 2'-O-Methyl-cytidine
  modified_base 97: mod_base = OTHER; note = 2'-O-Methyl-uridine phosphorothioate
  modified_base 98: mod_base = OTHER; note = 2'-O-Methyl-uridine phosphorothioate
  modified_base 99: mod_base = OTHER; note = 2'-O-Methyl-uridine phosphorothioate
  modified_base 100: mod_base = OTHER; note = 2'-O-Methyl-uridine

SEQ ID NO: 2510 - RNA, 103 nt, synthetic construct; identical to SEQ ID NO: 1643
  source 1..103: mol_type = other RNA
  modified_base 1: mod_base = OTHER; note = 2'-O-Methyl-cytidine phosphorothioate
  modified_base 2: mod_base = OTHER; note = 2'-O-Methyl-cytidine phosphorothioate
  modified_base 3: mod_base = OTHER; note = 2'-O-Methyl-cytidine
  modified_base 21: mod_base = OTHER; note = 2'-O-Methyl-guanosine
  modified_base 28: mod_base = OTHER; note = 2'-O-Methyl-adenosine
  modified_base 29: mod_base = OTHER; note = 2'-O-Methyl-guanosine
  modified_base 30: mod_base = OTHER; note = 2'-O-Methyl-cytidine
  modified_base 31: mod_base = OTHER; note = 2'-O-Methyl-uridine
  modified_base 32: mod_base = OTHER; note = 2'-O-Methyl-adenosine
  modified_base 34: mod_base = OTHER; note = 2'-O-Methyl-adenosine
  modified_base 35: mod_base = OTHER; note = 2'-O-Methyl-adenosine
  modified_base 36: mod_base = OTHER; note = 2'-O-Methyl-adenosine
  modified_base 37: mod_base = OTHER; note = 2'-O-Methyl-uridine
  modified_base 38: mod_base = OTHER; note = 2'-O-Methyl-adenosine
  modified_base 39: mod_base = OTHER; note = 2'-O-Methyl-guanosine
  modified_base 40: mod_base = OTHER; note = 2'-O-Methyl-cytidine
  modified_base 41: mod_base = OTHER; note = 2'-O-Methyl-adenosine
  modified_base 42: mod_base = OTHER; note = 2'-O-Methyl-adenosine
  modified_base 46: mod_base = OTHER; note = 2'-O-Methyl-adenosine
  modified_base 48: mod_base = OTHER; note = 2'-O-Methyl-adenosine
  modified_base 50: mod_base = OTHER; note = 2'-O-Methyl-uridine
  modified_base 52: mod_base = OTHER; note = 2'-O-Methyl-adenosine
  modified_base 53: mod_base = OTHER; note = 2'-O-Methyl-guanosine
  modified_base 54: mod_base = OTHER; note = 2'-O-Methyl-guanosine
  modified_base 55: mod_base = OTHER; note = 2'-O-Methyl-cytidine
  modified_base 56: mod_base = OTHER; note = 2'-O-Methyl-uridine
  modified_base 57: mod_base = OTHER; note = 2'-O-Methyl-adenosine
  modified_base 60: mod_base = OTHER; note = 2'-O-Methyl-cytidine
  modified_base 61: mod_base = OTHER; note = 2'-O-Methyl-cytidine
  modified_base 64: mod_base = OTHER; note = uridine phosphorothioate
  modified_base 66: mod_base = OTHER; note = 2'-O-Methyl-uridine
  modified_base 67: mod_base = OTHER; note = 2'-O-Methyl-cytidine
  modified_base 70: mod_base = OTHER; note = 2'-O-Methyl-cytidine
  modified_base 71: mod_base = OTHER; note = 2'-O-Methyl-uridine
  modified_base 72: mod_base = OTHER; note = 2'-O-Methyl-uridine
  modified_base 74: mod_base = OTHER; note = 2'-O-Methyl-adenosine
  modified_base 75: mod_base = OTHER; note = 2'-O-Methyl-adenosine
  modified_base 76: mod_base = OTHER; note = 2'-O-Methyl-adenosine
  modified_base 77: mod_base = OTHER; note = 2'-O-Methyl-adenosine
  modified_base 78: mod_base = OTHER; note = 2'-O-Methyl-adenosine
  modified_base 79: mod_base = OTHER; note = 2'-O-Methyl-guanosine
  modified_base 80: mod_base = OTHER; note = 2'-O-Methyl-uridine
  modified_base 81: mod_base = OTHER; note = 2'-O-Methyl-guanosine
  modified_base 83: mod_base = OTHER; note = 2'-O-Methyl-cytidine
  modified_base 84: mod_base = OTHER; note = 2'-O-Methyl-adenosine
  modified_base 85: mod_base = OTHER; note = 2'-O-Methyl-cytidine
  modified_base 86: mod_base = OTHER; note = 2'-O-Methyl-cytidine
  modified_base 87: mod_base = OTHER; note = 2'-O-Methyl-guanosine
  modified_base 88: mod_base = OTHER; note = 2'-O-Methyl-adenosine
  modified_base 89: mod_base = OTHER; note = 2'-O-Methyl-guanosine
  modified_base 90: mod_base = OTHER; note = 2'-O-Methyl-uridine
  modified_base 91: mod_base = OTHER; note = 2'-O-Methyl-cytidine
  modified_base 92: mod_base = OTHER; note = 2'-O-Methyl-guanosine
  modified_base 93: mod_base = OTHER; note = 2'-O-Methyl-guanosine
  modified_base 94: mod_base = OTHER; note = 2'-O-Methyl-uridine
  modified_base 95: mod_base = OTHER; note = 2'-O-Methyl-guanosine
  modified_base 96: mod_base = OTHER; note = 2'-O-Methyl-cytidine
  modified_base 97: mod_base = OTHER; note = 2'-O-Methyl-uridine phosphorothioate
  modified_base 98: mod_base = OTHER; note = 2'-O-Methyl-uridine phosphorothioate
  modified_base 99: mod_base = OTHER; note = 2'-O-Methyl-uridine phosphorothioate
  modified_base 100: mod_base = OTHER; note = 2'-O-Methyl-uridine

SEQ ID NO: 2511 - RNA, 103 nt, synthetic construct; identical to SEQ ID NO: 1699
  source 1..103: mol_type = other RNA
  modified_base 1: mod_base = OTHER; note = 2'-O-Methyl-guanosine phosphorothioate
  modified_base 2: mod_base = OTHER; note = 2'-O-Methyl-adenosine phosphorothioate
  modified_base 3: mod_base = OTHER; note = 2'-O-Methyl-guanosine
  modified_base 21: mod_base = OTHER; note = 2'-O-Methyl-guanosine
  modified_base 28: mod_base = OTHER; note = 2'-O-Methyl-adenosine
  modified_base 29: mod_base = OTHER; note = 2'-O-Methyl-guanosine
  modified_base 30: mod_base = OTHER; note = 2'-O-Methyl-cytidine
  modified_base 31: mod_base = OTHER; note = 2'-O-Methyl-uridine
  modified_base 32: mod_base = OTHER; note = 2'-O-Methyl-adenosine
  modified_base 33: mod_base = OTHER; note = 2'-O-Methyl-guanosine
  modified_base 34: mod_base = OTHER; note = 2'-O-Methyl-adenosine
  modified_base 35: mod_base = OTHER; note = 2'-O-Methyl-adenosine
  modified_base 36: mod_base = OTHER; note = 2'-O-Methyl-adenosine
  modified_base 37: mod_base = OTHER; note = 2'-O-Methyl-uridine
  modified_base 38: mod_base = OTHER; note = 2'-O-Methyl-adenosine
  modified_base 39: mod_base = OTHER; note = 2'-O-Methyl-guanosine
  modified_base 40: mod_base = OTHER; note = 2'-O-Methyl-cytidine
  modified_base 41: mod_base = OTHER; note = 2'-O-Methyl-adenosine
  modified_base 42: mod_base = OTHER; note = 2'-O-Methyl-adenosine
  modified_base 46: mod_base = OTHER; note = 2'-O-Methyl-adenosine
  modified_base 48: mod_base = OTHER; note = 2'-O-Methyl-adenosine
  modified_base 50: mod_base = OTHER; note = 2'-O-Methyl-uridine
  modified_base 52: mod_base = OTHER; note = 2'-O-Methyl-adenosine
  modified_base 53: mod_base = OTHER; note = 2'-O-Methyl-guanosine
  modified_base 54: mod_base = OTHER; note = 2'-O-Methyl-guanosine
  modified_base 55: mod_base = OTHER; note = 2'-O-Methyl-cytidine
  modified_base 56: mod_base = OTHER; note = 2'-O-Methyl-uridine
  modified_base 57: mod_base = OTHER; note = 2'-O-Methyl-adenosine
  modified_base 60: mod_base = OTHER; note = 2'-O-Methyl-cytidine
  modified_base 61: mod_base = OTHER; note = 2'-O-Methyl-cytidine
  modified_base 64: mod_base = OTHER; note = uridine phosphorothioate
  modified_base 66: mod_base = OTHER; note = 2'-O-Methyl-uridine
  modified_base 67: mod_base = OTHER; note = 2'-O-Methyl-cytidine
  modified_base 70: mod_base = OTHER; note = 2'-O-Methyl-cytidine
  modified_base 71: mod_base = OTHER; note = 2'-O-Methyl-uridine
  modified_base 72: mod_base = OTHER; note = 2'-O-Methyl-uridine
  modified_base 73: mod_base = OTHER; note = 2'-O-Methyl-guanosine
  modified_base 74: mod_base = OTHER; note = 2'-O-Methyl-adenosine
  modified_base 75: mod_base = OTHER; note = 2'-O-Methyl-adenosine
  modified_base 76: mod_base = OTHER; note = 2'-O-Methyl-adenosine
  modified_base 77: mod_base = OTHER; note = 2'-O-Methyl-adenosine
  modified_base 78: mod_base = OTHER; note = 2'-O-Methyl-adenosine
  modified_base 79: mod_base = OTHER; note = 2'-O-Methyl-guanosine
  modified_base 80: mod_base = OTHER; note = 2'-O-Methyl-uridine
  modified_base 81: mod_base = OTHER; note = 2'-O-Methyl-guanosine
  modified_base 83: mod_base = OTHER; note = 2'-O-Methyl-cytidine
  modified_base 84: mod_base = OTHER; note = 2'-O-Methyl-adenosine
  modified_base 85: mod_base = OTHER; note = 2'-O-Methyl-cytidine
  modified_base 86: mod_base = OTHER; note = 2'-O-Methyl-cytidine
  modified_base 87: mod_base = OTHER; note = 2'-O-Methyl-guanosine
  modified_base 88: mod_base = OTHER; note = 2'-O-Methyl-adenosine
  modified_base 89: mod_base = OTHER; note = 2'-O-Methyl-guanosine
  modified_base 90: mod_base = OTHER; note = 2'-O-Methyl-uridine
  modified_base 91: mod_base = OTHER; note = 2'-O-Methyl-cytidine
  modified_base 92: mod_base = OTHER; note = 2'-O-Methyl-guanosine
  modified_base 93: mod_base = OTHER; note = 2'-O-Methyl-guanosine
  modified_base 94: mod_base = OTHER; note = 2'-O-Methyl-uridine
  modified_base 95: mod_base = OTHER; note = 2'-O-Methyl-guanosine
  modified_base 96: mod_base = OTHER; note = 2'-O-Methyl-cytidine
  modified_base 97: mod_base = OTHER; note = 2'-O-Methyl-uridine phosphorothioate
  modified_base 98: mod_base = OTHER; note = 2'-O-Methyl-uridine phosphorothioate
  modified_base 99: mod_base = OTHER; note = 2'-O-Methyl-uridine phosphorothioate
  modified_base 100: mod_base = OTHER; note = 2'-O-Methyl-uridine

SEQ ID NO: 2512 - RNA, 103 nt, synthetic construct; identical to SEQ ID NO: 1699
  source 1..103: mol_type = other RNA
  modified_base 1: mod_base = OTHER; note = 2'-O-Methyl-guanosine phosphorothioate
  modified_base 2: mod_base = OTHER; note = 2'-O-Methyl-adenosine phosphorothioate
  modified_base 3: mod_base = OTHER; note = 2'-O-Methyl-guanosine
  modified_base 21: mod_base = OTHER; note = 2'-O-Methyl-guanosine
  modified_base 28: mod_base = OTHER; note = 2'-O-Methyl-adenosine
  modified_base 29: mod_base = OTHER; note = 2'-O-Methyl-guanosine
  modified_base 30: mod_base = OTHER; note = 2'-O-Methyl-cytidine
  modified_base 31: mod_base = OTHER; note = 2'-O-Methyl-uridine
  modified_base 32: mod_base = OTHER; note = 2'-O-Methyl-adenosine
  modified_base 34: mod_base = OTHER; note = 2'-O-Methyl-adenosine
  modified_base 35: mod_base = OTHER; note = 2'-O-Methyl-adenosine
  modified_base 36: mod_base = OTHER; note = 2'-O-Methyl-adenosine
  modified_base 37: mod_base = OTHER; note = 2'-O-Methyl-uridine
  modified_base 38: mod_base = OTHER; note = 2'-O-Methyl-adenosine
  modified_base 39: mod_base = OTHER; note = 2'-O-Methyl-guanosine
  modified_base 40: mod_base = OTHER; note = 2'-O-Methyl-cytidine
  modified_base 41: mod_base = OTHER; note = 2'-O-Methyl-adenosine
  modified_base 42: mod_base = OTHER; note = 2'-O-Methyl-adenosine
  modified_base 46: mod_base = OTHER; note = 2'-O-Methyl-adenosine
  modified_base 48: mod_base = OTHER; note = 2'-O-Methyl-adenosine
  modified_base 50: mod_base = OTHER; note = 2'-O-Methyl-uridine
  modified_base 52: mod_base = OTHER; note = 2'-O-Methyl-adenosine
  modified_base 53: mod_base = OTHER; note = 2'-O-Methyl-guanosine
  modified_base 54: mod_base = OTHER; note = 2'-O-Methyl-guanosine
  modified_base 55: mod_base = OTHER; note = 2'-O-Methyl-cytidine
  modified_base 56: mod_base = OTHER; note = 2'-O-Methyl-uridine
  modified_base 57: mod_base = OTHER; note = 2'-O-Methyl-adenosine
  modified_base 60: mod_base = OTHER; note = 2'-O-Methyl-cytidine
  modified_base 61: mod_base = OTHER; note = 2'-O-Methyl-cytidine
  modified_base 64: mod_base = OTHER; note = uridine phosphorothioate
  modified_base 66: mod_base = OTHER; note = 2'-O-Methyl-uridine
  modified_base 67: mod_base = OTHER; note = 2'-O-Methyl-cytidine
  modified_base 70: mod_base = OTHER; note = 2'-O-Methyl-cytidine
  modified_base 71: mod_base = OTHER; note = 2'-O-Methyl-uridine
  modified_base 72: mod_base = OTHER; note = 2'-O-Methyl-uridine
  modified_base 74: mod_base = OTHER; note = 2'-O-Methyl-adenosine
  modified_base 75: mod_base = OTHER; note = 2'-O-Methyl-adenosine
  modified_base 76: mod_base = OTHER; note = 2'-O-Methyl-adenosine
  modified_base 77: mod_base = OTHER; note = 2'-O-Methyl-adenosine
  modified_base 78: mod_base = OTHER; note = 2'-O-Methyl-adenosine
  modified_base 79: mod_base = OTHER; note = 2'-O-Methyl-guanosine
  modified_base 80: mod_base = OTHER; note = 2'-O-Methyl-uridine
  modified_base 81: mod_base = OTHER; note = 2'-O-Methyl-guanosine
  modified_base 83: mod_base = OTHER; note = 2'-O-Methyl-cytidine
  modified_base 84: mod_base = OTHER; note = 2'-O-Methyl-adenosine
  modified_base 85: mod_base = OTHER; note = 2'-O-Methyl-cytidine
  modified_base 86: mod_base = OTHER; note = 2'-O-Methyl-cytidine
  modified_base 87: mod_base = OTHER; note = 2'-O-Methyl-guanosine
  modified_base 88: mod_base = OTHER; note = 2'-O-Methyl-adenosine
  modified_base 89: mod_base = OTHER; note = 2'-O-Methyl-guanosine
  modified_base 90: mod_base = OTHER; note = 2'-O-Methyl-uridine
  modified_base 91: mod_base = OTHER; note = 2'-O-Methyl-cytidine
  modified_base 92: mod_base = OTHER; note = 2'-O-Methyl-guanosine
  modified_base 93: mod_base = OTHER; note = 2'-O-Methyl-guanosine
  modified_base 94: mod_base = OTHER; note = 2'-O-Methyl-uridine
  modified_base 95: mod_base = OTHER; note = 2'-O-Methyl-guanosine
  modified_base 96: mod_base = OTHER; note = 2'-O-Methyl-cytidine
  modified_base 97: mod_base = OTHER; note = 2'-O-Methyl-uridine phosphorothioate
  modified_base 98: mod_base = OTHER; note = 2'-O-Methyl-uridine phosphorothioate
  modified_base 99: mod_base = OTHER; note = 2'-O-Methyl-uridine phosphorothioate
  modified_base 100: mod_base = OTHER; note = 2'-O-Methyl-uridine

SEQ ID NO: 2513 - RNA, 103 nt, synthetic construct; identical to SEQ ID NO: 1700
  source 1..103: mol_type = other RNA
  modified_base 1: mod_base = OTHER; note = 2'-O-Methyl-cytidine phosphorothioate
  modified_base 2: mod_base = OTHER; note = 2'-O-Methyl-adenosine phosphorothioate
  modified_base 3: mod_base = OTHER; note = 2'-O-Methyl-guanosine
  modified_base 21: mod_base = OTHER; note = 2'-O-Methyl-guanosine
  modified_base 28: mod_base = OTHER; note = 2'-O-Methyl-adenosine
  modified_base 29: mod_base = OTHER; note = 2'-O-Methyl-guanosine
  modified_base 30: mod_base = OTHER; note = 2'-O-Methyl-cytidine
  modified_base 31: mod_base = OTHER; note = 2'-O-Methyl-uridine
  modified_base 32: mod_base = OTHER; note = 2'-O-Methyl-adenosine
  modified_base 33: mod_base = OTHER; note = 2'-O-Methyl-guanosine
  modified_base 34: mod_base = OTHER; note = 2'-O-Methyl-adenosine
  modified_base 35: mod_base = OTHER; note = 2'-O-Methyl-adenosine
  modified_base 36: mod_base = OTHER; note = 2'-O-Methyl-adenosine
  modified_base 37: mod_base = OTHER; note = 2'-O-Methyl-uridine
  modified_base 38: mod_base = OTHER; note = 2'-O-Methyl-adenosine
  modified_base 39: mod_base = OTHER; note = 2'-O-Methyl-guanosine
  modified_base 40: mod_base = OTHER; note = 2'-O-Methyl-cytidine
  modified_base 41: mod_base = OTHER; note = 2'-O-Methyl-adenosine
  modified_base 42: mod_base = OTHER; note = 2'-O-Methyl-adenosine
  modified_base 46: mod_base = OTHER; note = 2'-O-Methyl-adenosine
  modified_base 48: mod_base = OTHER; note = 2'-O-Methyl-adenosine
  modified_base 50: mod_base = OTHER; note = 2'-O-Methyl-uridine
  modified_base 52: mod_base = OTHER; note = 2'-O-Methyl-adenosine
  modified_base 53: mod_base = OTHER; note = 2'-O-Methyl-guanosine
  modified_base 54: mod_base = OTHER; note = 2'-O-Methyl-guanosine
  modified_base 57: mod_base = OTHER; note = 2'-O-Methyl-adenosine
  modified_base 61: mod_base = OTHER; note = 2'-O-Methyl-cytidine
  modified_base 64: mod_base = OTHER; note = uridine phosphorothioate
  modified_base 66: mod_base = OTHER; note = 2'-O-Methyl-uridine
  modified_base 67: mod_base = OTHER; note = 2'-O-Methyl-cytidine
  modified_base 70: mod_base = OTHER; note = 2'-O-Methyl-cytidine
  modified_base 71: mod_base = OTHER; note = 2'-O-Methyl-uridine
  modified_base 72: mod_base = OTHER; note = 2'-O-Methyl-uridine
  modified_base 74: mod_base = OTHER; note = 2'-O-Methyl-adenosine
  modified_base 75: mod_base = OTHER; note = 2'-O-Methyl-adenosine
  modified_base 76: mod_base = OTHER; note = 2'-O-Methyl-adenosine
  modified_base 77: mod_base = OTHER; note = 2'-O-Methyl-adenosine
  modified_base 78: mod_base = OTHER; note = 2'-O-Methyl-adenosine
  modified_base 79: mod_base = OTHER; note = 2'-O-Methyl-guanosine
  modified_base 80: mod_base = OTHER; note = 2'-O-Methyl-uridine
  modified_base 82: mod_base = OTHER; note = 2'-O-Methyl-guanosine
  modified_base 83: mod_base = OTHER; note = 2'-O-Methyl-cytidine
  modified_base 84: mod_base = OTHER; note = 2'-O-Methyl-adenosine
  modified_base 85: mod_base = OTHER; note = 2'-O-Methyl-cytidine
  modified_base 86: mod_base = OTHER; note = 2'-O-Methyl-cytidine
  modified_base 87: mod_base = OTHER; note = 2'-O-Methyl-guanosine
  modified_base 89: mod_base = OTHER; note = 2'-O-Methyl-guanosine
  modified_base 92: mod_base = OTHER; note = 2'-O-Methyl-guanosine
  modified_base 93: mod_base = OTHER; note = 2'-O-Methyl-guanosine
  modified_base 94: mod_base = OTHER; note = 2'-O-Methyl-uridine
  modified_base 95: mod_base = OTHER; note = 2'-O-Methyl-guanosine
  modified_base 96: mod_base = OTHER; note = 2'-O-Methyl-cytidine
  modified_base 97: mod_base = OTHER; note = 2'-O-Methyl-uridine phosphorothioate
  modified_base 98: mod_base = OTHER; note = 2'-O-Methyl-uridine phosphorothioate
  modified_base 99: mod_base = OTHER; note = 2'-O-Methyl-uridine phosphorothioate
  modified_base 100: mod_base = OTHER; note = 2'-O-Methyl-uridine

SEQ ID NO: 2514 - RNA, 103 nt, synthetic construct; identical to SEQ ID NO: 1700
  source 1..103: mol_type = other RNA
  modified_base 1: mod_base = OTHER; note = 2'-O-Methyl-cytidine phosphorothioate
  modified_base 2: mod_base = OTHER; note = 2'-O-Methyl-adenosine phosphorothioate
  modified_base 3: mod_base = OTHER; note = 2'-O-Methyl-guanosine
  modified_base 21: mod_base = OTHER; note = 2'-O-Methyl-guanosine
  modified_base 28: mod_base = OTHER; note = 2'-O-Methyl-adenosine
  modified_base 29: mod_base = OTHER; note = 2'-O-Methyl-guanosine
  modified_base 30: mod_base = OTHER; note = 2'-O-Methyl-cytidine
  modified_base 31: mod_base = OTHER; note = 2'-O-Methyl-uridine
  modified_base 32: mod_base = OTHER; note = 2'-O-Methyl-adenosine
  modified_base 33: mod_base = OTHER; note = 2'-O-Methyl-guanosine
  modified_base 34: mod_base = OTHER; note = 2'-O-Methyl-adenosine
  modified_base 35: mod_base = OTHER; note = 2'-O-Methyl-adenosine
  modified_base 36: mod_base = OTHER; note = 2'-O-Methyl-adenosine
  modified_base 37: mod_base = OTHER; note = 2'-O-Methyl-uridine
  modified_base 38: mod_base = OTHER; note = 2'-O-Methyl-adenosine
  modified_base 39: mod_base = OTHER; note = 2'-O-Methyl-guanosine
  modified_base 40: mod_base = OTHER; note = 2'-O-Methyl-cytidine
  modified_base 41: mod_base = OTHER; note = 2'-O-Methyl-adenosine
  modified_base 42: mod_base = OTHER; note = 2'-O-Methyl-adenosine
  modified_base 46: mod_base = OTHER; note = 2'-O-Methyl-adenosine
  modified_base 48: mod_base = OTHER; note = 2'-O-Methyl-adenosine
  modified_base 50: mod_base = OTHER; note = 2'-O-Methyl-uridine
  modified_base 52: mod_base = OTHER; note = 2'-O-Methyl-adenosine
  modified_base 53: mod_base = OTHER; note = 2'-O-Methyl-guanosine
  modified_base 54: mod_base = OTHER; note = 2'-O-Methyl-guanosine
  modified_base 55: mod_base = OTHER; note = 2'-O-Methyl-cytidine
  modified_base 56: mod_base = OTHER; note = 2'-O-Methyl-uridine
  modified_base 57: mod_base = OTHER; note = 2'-O-Methyl-adenosine
  modified_base 60: mod_base = OTHER; note = 2'-O-Methyl-cytidine
  modified_base 61: mod_base = OTHER; note = 2'-O-Methyl-cytidine
  modified_base 64: mod_base = OTHER; note = uridine phosphorothioate
  modified_base 66: mod_base = OTHER; note = 2'-O-Methyl-uridine
  modified_base 67: mod_base = OTHER; note = 2'-O-Methyl-cytidine
  modified_base 70: mod_base = OTHER; note = 2'-O-Methyl-cytidine
  modified_base 71: mod_base = OTHER; note = 2'-O-Methyl-uridine
  modified_base 72: mod_base = OTHER; note = 2'-O-Methyl-uridine
  modified_base 74: mod_base = OTHER; note = 2'-O-Methyl-adenosine
  modified_base 75: mod_base = OTHER; note = 2'-O-Methyl-adenosine
  modified_base 76: mod_base = OTHER; note = 2'-O-Methyl-adenosine
  modified_base 77: mod_base = OTHER; note = 2'-O-Methyl-adenosine
  modified_base 78: mod_base = OTHER; note = 2'-O-Methyl-adenosine
  modified_base 79: mod_base = OTHER; note = 2'-O-Methyl-guanosine
  modified_base 80: mod_base = OTHER; note = 2'-O-Methyl-uridine
  modified_base 82: mod_base = OTHER; note = 2'-O-Methyl-guanosine
  modified_base 83: mod_base = OTHER; note = 2'-O-Methyl-cytidine
  modified_base 84: mod_base = OTHER; note = 2'-O-Methyl-adenosine
  modified_base 85: mod_base = OTHER; note = 2'-O-Methyl-cytidine
  modified_base 86: mod_base = OTHER; note = 2'-O-Methyl-cytidine
  modified_base 87: mod_base = OTHER; note = 2'-O-Methyl-guanosine
  modified_base 89: mod_base = OTHER; note = 2'-O-Methyl-guanosine
  modified_base 92: mod_base = OTHER; note = 2'-O-Methyl-guanosine
  modified_base 93: mod_base = OTHER; note = 2'-O-Methyl-guanosine
  modified_base 94: mod_base = OTHER; note = 2'-O-Methyl-uridine
  modified_base 95: mod_base = OTHER; note = 2'-O-Methyl-guanosine
  modified_base 96: mod_base = OTHER; note = 2'-O-Methyl-cytidine
  modified_base 97: mod_base = OTHER; note = 2'-O-Methyl-uridine phosphorothioate
  modified_base 98: mod_base = OTHER; note = 2'-O-Methyl-uridine phosphorothioate
  modified_base 99: mod_base = OTHER; note = 2'-O-Methyl-uridine phosphorothioate
  modified_base 100: mod_base = OTHER; note = 2'-O-Methyl-uridine

SEQ ID NO: 2515 - RNA, 103 nt, synthetic construct; identical to SEQ ID NO: 1700
  source 1..103: mol_type = other RNA
  modified_base 1: mod_base = OTHER; note = 2'-O-Methyl-cytidine phosphorothioate
  modified_base 2: mod_base = OTHER; note = 2'-O-Methyl-adenosine phosphorothioate
  modified_base 3: mod_base = OTHER; note = 2'-O-Methyl-guanosine
  modified_base 21: mod_base = OTHER; note = 2'-O-Methyl-guanosine
  modified_base 28: mod_base = OTHER; note = 2'-O-Methyl-adenosine
  modified_base 29: mod_base = OTHER; note = 2'-O-Methyl-guanosine
  modified_base 30: mod_base = OTHER; note = 2'-O-Methyl-cytidine
  modified_base 31: mod_base = OTHER; note = 2'-O-Methyl-uridine
  modified_base 32: mod_base = OTHER; note = 2'-O-Methyl-adenosine
  modified_base 33: mod_base = OTHER; note = 2'-O-Methyl-guanosine
  modified_base 34: mod_base = OTHER; note = 2'-O-Methyl-adenosine
  modified_base 35: mod_base = OTHER; note = 2'-O-Methyl-adenosine
  modified_base 36: mod_base = OTHER; note = 2'-O-Methyl-adenosine
  modified_base 37: mod_base = OTHER; note = 2'-O-Methyl-uridine
  modified_base 38: mod_base = OTHER; note = 2'-O-Methyl-adenosine
  modified_base 39: mod_base = OTHER; note = 2'-O-Methyl-guanosine
  modified_base 40: mod_base = OTHER; note = 2'-O-Methyl-cytidine
  modified_base 41: mod_base = OTHER; note = 2'-O-Methyl-adenosine
  modified_base 42: mod_base = OTHER; note = 2'-O-Methyl-adenosine
  modified_base 46: mod_base = OTHER; note = 2'-O-Methyl-adenosine
  modified_base 48: mod_base = OTHER; note = 2'-O-Methyl-adenosine
  modified_base 50: mod_base = OTHER; note = 2'-O-Methyl-uridine
  modified_base 52: mod_base = OTHER; note = 2'-O-Methyl-adenosine
  modified_base 53: mod_base = OTHER; note = 2'-O-Methyl-guanosine
  modified_base 54: mod_base = OTHER; note = 2'-O-Methyl-guanosine
  modified_base 57: mod_base = OTHER; note = 2'-O-Methyl-adenosine
  modified_base 61: mod_base = OTHER; note = 2'-O-Methyl-cytidine
  modified_base 64: mod_base = OTHER; note = uridine phosphorothioate
  modified_base 66: mod_base = OTHER; note = 2'-O-Methyl-uridine
  modified_base 67: mod_base = OTHER; note = 2'-O-Methyl-cytidine
  modified_base 70: mod_base = OTHER; note = 2'-O-Methyl-cytidine
  modified_base 71: mod_base = OTHER; note = 2'-O-Methyl-uridine
  modified_base 72: mod_base = OTHER; note = 2'-O-Methyl-uridine
  modified_base 73: mod_base = OTHER; note = 2'-O-Methyl-guanosine
  modified_base 74: mod_base = OTHER; note = 2'-O-Methyl-adenosine
  modified_base 75: mod_base = OTHER; note = 2'-O-Methyl-adenosine
  modified_base 76: mod_base = OTHER; note = 2'-O-Methyl-adenosine
  modified_base 77: mod_base = OTHER; note = 2'-O-Methyl-adenosine
  modified_base 78: mod_base = OTHER; note = 2'-O-Methyl-adenosine
  modified_base 79: mod_base = OTHER; note = 2'-O-Methyl-guanosine
  modified_base 80: mod_base = OTHER; note = 2'-O-Methyl-uridine
  modified_base 82: mod_base = OTHER; note = 2'-O-Methyl-guanosine
  modified_base 83: mod_base = OTHER; note = 2'-O-Methyl-cytidine
  modified_base 84: mod_base = OTHER; note = 2'-O-Methyl-adenosine
  modified_base 85: mod_base = OTHER; note = 2'-O-Methyl-cytidine
  modified_base 86: mod_base = OTHER; note = 2'-O-Methyl-cytidine
  modified_base 87: mod_base = OTHER; note = 2'-O-Methyl-guanosine
  modified_base 89: mod_base = OTHER; note = 2'-O-Methyl-guanosine
  modified_base 92: mod_base = OTHER; note = 2'-O-Methyl-guanosine
  modified_base 93: mod_base = OTHER; note = 2'-O-Methyl-guanosine
  modified_base 94: mod_base = OTHER; note = 2'-O-Methyl-uridine
  modified_base 95: mod_base = OTHER; note = 2'-O-Methyl-guanosine
  modified_base 96: mod_base = OTHER; note = 2'-O-Methyl-cytidine
  modified_base 97: mod_base = OTHER; note = 2'-O-Methyl-uridine phosphorothioate
  modified_base 98: mod_base = OTHER; note = 2'-O-Methyl-uridine phosphorothioate
  modified_base 99: mod_base = OTHER; note = 2'-O-Methyl-uridine phosphorothioate
  modified_base 100: mod_base = OTHER; note = 2'-O-Methyl-uridine

SEQ ID NO: 2516 - RNA, 103 nt, synthetic construct; identical to SEQ ID NO: 1700
  source 1..103: mol_type = other RNA
  modified_base 1: mod_base = OTHER; note = 2'-O-Methyl-cytidine phosphorothioate
  modified_base 2: mod_base = OTHER; note = 2'-O-Methyl-adenosine phosphorothioate
  modified_base 3: mod_base = OTHER; note = 2'-O-Methyl-guanosine
  modified_base 21: mod_base = OTHER; note = 2'-O-Methyl-guanosine
  modified_base 28: mod_base = OTHER; note = 2'-O-Methyl-adenosine
  modified_base 29: mod_base = OTHER; note = 2'-O-Methyl-guanosine
  modified_base 30: mod_base = OTHER; note = 2'-O-Methyl-cytidine
  modified_base 31: mod_base = OTHER; note = 2'-O-Methyl-uridine
  modified_base 32: mod_base = OTHER; note = 2'-O-Methyl-adenosine
  modified_base 33: mod_base = OTHER; note = 2'-O-Methyl-guanosine
  modified_base 34: mod_base = OTHER; note = 2'-O-Methyl-adenosine
  modified_base 35: mod_base = OTHER; note = 2'-O-Methyl-adenosine
  modified_base 36: mod_base = OTHER; note = 2'-O-Methyl-adenosine
  modified_base 37: mod_base = OTHER; note = 2'-O-Methyl-uridine
  modified_base 38: mod_base = OTHER; note = 2'-O-Methyl-adenosine
  modified_base 39: mod_base = OTHER; note = 2'-O-Methyl-guanosine
  modified_base 40: mod_base = OTHER; note = 2'-O-Methyl-cytidine
  modified_base 41: mod_base = OTHER; note = 2'-O-Methyl-adenosine
  modified_base 42: mod_base = OTHER; note = 2'-O-Methyl-adenosine
  modified_base 46: mod_base = OTHER; note = 2'-O-Methyl-adenosine
  modified_base 48: mod_base = OTHER; note = 2'-O-Methyl-adenosine
  modified_base 50: mod_base = OTHER; note = 2'-O-Methyl-uridine
  modified_base 52: mod_base = OTHER; note = 2'-O-Methyl-adenosine
  modified_base 53: mod_base = OTHER; note = 2'-O-Methyl-guanosine
  modified_base 54: mod_base = OTHER; note = 2'-O-Methyl-guanosine
  modified_base 57: mod_base = OTHER; note = 2'-O-Methyl-adenosine
  modified_base 61: mod_base = OTHER; note = 2'-O-Methyl-cytidine
  modified_base 64: mod_base = OTHER; note = uridine phosphorothioate
  modified_base 66: mod_base = OTHER; note = 2'-O-Methyl-uridine
  modified_base 67: mod_base = OTHER; note = 2'-O-Methyl-cytidine
  modified_base 70: mod_base = OTHER; note = 2'-O-Methyl-cytidine
  modified_base 71: mod_base = OTHER; note = 2'-O-Methyl-uridine
  modified_base 72: mod_base = OTHER; note = 2'-O-Methyl-uridine
  modified_base 73: mod_base = OTHER; note = 2'-O-Methyl-guanosine
  modified_base 74: mod_base = OTHER; note = 2'-O-Methyl-adenosine
  modified_base 75: mod_base = OTHER; note = 2'-O-Methyl-adenosine
  modified_base 76: mod_base = OTHER; note = 2'-O-Methyl-adenosine
  modified_base 77: mod_base = OTHER; note = 2'-O-Methyl-adenosine
  modified_base 78: mod_base = OTHER; note = 2'-O-Methyl-adenosine
  modified_base 79: mod_base = OTHER; note = 2'-O-Methyl-guanosine
  modified_base 80: mod_base = OTHER; note = 2'-O-Methyl-uridine
  modified_base 82: mod_base = OTHER; note = 2'-O-Methyl-guanosine
  modified_base 83: mod_base = OTHER; note = 2'-O-Methyl-cytidine
  modified_base 84: mod_base = OTHER; note = 2'-O-Methyl-adenosine
  modified_base 85: mod_base = OTHER; note = 2'-O-Methyl-cytidine
  modified_base 86: mod_base = OTHER; note = 2'-O-Methyl-cytidine
  modified_base 87: mod_base = OTHER; note = 2'-O-Methyl-guanosine
  modified_base 89: mod_base = OTHER; note = 2'-O-Methyl-guanosine
  modified_base 91: mod_base = OTHER; note = 2'-O-Methyl-cytidine
  modified_base 92: mod_base = OTHER; note = 2'-O-Methyl-guanosine
  modified_base 93: mod_base = OTHER; note = 2'-O-Methyl-guanosine
  modified_base 94: mod_base = OTHER; note = 2'-O-Methyl-uridine
  modified_base 95: mod_base = OTHER; note = 2'-O-Methyl-guanosine
  modified_base 96: mod_base = OTHER; note = 2'-O-Methyl-cytidine
  modified_base 97: mod_base = OTHER; note = 2'-O-Methyl-uridine phosphorothioate
  modified_base 98: mod_base = OTHER; note = 2'-O-Methyl-uridine phosphorothioate
  modified_base 99: mod_base = OTHER; note = 2'-O-Methyl-uridine phosphorothioate
  modified_base 100: mod_base = OTHER; note = 2'-O-Methyl-uridine

SEQ ID NO: 2517 - RNA, 103 nt, synthetic construct; identical to SEQ ID NO: 1700
  source 1..103: mol_type = other RNA
  modified_base 1: mod_base = OTHER; note = 2'-O-Methyl-cytidine phosphorothioate
  modified_base 2: mod_base = OTHER; note = 2'-O-Methyl-adenosine phosphorothioate
  modified_base 3: mod_base = OTHER; note = 2'-O-Methyl-guanosine
  modified_base 21: mod_base = OTHER; note = 2'-O-Methyl-guanosine
  modified_base 28: mod_base = OTHER; note = 2'-O-Methyl-adenosine
  modified_base 29: mod_base = OTHER; note = 2'-O-Methyl-guanosine
  modified_base 30: mod_base = OTHER; note = 2'-O-Methyl-cytidine
  modified_base 31: mod_base = OTHER; note = 2'-O-Methyl-uridine
  modified_base 32: mod_base = OTHER; note = 2'-O-Methyl-adenosine
  modified_base 34: mod_base = OTHER; note = 2'-O-Methyl-adenosine
  modified_base 35: mod_base = OTHER; note = 2'-O-Methyl-adenosine
  modified_base 36: mod_base = OTHER; note = 2'-O-Methyl-adenosine
  modified_base 37: mod_base = OTHER; note = 2'-O-Methyl-uridine
  modified_base 38: mod_base = OTHER; note = 2'-O-Methyl-adenosine
  modified_base 39: mod_base = OTHER; note = 2'-O-Methyl-guanosine
  modified_base 40: mod_base = OTHER; note = 2'-O-Methyl-cytidine
  modified_base 41: mod_base = OTHER; note = 2'-O-Methyl-adenosine
  modified_base 42: mod_base = OTHER; note = 2'-O-Methyl-adenosine
  modified_base 46: mod_base = OTHER; note = 2'-O-Methyl-adenosine
  modified_base 48: mod_base = OTHER; note = 2'-O-Methyl-adenosine
  modified_base 50: mod_base = OTHER; note = 2'-O-Methyl-uridine
  modified_base 52: mod_base = OTHER; note = 2'-O-Methyl-adenosine
  modified_base 53: mod_base = OTHER; note = 2'-O-Methyl-guanosine
  modified_base 54: mod_base = OTHER; note = 2'-O-Methyl-guanosine
  modified_base 57: mod_base = OTHER; note = 2'-O-Methyl-adenosine
  modified_base 61: mod_base = OTHER; note = 2'-O-Methyl-cytidine
  modified_base 64: mod_base = OTHER; note = uridine phosphorothioate
  modified_base 66: mod_base = OTHER; note = 2'-O-Methyl-uridine
  modified_base 67: mod_base = OTHER; note = 2'-O-Methyl-cytidine
  modified_base 70: mod_base = OTHER; note = 2'-O-Methyl-cytidine
  modified_base 71: mod_base = OTHER; note = 2'-O-Methyl-uridine
  modified_base 72: mod_base = OTHER; note = 2'-O-Methyl-uridine
  modified_base 73: mod_base = OTHER; note = 2'-O-Methyl-guanosine
  modified_base 74: mod_base = OTHER; note = 2'-O-Methyl-adenosine
  modified_base 75: mod_base = OTHER; note = 2'-O-Methyl-adenosine
  modified_base 76: mod_base = OTHER; note = 2'-O-Methyl-adenosine
  modified_base 77: mod_base = OTHER; note = 2'-O-Methyl-adenosine
  modified_base 78: mod_base = OTHER; note = 2'-O-Methyl-adenosine
  modified_base 79: mod_base = OTHER; note = 2'-O-Methyl-guanosine
  modified_base 80: mod_base = OTHER; note = 2'-O-Methyl-uridine
  modified_base 82: mod_base = OTHER; note = 2'-O-Methyl-guanosine
  modified_base 83: mod_base = OTHER; note = 2'-O-Methyl-cytidine
  modified_base 84: mod_base = OTHER; note = 2'-O-Methyl-adenosine
  modified_base 85: mod_base = OTHER; note = 2'-O-Methyl-cytidine
  modified_base 86: mod_base = OTHER; note = 2'-O-Methyl-cytidine
  modified_base 87: mod_base = OTHER; note = 2'-O-Methyl-guanosine
  modified_base 89: mod_base = OTHER; note = 2'-O-Methyl-guanosine
  modified_base 92: mod_base = OTHER; note = 2'-O-Methyl-guanosine
  modified_base 93: mod_base = OTHER; note = 2'-O-Methyl-guanosine
  modified_base 94: mod_base = OTHER; note = 2'-O-Methyl-uridine
  modified_base 95: mod_base = OTHER; note = 2'-O-Methyl-guanosine
  modified_base 96: mod_base = OTHER; note = 2'-O-Methyl-cytidine
  modified_base 97: mod_base = OTHER; note = 2'-O-Methyl-uridine phosphorothioate
  modified_base 98: mod_base = OTHER; note = 2'-O-Methyl-uridine phosphorothioate
  modified_base 99: mod_base = OTHER; note = 2'-O-Methyl-uridine phosphorothioate
  modified_base 100: mod_base = OTHER; note = 2'-O-Methyl-uridine

SEQ ID NO: 2518 - RNA, 103 nt, synthetic construct; identical to SEQ ID NO: 1700
  source 1..103: mol_type = other RNA
  modified_base 1: mod_base = OTHER; note = 2'-O-Methyl-cytidine phosphorothioate
  modified_base 2: mod_base = OTHER; note = 2'-O-Methyl-adenosine phosphorothioate
  modified_base 3: mod_base = OTHER; note = 2'-O-Methyl-guanosine
  modified_base 21: mod_base = OTHER; note = 2'-O-Methyl-guanosine
  modified_base 28: mod_base = OTHER; note = 2'-O-Methyl-adenosine
  modified_base 29: mod_base = OTHER; note = 2'-O-Methyl-guanosine
  modified_base 30: mod_base = OTHER; note = 2'-O-Methyl-cytidine
  modified_base 31: mod_base = OTHER; note = 2'-O-Methyl-uridine
  modified_base 32: mod_base = OTHER; note = 2'-O-Methyl-adenosine
  modified_base 34: mod_base = OTHER; note = 2'-O-Methyl-adenosine
  modified_base 35: mod_base = OTHER; note = 2'-O-Methyl-adenosine
  modified_base 36: mod_base = OTHER; note = 2'-O-Methyl-adenosine
  modified_base 37: mod_base = OTHER; note = 2'-O-Methyl-uridine
  modified_base 38: mod_base = OTHER; note = 2'-O-Methyl-adenosine
  modified_base 39: mod_base = OTHER; note = 2'-O-Methyl-guanosine
  modified_base 40: mod_base = OTHER; note = 2'-O-Methyl-cytidine
  modified_base 41: mod_base = OTHER; note = 2'-O-Methyl-adenosine
  modified_base 42: mod_base = OTHER; note = 2'-O-Methyl-adenosine
  modified_base 46: mod_base = OTHER; note = 2'-O-Methyl-adenosine
  modified_base 48: mod_base = OTHER; note = 2'-O-Methyl-adenosine
  modified_base 50: mod_base = OTHER; note = 2'-O-Methyl-uridine
  modified_base 52: mod_base = OTHER; note = 2'-O-Methyl-adenosine
  modified_base 53: mod_base = OTHER; note = 2'-O-Methyl-guanosine
  modified_base 54: mod_base = OTHER; note = 2'-O-Methyl-guanosine
  modified_base 57: mod_base = OTHER; note = 2'-O-Methyl-adenosine
  modified_base 61: mod_base = OTHER; note = 2'-O-Methyl-cytidine
  modified_base 64: mod_base = OTHER; note = uridine phosphorothioate
  modified_base 66: mod_base = OTHER; note = 2'-O-Methyl-uridine
  modified_base 67: mod_base = OTHER; note = 2'-O-Methyl-cytidine
  modified_base 70: mod_base = OTHER; note = 2'-O-Methyl-cytidine
  modified_base 71: mod_base = OTHER; note = 2'-O-Methyl-uridine
  modified_base 72: mod_base = OTHER; note = 2'-O-Methyl-uridine
  modified_base 73: mod_base = OTHER; note = 2'-O-Methyl-guanosine
  modified_base 74: mod_base = OTHER; note = 2'-O-Methyl-adenosine
  modified_base 75: mod_base = OTHER; note = 2'-O-Methyl-adenosine
  modified_base 76: mod_base = OTHER; note = 2'-O-Methyl-adenosine
  modified_base 77: mod_base = OTHER; note = 2'-O-Methyl-adenosine
  modified_base 78: mod_base = OTHER; note = 2'-O-Methyl-adenosine
  modified_base 79: mod_base = OTHER; note = 2'-O-Methyl-guanosine
  modified_base 80: mod_base = OTHER; note = 2'-O-Methyl-uridine
  modified_base 82: mod_base = OTHER; note = 2'-O-Methyl-guanosine
  modified_base 83: mod_base = OTHER; note = 2'-O-Methyl-cytidine
  modified_base 84: mod_base = OTHER; note = 2'-O-Methyl-adenosine
  modified_base 85: mod_base = OTHER; note = 2'-O-Methyl-cytidine
  modified_base 86: mod_base = OTHER; note = 2'-O-Methyl-cytidine
  modified_base 87: mod_base = OTHER; note = 2'-O-Methyl-guanosine
  modified_base 89: mod_base = OTHER; note = 2'-O-Methyl-guanosine
  modified_base 91: mod_base = OTHER; note = 2'-O-Methyl-cytidine
  modified_base 92: mod_base = OTHER; note = 2'-O-Methyl-guanosine
  modified_base 93: mod_base = OTHER; note = 2'-O-Methyl-guanosine
  modified_base 94: mod_base = OTHER; note = 2'-O-Methyl-uridine
  modified_base 95: mod_base = OTHER; note = 2'-O-Methyl-guanosine
  modified_base 96: mod_base = OTHER; note = 2'-O-Methyl-cytidine
  modified_base 97: mod_base = OTHER; note = 2'-O-Methyl-uridine phosphorothioate
  modified_base 98: mod_base = OTHER; note = 2'-O-Methyl-uridine phosphorothioate
  modified_base 99: mod_base = OTHER; note = 2'-O-Methyl-uridine phosphorothioate
  modified_base 100: mod_base = OTHER; note = 2'-O-Methyl-uridine

SEQ ID NO: 2519 - RNA, 103 nt, synthetic construct; identical to SEQ ID NO: 1700
  source 1..103: mol_type = other RNA
  modified_base 1: mod_base = OTHER; note = 2'-O-Methyl-cytidine phosphorothioate
  modified_base 2: mod_base = OTHER; note = 2'-O-Methyl-adenosine phosphorothioate
  modified_base 3: mod_base = OTHER; note = 2'-O-Methyl-guanosine
  modified_base 21: mod_base = OTHER; note = 2'-O-Methyl-guanosine
  modified_base 28: mod_base = OTHER; note = 2'-O-Methyl-adenosine
  modified_base 29: mod_base = OTHER; note = 2'-O-Methyl-guanosine
  modified_base 30: mod_base = OTHER; note = 2'-O-Methyl-cytidine
  modified_base 31: mod_base = OTHER; note = 2'-O-Methyl-uridine
  modified_base 32: mod_base = OTHER; note = 2'-O-Methyl-adenosine
  modified_base 34: mod_base = OTHER; note = 2'-O-Methyl-adenosine
  modified_base 35: mod_base = OTHER; note = 2'-O-Methyl-adenosine
  modified_base 36: mod_base = OTHER; note = 2'-O-Methyl-adenosine
  modified_base 37: mod_base = OTHER; note = 2'-O-Methyl-uridine
  modified_base 38: mod_base = OTHER; note = 2'-O-Methyl-adenosine
  modified_base 39: mod_base = OTHER; note = 2'-O-Methyl-guanosine
  modified_base 40: mod_base = OTHER; note = 2'-O-Methyl-cytidine
  modified_base 41: mod_base = OTHER; note = 2'-O-Methyl-adenosine
  modified_base 42: mod_base = OTHER; note = 2'-O-Methyl-adenosine
  modified_base 46: mod_base = OTHER; note = 2'-O-Methyl-adenosine
  modified_base 48: mod_base = OTHER; note = 2'-O-Methyl-adenosine
  modified_base 50: mod_base = OTHER; note = 2'-O-Methyl-uridine
  modified_base 52: mod_base = OTHER; note = 2'-O-Methyl-adenosine
  modified_base 53: mod_base = OTHER; note = 2'-O-Methyl-guanosine
  modified_base 54: mod_base = OTHER; note = 2'-O-Methyl-guanosine
  modified_base 55: mod_base = OTHER; note = 2'-O-Methyl-cytidine
  modified_base 56: mod_base = OTHER; note = 2'-O-Methyl-uridine
  modified_base 57: mod_base = OTHER; note = 2'-O-Methyl-adenosine
  modified_base 60: mod_base = OTHER; note = 2'-O-Methyl-cytidine
  modified_base 61: mod_base = OTHER; note = 2'-O-Methyl-cytidine
  modified_base 64: mod_base = OTHER; note = uridine phosphorothioate
  modified_base 66: mod_base = OTHER; note = 2'-O-Methyl-uridine
  modified_base 67: mod_base = OTHER; note = 2'-O-Methyl-cytidine
  modified_base 70: mod_base = OTHER; note = 2'-O-Methyl-cytidine
  modified_base 71: mod_base = OTHER; note = 2'-O-Methyl-uridine
  modified_base 72: mod_base = OTHER; note = 2'-O-Methyl-uridine
  modified_base 74: mod_base = OTHER; note = 2'-O-Methyl-adenosine
  modified_base 75: mod_base = OTHER; note = 2'-O-Methyl-adenosine
  modified_base 76: mod_base = OTHER; note = 2'-O-Methyl-adenosine
  modified_base 77: mod_base = OTHER; note = 2'-O-Methyl-adenosine
  modified_base 78: mod_base = OTHER; note = 2'-O-Methyl-adenosine
  modified_base 79: mod_base = OTHER; note = 2'-O-Methyl-guanosine
  modified_base 80: mod_base = OTHER; note = 2'-O-Methyl-uridine
  modified_base 82: mod_base = OTHER; note = 2'-O-Methyl-guanosine
  modified_base 83: mod_base = OTHER; note = 2'-O-Methyl-cytidine
  modified_base 84: mod_base = OTHER; note = 2'-O-Methyl-adenosine
  modified_base 85: mod_base = OTHER; note = 2'-O-Methyl-cytidine
  modified_base 86: mod_base = OTHER; note = 2'-O-Methyl-cytidine
  modified_base 87: mod_base = OTHER; note = 2'-O-Methyl-guanosine
  modified_base 89: mod_base = OTHER; note = 2'-O-Methyl-guanosine
  modified_base 92: mod_base = OTHER; note = 2'-O-Methyl-guanosine
  modified_base 93: mod_base = OTHER; note = 2'-O-Methyl-guanosine
  modified_base 94: mod_base = OTHER; note = 2'-O-Methyl-uridine
  modified_base 95: mod_base = OTHER; note = 2'-O-Methyl-guanosine
  modified_base 96: mod_base = OTHER; note = 2'-O-Methyl-cytidine
  modified_base 97: mod_base = OTHER; note = 2'-O-Methyl-uridine phosphorothioate
  modified_base 98: mod_base = OTHER; note = 2'-O-Methyl-uridine phosphorothioate
  modified_base 99: mod_base = OTHER; note = 2'-O-Methyl-uridine phosphorothioate
  modified_base 100: mod_base = OTHER; note = 2'-O-Methyl-uridine

SEQ ID NO: 2520 - RNA, 103 nt, synthetic construct; identical to SEQ ID NO: 1643
  source 1..103: mol_type = other RNA
  modified_base 1: mod_base = OTHER; note = 2'-O-Methyl-cytidine phosphorothioate
  modified_base 2: mod_base = OTHER; note = 2'-O-Methyl-cytidine phosphorothioate
  modified_base 3: mod_base = OTHER; note = 2'-O-Methyl-cytidine
  modified_base 21: mod_base = OTHER; note = 2'-O-Methyl-guanosine
  modified_base 28: mod_base = OTHER; note = 2'-O-Methyl-adenosine
  modified_base 29: mod_base = OTHER; note = 2'-O-Methyl-guanosine
  modified_base 30: mod_base = OTHER; note = 2'-O-Methyl-cytidine
  modified_base 31: mod_base = OTHER; note = 2'-O-Methyl-uridine
  modified_base 32: mod_base = OTHER; note = 2'-O-Methyl-adenosine
  modified_base 33: mod_base = OTHER; note = 2'-O-Methyl-guanosine
  modified_base 34: mod_base = OTHER; note = 2'-O-Methyl-adenosine
  modified_base 35: mod_base = OTHER; note = 2'-O-Methyl-adenosine
  modified_base 36: mod_base = OTHER; note = 2'-O-Methyl-adenosine
  modified_base 37: mod_base = OTHER; note = 2'-O-Methyl-uridine
  modified_base 38: mod_base = OTHER; note = 2'-O-Methyl-adenosine
  modified_base 39: mod_base = OTHER; note = 2'-O-Methyl-guanosine
  modified_base 40: mod_base = OTHER; note = 2'-O-Methyl-cytidine
  modified_base 41: mod_base = OTHER; note = 2'-O-Methyl-adenosine
  modified_base 42: mod_base = OTHER; note = 2'-O-Methyl-adenosine
  modified_base 45: mod_base = OTHER; note = uridine phosphorothioate
  modified_base 46: mod_base = OTHER; note = 2'-O-Methyl-adenosine
  modified_base 48: mod_base = OTHER; note = 2'-O-Methyl-adenosine
  modified_base 50: mod_base = OTHER; note = 2'-O-Methyl-uridine
  modified_base 52: mod_base = OTHER; note = 2'-O-Methyl-adenosine
  modified_base 53: mod_base = OTHER; note = 2'-O-Methyl-guanosine
  modified_base 54: mod_base = OTHER; note = 2'-O-Methyl-guanosine
  modified_base 55: mod_base = OTHER; note = 2'-O-Methyl-cytidine
  modified_base 56: mod_base = OTHER; note = 2'-O-Methyl-uridine
  modified_base 57: mod_base = OTHER; note = 2'-O-Methyl-adenosine
  modified_base 60: mod_base = OTHER; note = 2'-O-Methyl-cytidine
  modified_base 61: mod_base = OTHER; note = 2'-O-Methyl-cytidine
  modified_base 66: mod_base = OTHER; note = 2'-O-Methyl-uridine
  modified_base 67: mod_base = OTHER; note = 2'-O-Methyl-cytidine
  modified_base 70: mod_base = OTHER; note = 2'-O-Methyl-cytidine
  modified_base 71: mod_base = OTHER; note = 2'-O-Methyl-uridine
  modified_base 72: mod_base = OTHER; note = 2'-O-Methyl-uridine
  modified_base 73: mod_base = OTHER; note = 2'-O-Methyl-guanosine
  modified_base 74: mod_base = OTHER; note = 2'-O-Methyl-adenosine
  modified_base 75: mod_base = OTHER; note = 2'-O-Methyl-adenosine
  modified_base 76: mod_base = OTHER; note = 2'-O-Methyl-adenosine
  modified_base 77: mod_base = OTHER; note = 2'-O-Methyl-adenosine
  modified_base 78: mod_base = OTHER; note = 2'-O-Methyl-adenosine
  modified_base 79: mod_base = OTHER; note = 2'-O-Methyl-guanosine
  modified_base 80: mod_base = OTHER; note = 2'-O-Methyl-uridine
  modified_base 81: mod_base = OTHER; note = 2'-O-Methyl-guanosine
  modified_base 83: mod_base = OTHER; note = 2'-O-Methyl-cytidine
  modified_base 84: mod_base = OTHER; note = 2'-O-Methyl-adenosine
  modified_base 85: mod_base = OTHER; note = 2'-O-Methyl-cytidine
  modified_base 86: mod_base = OTHER; note = 2'-O-Methyl-cytidine
  modified_base 87: mod_base = OTHER; note = 2'-O-Methyl-guanosine
  modified_base 88: mod_base = OTHER; note = 2'-O-Methyl-adenosine
  modified_base 89: mod_base = OTHER; note = 2'-O-Methyl-guanosine
  modified_base 90: mod_base = OTHER; note = 2'-O-Methyl-uridine
  modified_base 91: mod_base = OTHER; note = 2'-O-Methyl-cytidine
  modified_base 92: mod_base = OTHER; note = 2'-O-Methyl-guanosine
  modified_base 93: mod_base = OTHER; note = 2'-O-Methyl-guanosine
  modified_base 94: mod_base = OTHER; note = 2'-O-Methyl-uridine
  modified_base 95: mod_base = OTHER; note = 2'-O-Methyl-guanosine
  modified_base 96: mod_base = OTHER; note = 2'-O-Methyl-cytidine
  modified_base 97: mod_base = OTHER; note = 2'-O-Methyl-uridine phosphorothioate
  modified_base 98: mod_base = OTHER; note = 2'-O-Methyl-uridine phosphorothioate
  modified_base 99: mod_base = OTHER; note = 2'-O-Methyl-uridine phosphorothioate
  modified_base 100: mod_base = OTHER; note = 2'-O-Methyl-uridine

SEQ ID NO: 2521 - RNA, 103 nt, synthetic construct; identical to SEQ ID NO: 1643
  source 1..103: mol_type = other RNA
  modified_base 1: mod_base = OTHER; note = 2'-O-Methyl-cytidine phosphorothioate
  modified_base 2: mod_base = OTHER; note = 2'-O-Methyl-cytidine phosphorothioate
  modified_base 3: mod_base = OTHER; note = 2'-O-Methyl-cytidine
  modified_base 21: mod_base = OTHER; note = 2'-O-Methyl-guanosine
  modified_base 28: mod_base = OTHER; note = 2'-O-Methyl-adenosine
  modified_base 29: mod_base = OTHER; note = 2'-O-Methyl-guanosine
  modified_base 30: mod_base = OTHER; note = 2'-O-Methyl-cytidine
  modified_base 31: mod_base = OTHER; note = 2'-O-Methyl-uridine
  modified_base 32: mod_base = OTHER; note = 2'-O-Methyl-adenosine
  modified_base 34: mod_base = OTHER; note = 2'-O-Methyl-adenosine
  modified_base 35: mod_base = OTHER; note = 2'-O-Methyl-adenosine
  modified_base 36: mod_base = OTHER; note = 2'-O-Methyl-adenosine
  modified_base 37: mod_base = OTHER; note = 2'-O-Methyl-uridine
  modified_base 38: mod_base = OTHER; note = 2'-O-Methyl-adenosine
  modified_base 39: mod_base = OTHER; note = 2'-O-Methyl-guanosine
  modified_base 40: mod_base = OTHER; note = 2'-O-Methyl-cytidine
  modified_base 41: mod_base = OTHER; note = 2'-O-Methyl-adenosine
  modified_base 42: mod_base = OTHER; note = 2'-O-Methyl-adenosine
  modified_base 45: mod_base = OTHER; note = uridine phosphorothioate
  modified_base 46: mod_base = OTHER; note = 2'-O-Methyl-adenosine
  modified_base 48: mod_base = OTHER; note = 2'-O-Methyl-adenosine
  modified_base 50: mod_base = OTHER; note = 2'-O-Methyl-uridine
  modified_base 52: mod_base = OTHER; note = 2'-O-Methyl-adenosine
  modified_base 53: mod_base = OTHER; note = 2'-O-Methyl-guanosine
  modified_base 54: mod_base = OTHER; note = 2'-O-Methyl-guanosine
  modified_base 55: mod_base = OTHER; note = 2'-O-Methyl-cytidine
  modified_base 56: mod_base = OTHER; note = 2'-O-Methyl-uridine
  modified_base 57: mod_base = OTHER; note = 2'-O-Methyl-adenosine
  modified_base 60: mod_base = OTHER; note = 2'-O-Methyl-cytidine
  modified_base 61: mod_base = OTHER; note = 2'-O-Methyl-cytidine
  modified_base 66: mod_base = OTHER; note = 2'-O-Methyl-uridine
  modified_base 67: mod_base = OTHER; note = 2'-O-Methyl-cytidine
  modified_base 70: mod_base = OTHER; note = 2'-O-Methyl-cytidine
  modified_base 71: mod_base = OTHER; note = 2'-O-Methyl-uridine
  modified_base 72: mod_base = OTHER; note = 2'-O-Methyl-uridine
  modified_base 74: mod_base = OTHER; note = 2'-O-Methyl-adenosine
  modified_base 75: mod_base = OTHER; note = 2'-O-Methyl-adenosine
  modified_base 76: mod_base = OTHER; note = 2'-O-Methyl-adenosine
  modified_base 77: mod_base = OTHER; note = 2'-O-Methyl-adenosine
  modified_base 78: mod_base = OTHER; note = 2'-O-Methyl-adenosine
  modified_base 79: mod_base = OTHER; note = 2'-O-Methyl-guanosine
  modified_base 80: mod_base = OTHER; note = 2'-O-Methyl-uridine
  modified_base 81: mod_base = OTHER; note = 2'-O-Methyl-guanosine
  modified_base 83: mod_base = OTHER; note = 2'-O-Methyl-cytidine
  modified_base 84: mod_base = OTHER; note = 2'-O-Methyl-adenosine
  modified_base 85: mod_base = OTHER; note = 2'-O-Methyl-cytidine
  modified_base 86: mod_base = OTHER; note = 2'-O-Methyl-cytidine
  modified_base 87: mod_base = OTHER; note = 2'-O-Methyl-guanosine
  modified_base 88: mod_base = OTHER; note = 2'-O-Methyl-adenosine
  modified_base 89: mod_base = OTHER; note = 2'-O-Methyl-guanosine
  modified_base 90: mod_base = OTHER; note = 2'-O-Methyl-uridine
  modified_base 91: mod_base = OTHER; note = 2'-O-Methyl-cytidine
  modified_base 92: mod_base = OTHER; note = 2'-O-Methyl-guanosine
  modified_base 93: mod_base = OTHER; note = 2'-O-Methyl-guanosine
  modified_base 94: mod_base = OTHER; note = 2'-O-Methyl-uridine
  modified_base 95: mod_base = OTHER; note = 2'-O-Methyl-guanosine
  modified_base 96: mod_base = OTHER; note = 2'-O-Methyl-cytidine
  modified_base 97: mod_base = OTHER; note = 2'-O-Methyl-uridine phosphorothioate
  modified_base 98: mod_base = OTHER; note = 2'-O-Methyl-uridine phosphorothioate
  modified_base 99: mod_base = OTHER; note = 2'-O-Methyl-uridine phosphorothioate
  modified_base 100: mod_base = OTHER; note = 2'-O-Methyl-uridine

SEQ ID NO: 2522 - RNA, 103 nt, synthetic construct; identical to SEQ ID NO: 1699
  source 1..103: mol_type = other RNA
  modified_base 1: mod_base = OTHER; note = 2'-O-Methyl-guanosine phosphorothioate
  modified_base 2: mod_base = OTHER; note = 2'-O-Methyl-adenosine phosphorothioate
  modified_base 3: mod_base = OTHER; note = 2'-O-Methyl-guanosine
  modified_base 21: mod_base = OTHER; note = 2'-O-Methyl-guanosine
  modified_base 28: mod_base = OTHER; note = 2'-O-Methyl-adenosine
  modified_base 29: mod_base = OTHER; note = 2'-O-Methyl-guanosine
  modified_base 30: mod_base = OTHER; note = 2'-O-Methyl-cytidine
  modified_base 31: mod_base = OTHER; note = 2'-O-Methyl-uridine
  modified_base 32: mod_base = OTHER; note = 2'-O-Methyl-adenosine
  modified_base 33: mod_base = OTHER; note = 2'-O-Methyl-guanosine
  modified_base 34: mod_base = OTHER; note = 2'-O-Methyl-adenosine
  modified_base 35: mod_base = OTHER; note = 2'-O-Methyl-adenosine
  modified_base 36: mod_base = OTHER; note = 2'-O-Methyl-adenosine
  modified_base 37: mod_base = OTHER; note = 2'-O-Methyl-uridine
  modified_base 38: mod_base = OTHER; note = 2'-O-Methyl-adenosine
  modified_base 39: mod_base = OTHER; note = 2'-O-Methyl-guanosine
  modified_base 40: mod_base = OTHER; note = 2'-O-Methyl-cytidine
  modified_base 41: mod_base = OTHER; note = 2'-O-Methyl-adenosine
  modified_base 42: mod_base = OTHER; note = 2'-O-Methyl-adenosine
  modified_base 45: mod_base = OTHER; note = uridine phosphorothioate
  modified_base 46: mod_base = OTHER; note = 2'-O-Methyl-adenosine
  modified_base 48: mod_base = OTHER; note = 2'-O-Methyl-adenosine
  modified_base 50: mod_base = OTHER; note = 2'-O-Methyl-uridine
  modified_base 52: mod_base = OTHER; note = 2'-O-Methyl-adenosine
  modified_base 53: mod_base = OTHER; note = 2'-O-Methyl-guanosine
  modified_base 54: mod_base = OTHER; note = 2'-O-Methyl-guanosine
  modified_base 55: mod_base = OTHER; note = 2'-O-Methyl-cytidine
  modified_base 56: mod_base = OTHER; note = 2'-O-Methyl-uridine
  modified_base 57: mod_base = OTHER; note = 2'-O-Methyl-adenosine
  modified_base 60: mod_base = OTHER; note = 2'-O-Methyl-cytidine
  modified_base 61: mod_base = OTHER; note = 2'-O-Methyl-cytidine
  modified_base 66: mod_base = OTHER; note = 2'-O-Methyl-uridine
  modified_base 67: mod_base = OTHER; note = 2'-O-Methyl-cytidine
  modified_base 70: mod_base = OTHER; note = 2'-O-Methyl-cytidine
  modified_base 71: mod_base = OTHER; note = 2'-O-Methyl-uridine
  modified_base 72: mod_base = OTHER; note = 2'-O-Methyl-uridine
  modified_base 73: mod_base = OTHER; note = 2'-O-Methyl-guanosine
  modified_base 74: mod_base = OTHER; note = 2'-O-Methyl-adenosine
  modified_base 75: mod_base = OTHER; note = 2'-O-Methyl-adenosine
  modified_base 76: mod_base = OTHER; note = 2'-O-Methyl-adenosine
  modified_base 77: mod_base = OTHER; note = 2'-O-Methyl-adenosine
  modified_base 78: mod_base = OTHER; note = 2'-O-Methyl-adenosine
  modified_base 79: mod_base = OTHER; note = 2'-O-Methyl-guanosine
  modified_base 80: mod_base = OTHER; note = 2'-O-Methyl-uridine
  modified_base 81: mod_base = OTHER; note = 2'-O-Methyl-guanosine
  modified_base 83: mod_base = OTHER; note = 2'-O-Methyl-cytidine
  modified_base 84: mod_base = OTHER; note = 2'-O-Methyl-adenosine
  modified_base 85: mod_base = OTHER; note = 2'-O-Methyl-cytidine
  modified_base 86: mod_base = OTHER; note = 2'-O-Methyl-cytidine
  modified_base 87: mod_base = OTHER; note = 2'-O-Methyl-guanosine
  modified_base 88: mod_base = OTHER; note = 2'-O-Methyl-adenosine
  modified_base 89: mod_base = OTHER; note = 2'-O-Methyl-guanosine
  modified_base 90: mod_base = OTHER; note = 2'-O-Methyl-uridine
  modified_base 91: mod_base = OTHER; note = 2'-O-Methyl-cytidine
  modified_base 92: mod_base = OTHER; note = 2'-O-Methyl-guanosine
  modified_base 93: mod_base = OTHER; note = 2'-O-Methyl-guanosine
  modified_base 94: mod_base = OTHER; note = 2'-O-Methyl-uridine
  modified_base 95: mod_base = OTHER; note = 2'-O-Methyl-guanosine
  modified_base 96: mod_base = OTHER; note = 2'-O-Methyl-cytidine
  modified_base 97: mod_base = OTHER; note = 2'-O-Methyl-uridine phosphorothioate
  modified_base 98: mod_base = OTHER; note = 2'-O-Methyl-uridine phosphorothioate
  modified_base 99: mod_base = OTHER; note = 2'-O-Methyl-uridine phosphorothioate
  modified_base 100: mod_base = OTHER; note = 2'-O-Methyl-uridine

SEQ ID NO: 2523 - RNA, 103 nt, synthetic construct; identical to SEQ ID NO: 1699
  source 1..103: mol_type = other RNA
  modified_base 1: mod_base = OTHER; note = 2'-O-Methyl-guanosine phosphorothioate
  modified_base 2: mod_base = OTHER; note = 2'-O-Methyl-adenosine phosphorothioate
  modified_base 3: mod_base = OTHER; note = 2'-O-Methyl-guanosine
  modified_base 21: mod_base = OTHER; note = 2'-O-Methyl-guanosine
  modified_base 28: mod_base = OTHER; note = 2'-O-Methyl-adenosine
  modified_base 29: mod_base = OTHER; note = 2'-O-Methyl-guanosine
  modified_base 30: mod_base = OTHER; note = 2'-O-Methyl-cytidine
  modified_base 31: mod_base = OTHER; note = 2'-O-Methyl-uridine
  modified_base 32: mod_base = OTHER; note = 2'-O-Methyl-adenosine
  modified_base 34: mod_base = OTHER; note = 2'-O-Methyl-adenosine
  modified_base 35: mod_base = OTHER; note = 2'-O-Methyl-adenosine
  modified_base 36: mod_base = OTHER; note = 2'-O-Methyl-adenosine
  modified_base 37: mod_base = OTHER; note = 2'-O-Methyl-uridine
  modified_base 38: mod_base = OTHER; note = 2'-O-Methyl-adenosine
  modified_base 39: mod_base = OTHER; note = 2'-O-Methyl-guanosine
  modified_base 40: mod_base = OTHER; note = 2'-O-Methyl-cytidine
  modified_base 41: mod_base = OTHER; note = 2'-O-Methyl-adenosine
  modified_base 42: mod_base = OTHER; note = 2'-O-Methyl-adenosine
  modified_base 45: mod_base = OTHER; note = uridine phosphorothioate
  modified_base 46: mod_base = OTHER; note = 2'-O-Methyl-adenosine
  modified_base 48: mod_base = OTHER; note = 2'-O-Methyl-adenosine
  modified_base 50: mod_base = OTHER; note = 2'-O-Methyl-uridine
  modified_base 52: mod_base = OTHER; note = 2'-O-Methyl-adenosine
  modified_base 53: mod_base = OTHER; note = 2'-O-Methyl-guanosine
  modified_base 54: mod_base = OTHER; note = 2'-O-Methyl-guanosine
  modified_base 55: mod_base = OTHER; note = 2'-O-Methyl-cytidine
  modified_base 56: mod_base = OTHER; note = 2'-O-Methyl-uridine
  modified_base 57: mod_base = OTHER; note = 2'-O-Methyl-adenosine
  modified_base 60: mod_base = OTHER; note = 2'-O-Methyl-cytidine
  modified_base 61: mod_base = OTHER; note = 2'-O-Methyl-cytidine
  modified_base 66: mod_base = OTHER; note = 2'-O-Methyl-uridine
  modified_base 67: mod_base = OTHER; note = 2'-O-Methyl-cytidine
  modified_base 70: mod_base = OTHER; note = 2'-O-Methyl-cytidine
  modified_base 71: mod_base = OTHER; note = 2'-O-Methyl-uridine
  modified_base 72: mod_base = OTHER; note = 2'-O-Methyl-uridine
  modified_base 74: mod_base = OTHER; note = 2'-O-Methyl-adenosine
  modified_base 75: mod_base = OTHER; note = 2'-O-Methyl-adenosine
  modified_base 76: mod_base = OTHER; note = 2'-O-Methyl-adenosine
  modified_base 77: mod_base = OTHER; note = 2'-O-Methyl-adenosine
  modified_base 78: mod_base = OTHER; note = 2'-O-Methyl-adenosine
  modified_base 79: mod_base = OTHER; note = 2'-O-Methyl-guanosine
  modified_base 80: mod_base = OTHER; note = 2'-O-Methyl-uridine
  modified_base 81: mod_base = OTHER; note = 2'-O-Methyl-guanosine
  modified_base 83: mod_base = OTHER; note = 2'-O-Methyl-cytidine
  modified_base 84: mod_base = OTHER; note = 2'-O-Methyl-adenosine
  modified_base 85: mod_base = OTHER; note = 2'-O-Methyl-cytidine
  modified_base 86: mod_base = OTHER; note = 2'-O-Methyl-cytidine
  modified_base 87: mod_base = OTHER; note = 2'-O-Methyl-guanosine
  modified_base 88: mod_base = OTHER; note = 2'-O-Methyl-adenosine
  modified_base 89: mod_base = OTHER; note = 2'-O-Methyl-guanosine
  modified_base 90: mod_base = OTHER; note = 2'-O-Methyl-uridine
  modified_base 91: mod_base = OTHER; note = 2'-O-Methyl-cytidine
  modified_base 92: mod_base = OTHER; note = 2'-O-Methyl-guanosine
  modified_base 93: mod_base = OTHER; note = 2'-O-Methyl-guanosine
  modified_base 94: mod_base = OTHER; note = 2'-O-Methyl-uridine
  modified_base 95: mod_base = OTHER; note = 2'-O-Methyl-guanosine
  modified_base 96: mod_base = OTHER; note = 2'-O-Methyl-cytidine
  modified_base 97: mod_base = OTHER; note = 2'-O-Methyl-uridine phosphorothioate
  modified_base 98: mod_base = OTHER; note = 2'-O-Methyl-uridine phosphorothioate
  modified_base 99: mod_base = OTHER; note = 2'-O-Methyl-uridine phosphorothioate
  modified_base 100: mod_base = OTHER; note = 2'-O-Methyl-uridine

SEQ ID NO: 2524 - RNA, 103 nt, synthetic construct; identical to SEQ ID NO: 1700
  source 1..103: mol_type = other RNA
  modified_base 1: mod_base = OTHER; note = 2'-O-Methyl-cytidine phosphorothioate
  modified_base 2: mod_base = OTHER; note = 2'-O-Methyl-adenosine phosphorothioate
  modified_base 3: mod_base = OTHER; note = 2'-O-Methyl-guanosine
  modified_base 21: mod_base = OTHER; note = 2'-O-Methyl-guanosine
  modified_base 28: mod_base = OTHER; note = 2'-O-Methyl-adenosine
  modified_base 29: mod_base = OTHER; note = 2'-O-Methyl-guanosine
  modified_base 30: mod_base = OTHER; note = 2'-O-Methyl-cytidine
  modified_base 31: mod_base = OTHER; note = 2'-O-Methyl-uridine
  modified_base 32: mod_base = OTHER; note = 2'-O-Methyl-adenosine
  modified_base 33: mod_base = OTHER; note = 2'-O-Methyl-guanosine
  modified_base 34: mod_base = OTHER; note = 2'-O-Methyl-adenosine
  modified_base 35: mod_base = OTHER; note = 2'-O-Methyl-adenosine
  modified_base 36: mod_base = OTHER; note = 2'-O-Methyl-adenosine
  modified_base 37: mod_base = OTHER; note = 2'-O-Methyl-uridine
  modified_base 38: mod_base = OTHER; note = 2'-O-Methyl-adenosine
  modified_base 39: mod_base = OTHER; note = 2'-O-Methyl-guanosine
  modified_base 40: mod_base = OTHER; note = 2'-O-Methyl-cytidine
  modified_base 41: mod_base = OTHER; note = 2'-O-Methyl-adenosine
  modified_base 42: mod_base = OTHER; note = 2'-O-Methyl-adenosine
  modified_base 45: mod_base = OTHER; note = uridine phosphorothioate
  modified_base 46: mod_base = OTHER; note = 2'-O-Methyl-adenosine
  modified_base 48: mod_base = OTHER; note = 2'-O-Methyl-adenosine
  modified_base 50: mod_base = OTHER; note = 2'-O-Methyl-uridine
  modified_base 52: mod_base = OTHER; note = 2'-O-Methyl-adenosine
  modified_base 53: mod_base = OTHER; note = 2'-O-Methyl-guanosine
  modified_base 54: mod_base = OTHER; note = 2'-O-Methyl-guanosine
  modified_base 57: mod_base = OTHER; note = 2'-O-Methyl-adenosine
  modified_base 61: mod_base = OTHER; note = 2'-O-Methyl-cytidine
  modified_base 66: mod_base = OTHER; note = 2'-O-Methyl-uridine
  modified_base 67: mod_base = OTHER; note = 2'-O-Methyl-cytidine
  modified_base 70: mod_base = OTHER; note = 2'-O-Methyl-cytidine
  modified_base 71: mod_base = OTHER; note = 2'-O-Methyl-uridine
  modified_base 72: mod_base = OTHER; note = 2'-O-Methyl-uridine
  modified_base 74: mod_base = OTHER; note = 2'-O-Methyl-adenosine
  modified_base 75: mod_base = OTHER; note = 2'-O-Methyl-adenosine
  modified_base 76: mod_base = OTHER; note = 2'-O-Methyl-adenosine
  modified_base 77: mod_base = OTHER; note = 2'-O-Methyl-adenosine
  modified_base 78: mod_base = OTHER; note = 2'-O-Methyl-adenosine
  modified_base 79: mod_base = OTHER; note = 2'-O-Methyl-guanosine
  modified_base 80: mod_base = OTHER; note = 2'-O-Methyl-uridine
  modified_base 82: mod_base = OTHER; note = 2'-O-Methyl-guanosine
  modified_base 83: mod_base = OTHER; note = 2'-O-Methyl-cytidine
  modified_base 84: mod_base = OTHER; note = 2'-O-Methyl-adenosine
  modified_base 85: mod_base = OTHER; note = 2'-O-Methyl-cytidine
  modified_base 86: mod_base = OTHER; note = 2'-O-Methyl-cytidine
  modified_base 87: mod_base = OTHER; note = 2'-O-Methyl-guanosine
  modified_base 89: mod_base = OTHER; note = 2'-O-Methyl-guanosine
  modified_base 92: mod_base = OTHER; note = 2'-O-Methyl-guanosine
  modified_base 93: mod_base = OTHER; note = 2'-O-Methyl-guanosine
  modified_base 94: mod_base = OTHER; note = 2'-O-Methyl-uridine
  modified_base 95: mod_base = OTHER; note = 2'-O-Methyl-guanosine
  modified_base 96: mod_base = OTHER; note = 2'-O-Methyl-cytidine
  modified_base 97: mod_base = OTHER; note = 2'-O-Methyl-uridine phosphorothioate
  modified_base 98: mod_base = OTHER; note = 2'-O-Methyl-uridine phosphorothioate
  modified_base 99: mod_base = OTHER; note = 2'-O-Methyl-uridine phosphorothioate
  modified_base 100: mod_base = OTHER; note = 2'-O-Methyl-uridine

SEQ ID NO: 2525 - RNA, 103 nt, synthetic construct; identical to SEQ ID NO: 1700
  source 1..103: mol_type = other RNA
  modified_base 1: mod_base = OTHER; note = 2'-O-Methyl-cytidine phosphorothioate
  modified_base 2: mod_base = OTHER; note = 2'-O-Methyl-adenosine phosphorothioate
  modified_base 3: mod_base = OTHER; note = 2'-O-Methyl-guanosine
  modified_base 21: mod_base = OTHER; note = 2'-O-Methyl-guanosine
  modified_base 28: mod_base = OTHER; note = 2'-O-Methyl-adenosine
  modified_base 29: mod_base = OTHER; note = 2'-O-Methyl-guanosine
  modified_base 30: mod_base = OTHER; note = 2'-O-Methyl-cytidine
  modified_base 31: mod_base = OTHER; note = 2'-O-Methyl-uridine
  modified_base 32: mod_base = OTHER; note = 2'-O-Methyl-adenosine
  modified_base 33: mod_base = OTHER; note = 2'-O-Methyl-guanosine
  modified_base 34: mod_base = OTHER; note = 2'-O-Methyl-adenosine
  modified_base 35: mod_base = OTHER; note = 2'-O-Methyl-adenosine
  modified_base 36: mod_base = OTHER; note = 2'-O-Methyl-adenosine
  modified_base 37: mod_base = OTHER; note = 2'-O-Methyl-uridine
  modified_base 38: mod_base = OTHER; note = 2'-O-Methyl-adenosine
  modified_base 39: mod_base = OTHER; note = 2'-O-Methyl-guanosine
  modified_base 40: mod_base = OTHER; note = 2'-O-Methyl-cytidine
  modified_base 41: mod_base = OTHER; note = 2'-O-Methyl-adenosine
  modified_base 42: mod_base = OTHER; note = 2'-O-Methyl-adenosine
  modified_base 45: mod_base = OTHER; note = uridine phosphorothioate
  modified_base 46: mod_base = OTHER; note = 2'-O-Methyl-adenosine
  modified_base 48: mod_base = OTHER; note = 2'-O-Methyl-adenosine
  modified_base 50: mod_base = OTHER; note = 2'-O-Methyl-uridine
  modified_base 52: mod_base = OTHER; note = 2'-O-Methyl-adenosine
  modified_base 53: mod_base = OTHER; note = 2'-O-Methyl-guanosine
  modified_base 54: mod_base = OTHER; note = 2'-O-Methyl-guanosine
  modified_base 55: mod_base = OTHER; note = 2'-O-Methyl-cytidine
  modified_base 56: mod_base = OTHER; note = 2'-O-Methyl-uridine
  modified_base 57: mod_base = OTHER; note = 2'-O-Methyl-adenosine
  modified_base 60: mod_base = OTHER; note = 2'-O-Methyl-cytidine
  modified_base 61: mod_base = OTHER; note = 2'-O-Methyl-cytidine
  modified_base 66: mod_base = OTHER; note = 2'-O-Methyl-uridine
  modified_base 67: mod_base = OTHER; note = 2'-O-Methyl-cytidine
  modified_base 70: mod_base = OTHER; note = 2'-O-Methyl-cytidine
  modified_base 71: mod_base = OTHER; note = 2'-O-Methyl-uridine
  modified_base 72: mod_base = OTHER; note = 2'-O-Methyl-uridine
  modified_base 74: mod_base = OTHER; note = 2'-O-Methyl-adenosine
  modified_base 75: mod_base = OTHER; note = 2'-O-Methyl-adenosine
  modified_base 76: mod_base = OTHER; note = 2'-O-Methyl-adenosine
  modified_base 77: mod_base = OTHER; note = 2'-O-Methyl-adenosine
  modified_base 78: mod_base = OTHER; note = 2'-O-Methyl-adenosine
  modified_base 79: mod_base = OTHER; note = 2'-O-Methyl-guanosine
  modified_base 80: mod_base = OTHER; note = 2'-O-Methyl-uridine
  modified_base 82: mod_base = OTHER; note = 2'-O-Methyl-guanosine
  modified_base 83: mod_base = OTHER; note = 2'-O-Methyl-cytidine
  modified_base 84: mod_base = OTHER; note = 2'-O-Methyl-adenosine
  modified_base 85: mod_base = OTHER; note = 2'-O-Methyl-cytidine
  modified_base 86: mod_base = OTHER; note = 2'-O-Methyl-cytidine
  modified_base 87: mod_base = OTHER; note = 2'-O-Methyl-guanosine
  modified_base 89: mod_base = OTHER; note = 2'-O-Methyl-guanosine
  modified_base 92: mod_base = OTHER; note = 2'-O-Methyl-guanosine
  modified_base 93: mod_base = OTHER; note = 2'-O-Methyl-guanosine
  modified_base 94: mod_base = OTHER; note = 2'-O-Methyl-uridine
  modified_base 95: mod_base = OTHER; note = 2'-O-Methyl-guanosine
  modified_base 96: mod_base = OTHER; note = 2'-O-Methyl-cytidine
  modified_base 97: mod_base = OTHER; note = 2'-O-Methyl-uridine phosphorothioate
  modified_base 98: mod_base = OTHER; note = 2'-O-Methyl-uridine phosphorothioate
  modified_base 99: mod_base = OTHER; note = 2'-O-Methyl-uridine phosphorothioate
  modified_base 100: mod_base = OTHER; note = 2'-O-Methyl-uridine

SEQ ID NO: 2526 - RNA, 103 nt, synthetic construct; identical to SEQ ID NO: 1700
  source 1..103: mol_type = other RNA
  modified_base 1: mod_base = OTHER; note = 2'-O-Methyl-cytidine phosphorothioate
  modified_base 2: mod_base = OTHER; note = 2'-O-Methyl-adenosine phosphorothioate
  modified_base 3: mod_base = OTHER; note = 2'-O-Methyl-guanosine
  modified_base 21: mod_base = OTHER; note = 2'-O-Methyl-guanosine
  modified_base 28: mod_base = OTHER; note = 2'-O-Methyl-adenosine
  modified_base 29: mod_base = OTHER; note = 2'-O-Methyl-guanosine
  modified_base 30: mod_base = OTHER; note = 2'-O-Methyl-cytidine
  modified_base 31: mod_base = OTHER; note = 2'-O-Methyl-uridine
  modified_base 32: mod_base = OTHER; note = 2'-O-Methyl-adenosine
  modified_base 33: mod_base = OTHER; note = 2'-O-Methyl-guanosine
  modified_base 34: mod_base = OTHER; note = 2'-O-Methyl-adenosine
  modified_base 35: mod_base = OTHER; note = 2'-O-Methyl-adenosine
  modified_base 36: mod_base = OTHER; note = 2'-O-Methyl-adenosine
  modified_base 37: mod_base = OTHER; note = 2'-O-Methyl-uridine
  modified_base 38: mod_base = OTHER; note = 2'-O-Methyl-adenosine
  modified_base 39: mod_base = OTHER; note = 2'-O-Methyl-guanosine
  modified_base 40: mod_base = OTHER; note = 2'-O-Methyl-cytidine
  modified_base 41: mod_base = OTHER; note = 2'-O-Methyl-adenosine
  modified_base 42: mod_base = OTHER; note = 2'-O-Methyl-adenosine
  modified_base 45: mod_base = OTHER; note = uridine phosphorothioate
  modified_base 46: mod_base = OTHER; note = 2'-O-Methyl-adenosine
  modified_base 48: mod_base = OTHER; note = 2'-O-Methyl-adenosine
  modified_base 50: mod_base = OTHER; note = 2'-O-Methyl-uridine
  modified_base 52: mod_base = OTHER; note = 2'-O-Methyl-adenosine
  modified_base 53: mod_base = OTHER; note = 2'-O-Methyl-guanosine
  modified_base 54: mod_base = OTHER; note = 2'-O-Methyl-guanosine
  modified_base 57: mod_base = OTHER; note = 2'-O-Methyl-adenosine
  modified_base 61: mod_base = OTHER; note = 2'-O-Methyl-cytidine
  modified_base 66: mod_base = OTHER; note = 2'-O-Methyl-uridine
  modified_base 67: mod_base = OTHER; note = 2'-O-Methyl-cytidine
  modified_base 70: mod_base = OTHER; note = 2'-O-Methyl-cytidine
  modified_base 71: mod_base = OTHER; note = 2'-O-Methyl-uridine
  modified_base 72: mod_base = OTHER; note = 2'-O-Methyl-uridine
  modified_base 73: mod_base = OTHER; note = 2'-O-Methyl-guanosine
  modified_base 74: mod_base = OTHER; note = 2'-O-Methyl-adenosine
  modified_base 75: mod_base = OTHER; note = 2'-O-Methyl-adenosine
  modified_base 76: mod_base = OTHER; note = 2'-O-Methyl-adenosine
  modified_base 77: mod_base = OTHER; note = 2'-O-Methyl-adenosine
  modified_base 78: mod_base = OTHER; note = 2'-O-Methyl-adenosine
  modified_base 79: mod_base = OTHER; note = 2'-O-Methyl-guanosine
  modified_base 80: mod_base = OTHER; note = 2'-O-Methyl-uridine
  modified_base 82: mod_base = OTHER; note = 2'-O-Methyl-guanosine
  modified_base 83: mod_base = OTHER; note = 2'-O-Methyl-cytidine
  modified_base 84: mod_base = OTHER; note = 2'-O-Methyl-adenosine
  modified_base 85: mod_base = OTHER; note = 2'-O-Methyl-cytidine
  modified_base 86: mod_base = OTHER; note = 2'-O-Methyl-cytidine
  modified_base 87: mod_base = OTHER; note = 2'-O-Methyl-guanosine
  modified_base 89: mod_base = OTHER; note = 2'-O-Methyl-guanosine
  modified_base 92: mod_base = OTHER; note = 2'-O-Methyl-guanosine
  modified_base 93: mod_base = OTHER; note = 2'-O-Methyl-guanosine
  modified_base 94: mod_base = OTHER; note = 2'-O-Methyl-uridine
  modified_base 95: mod_base = OTHER; note = 2'-O-Methyl-guanosine
  modified_base 96: mod_base = OTHER; note = 2'-O-Methyl-cytidine
  modified_base 97: mod_base = OTHER; note = 2'-O-Methyl-uridine phosphorothioate
  modified_base 98: mod_base = OTHER; note = 2'-O-Methyl-uridine phosphorothioate
  modified_base 99: mod_base = OTHER; note = 2'-O-Methyl-uridine phosphorothioate
  modified_base 100: mod_base = OTHER; note = 2'-O-Methyl-uridine

SEQ ID NO: 2527 - RNA, 103 nt, synthetic construct; identical to SEQ ID NO: 1700
  source 1..103: mol_type = other RNA
  modified_base 1: mod_base = OTHER; note = 2'-O-Methyl-cytidine phosphorothioate
  modified_base 2: mod_base = OTHER; note = 2'-O-Methyl-adenosine phosphorothioate
  modified_base 3: mod_base = OTHER; note = 2'-O-Methyl-guanosine
  modified_base 21: mod_base = OTHER; note = 2'-O-Methyl-guanosine
  modified_base 28: mod_base = OTHER; note = 2'-O-Methyl-adenosine
  modified_base 29: mod_base = OTHER; note = 2'-O-Methyl-guanosine
  modified_base 30: mod_base = OTHER; note = 2'-O-Methyl-cytidine
  modified_base 31: mod_base = OTHER; note = 2'-O-Methyl-uridine
  modified_base 32: mod_base = OTHER; note = 2'-O-Methyl-adenosine
  modified_base 33: mod_base = OTHER; note = 2'-O-Methyl-guanosine
  modified_base 34: mod_base = OTHER; note = 2'-O-Methyl-adenosine
  modified_base 35: mod_base = OTHER; note = 2'-O-Methyl-adenosine
  modified_base 36: mod_base = OTHER; note = 2'-O-Methyl-adenosine
  modified_base 37: mod_base = OTHER; note = 2'-O-Methyl-uridine
  modified_base 38: mod_base = OTHER; note = 2'-O-Methyl-adenosine
  modified_base 39: mod_base = OTHER; note = 2'-O-Methyl-guanosine
  modified_base 40: mod_base = OTHER; note = 2'-O-Methyl-cytidine
  modified_base 41: mod_base = OTHER; note = 2'-O-Methyl-adenosine
  modified_base 42: mod_base = OTHER; note = 2'-O-Methyl-adenosine
  modified_base 45: mod_base = OTHER; note = uridine phosphorothioate
  modified_base 46: mod_base = OTHER; note = 2'-O-Methyl-adenosine
  modified_base 48: mod_base = OTHER; note = 2'-O-Methyl-adenosine
  modified_base 50: mod_base = OTHER; note = 2'-O-Methyl-uridine
  modified_base 52: mod_base = OTHER; note = 2'-O-Methyl-adenosine
  modified_base 53: mod_base = OTHER; note = 2'-O-Methyl-guanosine
  modified_base 54: mod_base = OTHER; note = 2'-O-Methyl-guanosine
  modified_base 57: mod_base = OTHER; note = 2'-O-Methyl-adenosine
  modified_base 61: mod_base = OTHER; note = 2'-O-Methyl-cytidine
  modified_base 66: mod_base = OTHER; note = 2'-O-Methyl-uridine
  modified_base 67: mod_base = OTHER; note = 2'-O-Methyl-cytidine
  modified_base 70: mod_base = OTHER; note = 2'-O-Methyl-cytidine
  modified_base 71: mod_base = OTHER; note = 2'-O-Methyl-uridine
  modified_base 72: mod_base = OTHER; note = 2'-O-Methyl-uridine
  modified_base 73: mod_base = OTHER; note = 2'-O-Methyl-guanosine
  modified_base 74: mod_base = OTHER; note = 2'-O-Methyl-adenosine
  modified_base 75: mod_base = OTHER; note = 2'-O-Methyl-adenosine
  modified_base 76: mod_base = OTHER; note = 2'-O-Methyl-adenosine
  modified_base 77: mod_base = OTHER; note = 2'-O-Methyl-adenosine
  modified_base 78: mod_base = OTHER; note = 2'-O-Methyl-adenosine
  modified_base 79: mod_base = OTHER; note = 2'-O-Methyl-guanosine
  modified_base 80: mod_base = OTHER; note = 2'-O-Methyl-uridine
  modified_base 82: mod_base = OTHER; note = 2'-O-Methyl-guanosine
  modified_base 83: mod_base = OTHER; note = 2'-O-Methyl-cytidine
  modified_base 84: mod_base = OTHER; note = 2'-O-Methyl-adenosine
  modified_base 85: mod_base = OTHER; note = 2'-O-Methyl-cytidine
  modified_base 86: mod_base = OTHER; note = 2'-O-Methyl-cytidine
  modified_base 87: mod_base = OTHER; note = 2'-O-Methyl-guanosine
  modified_base 89: mod_base = OTHER; note = 2'-O-Methyl-guanosine
  modified_base 91: mod_base = OTHER; note = 2'-O-Methyl-cytidine
  modified_base 92: mod_base = OTHER; note = 2'-O-Methyl-guanosine
  modified_base 93: mod_base = OTHER; note = 2'-O-Methyl-guanosine
  modified_base 94: mod_base = OTHER; note = 2'-O-Methyl-uridine
  modified_base 95: mod_base = OTHER; note = 2'-O-Methyl-guanosine
  modified_base 96: mod_base = OTHER; note = 2'-O-Methyl-cytidine
  modified_base 97: mod_base = OTHER; note = 2'-O-Methyl-uridine phosphorothioate
  modified_base 98: mod_base = OTHER; note = 2'-O-Methyl-uridine phosphorothioate
  modified_base 99: mod_base = OTHER; note = 2'-O-Methyl-uridine phosphorothioate
  modified_base 100: mod_base = OTHER; note = 2'-O-Methyl-uridine

SEQ ID NO: 2528 - RNA, 103 nt, synthetic construct; identical to SEQ ID NO: 1700
  source 1..103: mol_type = other RNA
  modified_base 1: mod_base = OTHER; note = 2'-O-Methyl-cytidine phosphorothioate
  modified_base 2: mod_base = OTHER; note = 2'-O-Methyl-adenosine phosphorothioate
  modified_base 3: mod_base = OTHER; note = 2'-O-Methyl-guanosine
  modified_base 21: mod_base = OTHER; note = 2'-O-Methyl-guanosine
  modified_base 28: mod_base = OTHER; note = 2'-O-Methyl-adenosine
  modified_base 29: mod_base = OTHER; note = 2'-O-Methyl-guanosine
  modified_base 30: mod_base = OTHER; note = 2'-O-Methyl-cytidine
  modified_base 31: mod_base = OTHER; note = 2'-O-Methyl-uridine
  modified_base 32: mod_base = OTHER; note = 2'-O-Methyl-adenosine
  modified_base 34: mod_base = OTHER; note = 2'-O-Methyl-adenosine
  modified_base 35: mod_base = OTHER; note = 2'-O-Methyl-adenosine
  modified_base 36: mod_base = OTHER; note = 2'-O-Methyl-adenosine
  modified_base 37: mod_base = OTHER; note = 2'-O-Methyl-uridine
  modified_base 38: mod_base = OTHER; note = 2'-O-Methyl-adenosine
  modified_base 39: mod_base = OTHER; note = 2'-O-Methyl-guanosine
  modified_base 40: mod_base = OTHER; note = 2'-O-Methyl-cytidine
  modified_base 41: mod_base = OTHER; note = 2'-O-Methyl-adenosine
  modified_base 42: mod_base = OTHER; note = 2'-O-Methyl-adenosine
  modified_base 45: mod_base = OTHER; note = uridine phosphorothioate
  modified_base 46: mod_base = OTHER; note = 2'-O-Methyl-adenosine
  modified_base 48: mod_base = OTHER; note = 2'-O-Methyl-adenosine
  modified_base 50: mod_base = OTHER; note = 2'-O-Methyl-uridine
  modified_base 52: mod_base = OTHER; note = 2'-O-Methyl-adenosine
  modified_base 53: mod_base = OTHER; note = 2'-O-Methyl-guanosine
  modified_base 54: mod_base = OTHER; note = 2'-O-Methyl-guanosine
  modified_base 57: mod_base = OTHER; note = 2'-O-Methyl-adenosine
  modified_base 61: mod_base = OTHER; note = 2'-O-Methyl-cytidine
  modified_base 66: mod_base = OTHER; note = 2'-O-Methyl-uridine
  modified_base 67: mod_base = OTHER; note = 2'-O-Methyl-cytidine
  modified_base 70: mod_base = OTHER; note = 2'-O-Methyl-cytidine
  modified_base 71: mod_base = OTHER; note = 2'-O-Methyl-uridine
  modified_base 72: mod_base = OTHER; note = 2'-O-Methyl-uridine
  modified_base 73: mod_base = OTHER; note = 2'-O-Methyl-guanosine
  modified_base 74: mod_base = OTHER; note = 2'-O-Methyl-adenosine
  modified_base 75: mod_base = OTHER; note = 2'-O-Methyl-adenosine
  modified_base 76: mod_base = OTHER; note = 2'-O-Methyl-adenosine
  modified_base 77: mod_base = OTHER; note = 2'-O-Methyl-adenosine
  modified_base 78: mod_base = OTHER; note = 2'-O-Methyl-adenosine
  modified_base 79: mod_base = OTHER; note = 2'-O-Methyl-guanosine
  modified_base 80: mod_base = OTHER; note = 2'-O-Methyl-uridine
  modified_base 82: mod_base = OTHER; note = 2'-O-Methyl-guanosine
  modified_base 83: mod_base = OTHER; note = 2'-O-Methyl-cytidine
  modified_base 84: mod_base = OTHER; note = 2'-O-Methyl-adenosine
  modified_base 85: mod_base = OTHER; note = 2'-O-Methyl-cytidine
  modified_base 86: mod_base = OTHER; note = 2'-O-Methyl-cytidine
  modified_base 87: mod_base = OTHER; note = 2'-O-Methyl-guanosine
  modified_base 89: mod_base = OTHER; note = 2'-O-Methyl-guanosine
  modified_base 92: mod_base = OTHER; note = 2'-O-Methyl-guanosine
  modified_base 93: mod_base = OTHER; note = 2'-O-Methyl-guanosine
  modified_base 94: mod_base = OTHER; note = 2'-O-Methyl-uridine
  modified_base 95: mod_base = OTHER; note = 2'-O-Methyl-guanosine
  modified_base 96: mod_base = OTHER; note = 2'-O-Methyl-cytidine
  modified_base 97: mod_base = OTHER; note = 2'-O-Methyl-uridine phosphorothioate
  modified_base 98: mod_base = OTHER; note = 2'-O-Methyl-uridine phosphorothioate
  modified_base 99: mod_base = OTHER; note = 2'-O-Methyl-uridine phosphorothioate
  modified_base 100: mod_base = OTHER; note = 2'-O-Methyl-uridine

SEQ ID NO: 2529 - RNA, 103 nt, synthetic construct; identical to SEQ ID NO: 1700
  source 1..103: mol_type = other RNA
  modified_base 1: mod_base = OTHER; note = 2'-O-Methyl-cytidine phosphorothioate
  modified_base 2: mod_base = OTHER; note = 2'-O-Methyl-adenosine phosphorothioate
  modified_base 3: mod_base = OTHER; note = 2'-O-Methyl-guanosine
  modified_base 21: mod_base = OTHER; note = 2'-O-Methyl-guanosine
  modified_base 28: mod_base = OTHER; note = 2'-O-Methyl-adenosine
  modified_base 29: mod_base = OTHER; note = 2'-O-Methyl-guanosine
  modified_base 30: mod_base = OTHER; note = 2'-O-Methyl-cytidine
  modified_base 31: mod_base = OTHER; note = 2'-O-Methyl-uridine
  modified_base 32: mod_base = OTHER; note = 2'-O-Methyl-adenosine
  modified_base 34: mod_base = OTHER; note = 2'-O-Methyl-adenosine
  modified_base 35: mod_base = OTHER; note = 2'-O-Methyl-adenosine
  modified_base 36: mod_base = OTHER; note = 2'-O-Methyl-adenosine
  modified_base 37: mod_base = OTHER; note = 2'-O-Methyl-uridine
  modified_base 38: mod_base = OTHER; note = 2'-O-Methyl-adenosine
  modified_base 39: mod_base = OTHER; note = 2'-O-Methyl-guanosine
  modified_base 40: mod_base = OTHER; note = 2'-O-Methyl-cytidine
  modified_base 41: mod_base = OTHER; note = 2'-O-Methyl-adenosine
  modified_base 42: mod_base = OTHER; note = 2'-O-Methyl-adenosine
  modified_base 45: mod_base = OTHER; note = uridine phosphorothioate
  modified_base 46: mod_base = OTHER; note = 2'-O-Methyl-adenosine
  modified_base 48: mod_base = OTHER; note = 2'-O-Methyl-adenosine
  modified_base 50: mod_base = OTHER; note = 2'-O-Methyl-uridine
  modified_base 52: mod_base = OTHER; note = 2'-O-Methyl-adenosine
  modified_base 53: mod_base = OTHER; note = 2'-O-Methyl-guanosine
  modified_base 54: mod_base = OTHER; note = 2'-O-Methyl-guanosine
  modified_base 57: mod_base = OTHER; note = 2'-O-Methyl-adenosine
  modified_base 61: mod_base = OTHER; note = 2'-O-Methyl-cytidine
  modified_base 66: mod_base = OTHER; note = 2'-O-Methyl-uridine
  modified_base 67: mod_base = OTHER; note = 2'-O-Methyl-cytidine
  modified_base 70: mod_base = OTHER; note = 2'-O-Methyl-cytidine
  modified_base 71: mod_base = OTHER; note = 2'-O-Methyl-uridine
  modified_base 72: mod_base = OTHER; note = 2'-O-Methyl-uridine
  modified_base 73: mod_base = OTHER; note = 2'-O-Methyl-guanosine
  modified_base 74: mod_base = OTHER; note = 2'-O-Methyl-adenosine
  modified_base 75: mod_base = OTHER; note = 2'-O-Methyl-adenosine
  modified_base 76: mod_base = OTHER; note = 2'-O-Methyl-adenosine
  modified_base 77: mod_base = OTHER; note = 2'-O-Methyl-adenosine
  modified_base 78: mod_base = OTHER; note = 2'-O-Methyl-adenosine
  modified_base 79: mod_base = OTHER; note = 2'-O-Methyl-guanosine
  modified_base 80: mod_base = OTHER; note = 2'-O-Methyl-uridine
  modified_base 82: mod_base = OTHER; note = 2'-O-Methyl-guanosine
  modified_base 83: mod_base = OTHER; note = 2'-O-Methyl-cytidine
  modified_base 84: mod_base = OTHER; note = 2'-O-Methyl-adenosine
  modified_base 85: mod_base = OTHER; note = 2'-O-Methyl-cytidine
  modified_base 86: mod_base = OTHER; note = 2'-O-Methyl-cytidine
  modified_base 87: mod_base = OTHER; note = 2'-O-Methyl-guanosine
  modified_base 89: mod_base = OTHER; note = 2'-O-Methyl-guanosine
  modified_base 91: mod_base = OTHER; note = 2'-O-Methyl-cytidine
  modified_base 92: mod_base = OTHER; note = 2'-O-Methyl-guanosine
  modified_base 93: mod_base = OTHER; note = 2'-O-Methyl-guanosine
  modified_base 94: mod_base = OTHER; note = 2'-O-Methyl-uridine
  modified_base 95: mod_base = OTHER; note = 2'-O-Methyl-guanosine
  modified_base 96: mod_base = OTHER; note = 2'-O-Methyl-cytidine
  modified_base 97: mod_base = OTHER; note = 2'-O-Methyl-uridine phosphorothioate
  modified_base 98: mod_base = OTHER; note = 2'-O-Methyl-uridine phosphorothioate
  modified_base 99: mod_base = OTHER; note = 2'-O-Methyl-uridine phosphorothioate
  modified_base 100: mod_base = OTHER; note = 2'-O-Methyl-uridine

SEQ ID NO: 2530 - RNA, 103 nt, synthetic construct; identical to SEQ ID NO: 1700
  source 1..103: mol_type = other RNA
  modified_base 1: mod_base = OTHER; note = 2'-O-Methyl-cytidine phosphorothioate
  modified_base 2: mod_base = OTHER; note = 2'-O-Methyl-adenosine phosphorothioate
  modified_base 3: mod_base = OTHER; note = 2'-O-Methyl-guanosine
  modified_base 21: mod_base = OTHER; note = 2'-O-Methyl-guanosine
  modified_base 28: mod_base = OTHER; note = 2'-O-Methyl-adenosine
  modified_base 29: mod_base = OTHER; note = 2'-O-Methyl-guanosine
  modified_base 30: mod_base = OTHER; note = 2'-O-Methyl-cytidine
  modified_base 31: mod_base = OTHER; note = 2'-O-Methyl-uridine
  modified_base 32: mod_base = OTHER; note = 2'-O-Methyl-adenosine
  modified_base 34: mod_base = OTHER; note = 2'-O-Methyl-adenosine
  modified_base 35: mod_base = OTHER; note = 2'-O-Methyl-adenosine
  modified_base 36: mod_base = OTHER; note = 2'-O-Methyl-adenosine
  modified_base 37: mod_base = OTHER; note = 2'-O-Methyl-uridine
  modified_base 38: mod_base = OTHER; note = 2'-O-Methyl-adenosine
  modified_base 39: mod_base = OTHER; note = 2'-O-Methyl-guanosine
  modified_base 40: mod_base = OTHER; note = 2'-O-Methyl-cytidine
  modified_base 41: mod_base = OTHER; note = 2'-O-Methyl-adenosine
  modified_base 42: mod_base = OTHER; note = 2'-O-Methyl-adenosine
  modified_base 45: mod_base = OTHER; note = uridine phosphorothioate
  modified_base 46: mod_base = OTHER; note = 2'-O-Methyl-adenosine
  modified_base 48: mod_base = OTHER; note = 2'-O-Methyl-adenosine
  modified_base 50: mod_base = OTHER; note = 2'-O-Methyl-uridine
  modified_base 52: mod_base = OTHER; note = 2'-O-Methyl-adenosine
  modified_base 53: mod_base = OTHER; note = 2'-O-Methyl-guanosine
  modified_base 54: mod_base = OTHER; note = 2'-O-Methyl-guanosine
  modified_base 55: mod_base = OTHER; note = 2'-O-Methyl-cytidine
  modified_base 56: mod_base = OTHER; note = 2'-O-Methyl-uridine
  modified_base 57: mod_base = OTHER; note = 2'-O-Methyl-adenosine
  modified_base 60: mod_base = OTHER; note = 2'-O-Methyl-cytidine
  modified_base 61: mod_base = OTHER; note = 2'-O-Methyl-cytidine
  modified_base 66: mod_base = OTHER; note = 2'-O-Methyl-uridine
  modified_base 67: mod_base = OTHER; note = 2'-O-Methyl-cytidine
  modified_base 70: mod_base = OTHER; note = 2'-O-Methyl-cytidine
  modified_base 71: mod_base = OTHER; note = 2'-O-Methyl-uridine
  modified_base 72: mod_base = OTHER; note = 2'-O-Methyl-uridine
  modified_base 74: mod_base = OTHER; note = 2'-O-Methyl-adenosine
  modified_base 75: mod_base = OTHER; note = 2'-O-Methyl-adenosine
  modified_base 76: mod_base = OTHER; note = 2'-O-Methyl-adenosine
  modified_base 77: mod_base = OTHER; note = 2'-O-Methyl-adenosine
  modified_base 78: mod_base = OTHER; note = 2'-O-Methyl-adenosine
  modified_base 79: mod_base = OTHER; note = 2'-O-Methyl-guanosine
  modified_base 80: mod_base = OTHER; note = 2'-O-Methyl-uridine
  modified_base 82: mod_base = OTHER; note = 2'-O-Methyl-guanosine
  modified_base 83: mod_base = OTHER; note = 2'-O-Methyl-cytidine
  modified_base 84: mod_base = OTHER; note = 2'-O-Methyl-adenosine
  modified_base 85: mod_base = OTHER; note = 2'-O-Methyl-cytidine
  modified_base 86: mod_base = OTHER; note = 2'-O-Methyl-cytidine
  modified_base 87: mod_base = OTHER; note = 2'-O-Methyl-guanosine
  modified_base 89: mod_base = OTHER; note = 2'-O-Methyl-guanosine
  modified_base 92: mod_base = OTHER; note = 2'-O-Methyl-guanosine
  modified_base 93: mod_base = OTHER; note = 2'-O-Methyl-guanosine
  modified_base 94: mod_base = OTHER; note = 2'-O-Methyl-uridine
  modified_base 95: mod_base = OTHER; note = 2'-O-Methyl-guanosine
  modified_base 96: mod_base = OTHER; note = 2'-O-Methyl-cytidine
  modified_base 97: mod_base = OTHER; note = 2'-O-Methyl-uridine phosphorothioate
  modified_base 98: mod_base = OTHER; note = 2'-O-Methyl-uridine phosphorothioate
  modified_base 99: mod_base = OTHER; note = 2'-O-Methyl-uridine phosphorothioate
  modified_base 100: mod_base = OTHER; note = 2'-O-Methyl-uridine

SEQ ID NO: 2531 - RNA, 103 nt, synthetic construct; identical to SEQ ID NO: 1643
  source 1..103: mol_type = other RNA
  modified_base 1: mod_base = OTHER; note = 2'-O-Methyl-cytidine phosphorothioate
  modified_base 2: mod_base = OTHER; note = 2'-O-Methyl-cytidine phosphorothioate
  modified_base 3: mod_base = OTHER; note = 2'-O-Methyl-cytidine
  modified_base 21: mod_base = OTHER; note = 2'-O-Methyl-guanosine
  modified_base 25: mod_base = OTHER; note = uridine phosphorothioate
  modified_base 28: mod_base = OTHER; note = 2'-O-Methyl-adenosine
  modified_base 29: mod_base = OTHER; note = 2'-O-Methyl-guanosine
  modified_base 30: mod_base = OTHER; note = 2'-O-Methyl-cytidine
  modified_base 31: mod_base = OTHER; note = 2'-O-Methyl-uridine
  modified_base 32: mod_base = OTHER; note = 2'-O-Methyl-adenosine
  modified_base 33: mod_base = OTHER; note = 2'-O-Methyl-guanosine
  modified_base 34: mod_base = OTHER; note = 2'-O-Methyl-adenosine
  modified_base 35: mod_base = OTHER; note = 2'-O-Methyl-adenosine
  modified_base 36: mod_base = OTHER; note = 2'-O-Methyl-adenosine
  modified_base 37: mod_base = OTHER; note = 2'-O-Methyl-uridine
  modified_base 38: mod_base = OTHER; note = 2'-O-Methyl-adenosine
  modified_base 39: mod_base = OTHER; note = 2'-O-Methyl-guanosine
  modified_base 40: mod_base = OTHER; note = 2'-O-Methyl-cytidine
  modified_base 41: mod_base = OTHER; note = 2'-O-Methyl-adenosine
  modified_base 42: mod_base = OTHER; note = 2'-O-Methyl-adenosine
  modified_base 46: mod_base = OTHER; note = 2'-O-Methyl-adenosine
  modified_base 48: mod_base = OTHER; note = 2'-O-Methyl-adenosine
  modified_base 50: mod_base = OTHER; note = 2'-O-Methyl-uridine
  modified_base 52: mod_base = OTHER; note = 2'-O-Methyl-adenosine
  modified_base 53: mod_base = OTHER; note = 2'-O-Methyl-guanosine
  modified_base 54: mod_base = OTHER; note = 2'-O-Methyl-guanosine
  modified_base 55: mod_base = OTHER; note = 2'-O-Methyl-cytidine
  modified_base 56: mod_base = OTHER; note = 2'-O-Methyl-uridine
  modified_base 57: mod_base = OTHER; note = 2'-O-Methyl-adenosine
  modified_base 60: mod_base = OTHER; note = 2'-O-Methyl-cytidine
  modified_base 61: mod_base = OTHER; note = 2'-O-Methyl-cytidine
  modified_base 66: mod_base = OTHER; note = 2'-O-Methyl-uridine
  modified_base 67: mod_base = OTHER; note = 2'-O-Methyl-cytidine
  modified_base 70: mod_base = OTHER; note = 2'-O-Methyl-cytidine
  modified_base 71: mod_base = OTHER; note = 2'-O-Methyl-uridine
  modified_base 72: mod_base = OTHER; note = 2'-O-Methyl-uridine
  modified_base 73: mod_base = OTHER; note = 2'-O-Methyl-guanosine
  modified_base 74: mod_base = OTHER; note = 2'-O-Methyl-adenosine
  modified_base 75: mod_base = OTHER; note = 2'-O-Methyl-adenosine
  modified_base 76: mod_base = OTHER; note = 2'-O-Methyl-adenosine
  modified_base 77: mod_base = OTHER; note = 2'-O-Methyl-adenosine
  modified_base 78: mod_base = OTHER; note = 2'-O-Methyl-adenosine
  modified_base 79: mod_base = OTHER; note = 2'-O-Methyl-guanosine
  modified_base 80: mod_base = OTHER; note = 2'-O-Methyl-uridine
  modified_base 81: mod_base = OTHER; note = 2'-O-Methyl-guanosine
  modified_base 83: mod_base = OTHER; note = 2'-O-Methyl-cytidine
  modified_base 84: mod_base = OTHER; note = 2'-O-Methyl-adenosine
  modified_base 85: mod_base = OTHER; note = 2'-O-Methyl-cytidine
  modified_base 86: mod_base = OTHER; note = 2'-O-Methyl-cytidine
  modified_base 87: mod_base = OTHER; note = 2'-O-Methyl-guanosine
  modified_base 88: mod_base = OTHER; note = 2'-O-Methyl-adenosine
  modified_base 89: mod_base = OTHER; note = 2'-O-Methyl-guanosine
  modified_base 90: mod_base = OTHER; note = 2'-O-Methyl-uridine
  modified_base 91: mod_base = OTHER; note = 2'-O-Methyl-cytidine
  modified_base 92: mod_base = OTHER; note = 2'-O-Methyl-guanosine
  modified_base 93: mod_base = OTHER; note = 2'-O-Methyl-guanosine
  modified_base 94: mod_base = OTHER; note = 2'-O-Methyl-uridine
  modified_base 95: mod_base = OTHER; note = 2'-O-Methyl-guanosine
  modified_base 96: mod_base = OTHER; note = 2'-O-Methyl-cytidine
  modified_base 97: mod_base = OTHER; note = 2'-O-Methyl-uridine phosphorothioate
  modified_base 98: mod_base = OTHER; note = 2'-O-Methyl-uridine phosphorothioate
  modified_base 99: mod_base = OTHER; note = 2'-O-Methyl-uridine phosphorothioate
  modified_base 100: mod_base = OTHER; note = 2'-O-Methyl-uridine

SEQ ID NO: 2532 - RNA, 103 nt, synthetic construct; identical to SEQ ID NO: 1643
  source 1..103: mol_type = other RNA
  modified_base 1: mod_base = OTHER; note = 2'-O-Methyl-cytidine phosphorothioate
  modified_base 2: mod_base = OTHER; note = 2'-O-Methyl-cytidine phosphorothioate
  modified_base 3: mod_base = OTHER; note = 2'-O-Methyl-cytidine
  modified_base 21: mod_base = OTHER; note = 2'-O-Methyl-guanosine
  modified_base 25: mod_base = OTHER; note = uridine phosphorothioate
  modified_base 28: mod_base = OTHER; note = 2'-O-Methyl-adenosine
  modified_base 29: mod_base = OTHER; note = 2'-O-Methyl-guanosine
  modified_base 30: mod_base = OTHER; note = 2'-O-Methyl-cytidine
  modified_base 31: mod_base = OTHER; note = 2'-O-Methyl-uridine
  modified_base 32: mod_base = OTHER; note = 2'-O-Methyl-adenosine
  modified_base 34: mod_base = OTHER; note = 2'-O-Methyl-adenosine
  modified_base 35: mod_base = OTHER; note = 2'-O-Methyl-adenosine
  modified_base 36: mod_base = OTHER; note = 2'-O-Methyl-adenosine
  modified_base 37: mod_base = OTHER; note = 2'-O-Methyl-uridine
  modified_base 38: mod_base = OTHER; note = 2'-O-Methyl-adenosine
  modified_base 39: mod_base = OTHER; note = 2'-O-Methyl-guanosine
  modified_base 40: mod_base = OTHER; note = 2'-O-Methyl-cytidine
  modified_base 41: mod_base = OTHER; note = 2'-O-Methyl-adenosine
  modified_base 42: mod_base = OTHER; note = 2'-O-Methyl-adenosine
  modified_base 46: mod_base = OTHER; note = 2'-O-Methyl-adenosine
  modified_base 48: mod_base = OTHER; note = 2'-O-Methyl-adenosine
  modified_base 50: mod_base = OTHER; note = 2'-O-Methyl-uridine
  modified_base 52: mod_base = OTHER; note = 2'-O-Methyl-adenosine
  modified_base 53: mod_base = OTHER; note = 2'-O-Methyl-guanosine
  modified_base 54: mod_base = OTHER; note = 2'-O-Methyl-guanosine
  modified_base 55: mod_base = OTHER; note = 2'-O-Methyl-cytidine
  modified_base 56: mod_base = OTHER; note = 2'-O-Methyl-uridine
  modified_base 57: mod_base = OTHER; note = 2'-O-Methyl-adenosine
  modified_base 60: mod_base = OTHER; note = 2'-O-Methyl-cytidine
  modified_base 61: mod_base = OTHER; note = 2'-O-Methyl-cytidine
  modified_base 66: mod_base = OTHER; note = 2'-O-Methyl-uridine
  modified_base 67: mod_base = OTHER; note = 2'-O-Methyl-cytidine
  modified_base 70: mod_base = OTHER; note = 2'-O-Methyl-cytidine
  modified_base 71: mod_base = OTHER; note = 2'-O-Methyl-uridine
  modified_base 72: mod_base = OTHER; note = 2'-O-Methyl-uridine
  modified_base 74: mod_base = OTHER; note = 2'-O-Methyl-adenosine
  modified_base 75: mod_base = OTHER; note = 2'-O-Methyl-adenosine
  modified_base 76: mod_base = OTHER; note = 2'-O-Methyl-adenosine
  modified_base 77: mod_base = OTHER; note = 2'-O-Methyl-adenosine
  modified_base 78: mod_base = OTHER; note = 2'-O-Methyl-adenosine
  modified_base 79: mod_base = OTHER; note = 2'-O-Methyl-guanosine
  modified_base 80: mod_base = OTHER; note = 2'-O-Methyl-uridine
  modified_base 81: mod_base = OTHER; note = 2'-O-Methyl-guanosine
  modified_base 83: mod_base = OTHER; note = 2'-O-Methyl-cytidine
  modified_base 84: mod_base = OTHER; note = 2'-O-Methyl-adenosine
  modified_base 85: mod_base = OTHER; note = 2'-O-Methyl-cytidine
  modified_base 86: mod_base = OTHER; note = 2'-O-Methyl-cytidine
  modified_base 87: mod_base = OTHER; note = 2'-O-Methyl-guanosine
  modified_base 88: mod_base = OTHER; note = 2'-O-Methyl-adenosine
  modified_base 89: mod_base = OTHER; note = 2'-O-Methyl-guanosine
  modified_base 90: mod_base = OTHER; note = 2'-O-Methyl-uridine
  modified_base 91: mod_base = OTHER; note = 2'-O-Methyl-cytidine
  modified_base 92: mod_base = OTHER; note = 2'-O-Methyl-guanosine
  modified_base 93: mod_base = OTHER; note = 2'-O-Methyl-guanosine
  modified_base 94: mod_base = OTHER; note = 2'-O-Methyl-uridine
  modified_base 95: mod_base = OTHER; note = 2'-O-Methyl-guanosine
  modified_base 96: mod_base = OTHER; note = 2'-O-Methyl-cytidine
  modified_base 97: mod_base = OTHER; note = 2'-O-Methyl-uridine phosphorothioate
  modified_base 98: mod_base = OTHER; note = 2'-O-Methyl-uridine phosphorothioate
  modified_base 99: mod_base = OTHER; note = 2'-O-Methyl-uridine phosphorothioate
  modified_base 100: mod_base = OTHER; note = 2'-O-Methyl-uridine

SEQ ID NO: 2533 - RNA, 103 nt, synthetic construct; identical to SEQ ID NO: 1699
  source 1..103: mol_type = other RNA
  modified_base 1: mod_base = OTHER; note = 2'-O-Methyl-guanosine phosphorothioate
  modified_base 2: mod_base = OTHER; note = 2'-O-Methyl-adenosine phosphorothioate
  modified_base 3: mod_base = OTHER; note = 2'-O-Methyl-guanosine
  modified_base 21: mod_base = OTHER; note = 2'-O-Methyl-guanosine
  modified_base 25: mod_base = OTHER; note = uridine phosphorothioate
  modified_base 28: mod_base = OTHER; note = 2'-O-Methyl-adenosine
  modified_base 29: mod_base = OTHER; note = 2'-O-Methyl-guanosine
  modified_base 30: mod_base = OTHER; note = 2'-O-Methyl-cytidine
  modified_base 31: mod_base = OTHER; note = 2'-O-Methyl-uridine
  modified_base 32: mod_base = OTHER; note = 2'-O-Methyl-adenosine
  modified_base 33: mod_base = OTHER; note = 2'-O-Methyl-guanosine
  modified_base 34: mod_base = OTHER; note = 2'-O-Methyl-adenosine
  modified_base 35: mod_base = OTHER; note = 2'-O-Methyl-adenosine
  modified_base 36: mod_base = OTHER; note = 2'-O-Methyl-adenosine
  modified_base 37: mod_base = OTHER; note = 2'-O-Methyl-uridine
  modified_base 38: mod_base = OTHER; note = 2'-O-Methyl-adenosine
  modified_base 39: mod_base = OTHER; note = 2'-O-Methyl-guanosine
  modified_base 40: mod_base = OTHER; note = 2'-O-Methyl-cytidine
  modified_base 41: mod_base = OTHER; note = 2'-O-Methyl-adenosine
  modified_base 42: mod_base = OTHER; note = 2'-O-Methyl-adenosine
  modified_base 46: mod_base = OTHER; note = 2'-O-Methyl-adenosine
  modified_base 48: mod_base = OTHER; note = 2'-O-Methyl-adenosine
  modified_base 50: mod_base = OTHER; note = 2'-O-Methyl-uridine
  modified_base 52: mod_base = OTHER; note = 2'-O-Methyl-adenosine
  modified_base 53: mod_base = OTHER; note = 2'-O-Methyl-guanosine
  modified_base 54: mod_base = OTHER; note = 2'-O-Methyl-guanosine
  modified_base 55: mod_base = OTHER; note = 2'-O-Methyl-cytidine
  modified_base 56: mod_base = OTHER; note = 2'-O-Methyl-uridine
  modified_base 57: mod_base = OTHER; note = 2'-O-Methyl-adenosine
  modified_base 60: mod_base = OTHER; note = 2'-O-Methyl-cytidine
  modified_base 61: mod_base = OTHER; note = 2'-O-Methyl-cytidine
  modified_base 66: mod_base = OTHER; note = 2'-O-Methyl-uridine
  modified_base 67: mod_base = OTHER; note = 2'-O-Methyl-cytidine
  modified_base 70: mod_base = OTHER; note = 2'-O-Methyl-cytidine
  modified_base 71: mod_base = OTHER; note = 2'-O-Methyl-uridine
  modified_base 72: mod_base = OTHER; note = 2'-O-Methyl-uridine
  modified_base 73: mod_base = OTHER; note = 2'-O-Methyl-guanosine
  modified_base 74: mod_base = OTHER; note = 2'-O-Methyl-adenosine
  modified_base 75: mod_base = OTHER; note = 2'-O-Methyl-adenosine
  modified_base 76: mod_base = OTHER; note = 2'-O-Methyl-adenosine
  modified_base 77: mod_base = OTHER; note = 2'-O-Methyl-adenosine
  modified_base 78: mod_base = OTHER; note = 2'-O-Methyl-adenosine
  modified_base 79: mod_base = OTHER; note = 2'-O-Methyl-guanosine
  modified_base 80: mod_base = OTHER; note = 2'-O-Methyl-uridine
  modified_base 81: mod_base = OTHER; note = 2'-O-Methyl-guanosine
  modified_base 83: mod_base = OTHER; note = 2'-O-Methyl-cytidine
  modified_base 84: mod_base = OTHER; note = 2'-O-Methyl-adenosine
  modified_base 85: mod_base = OTHER; note = 2'-O-Methyl-cytidine
  modified_base 86: mod_base = OTHER; note = 2'-O-Methyl-cytidine
  modified_base 87: mod_base = OTHER; note = 2'-O-Methyl-guanosine
  modified_base 88: mod_base = OTHER; note = 2'-O-Methyl-adenosine
  modified_base 89: mod_base = OTHER; note = 2'-O-Methyl-guanosine
  modified_base 90: mod_base = OTHER; note = 2'-O-Methyl-uridine
  modified_base 91: mod_base = OTHER; note = 2'-O-Methyl-cytidine
  modified_base 92: mod_base = OTHER; note = 2'-O-Methyl-guanosine
  modified_base 93: mod_base = OTHER; note = 2'-O-Methyl-guanosine
  modified_base 94: mod_base = OTHER; note = 2'-O-Methyl-uridine
  modified_base 95: mod_base = OTHER; note = 2'-O-Methyl-guanosine
  modified_base 96: mod_base = OTHER; note = 2'-O-Methyl-cytidine
  modified_base 97: mod_base = OTHER; note = 2'-O-Methyl-uridine phosphorothioate
  modified_base 98: mod_base = OTHER; note = 2'-O-Methyl-uridine phosphorothioate
  modified_base 99: mod_base = OTHER; note = 2'-O-Methyl-uridine phosphorothioate
  modified_base 100: mod_base = OTHER; note = 2'-O-Methyl-uridine

SEQ ID NO: 2534 - RNA, 103 nt, synthetic construct; identical to SEQ ID NO: 1699
  source 1..103: mol_type = other RNA
  modified_base 1: mod_base = OTHER; note = 2'-O-Methyl-guanosine phosphorothioate
  modified_base 2: mod_base = OTHER; note = 2'-O-Methyl-adenosine phosphorothioate
  modified_base 3: mod_base = OTHER; note = 2'-O-Methyl-guanosine
  modified_base 21: mod_base = OTHER; note = 2'-O-Methyl-guanosine
  modified_base 25: mod_base = OTHER; note = uridine phosphorothioate
  modified_base 28: mod_base = OTHER; note = 2'-O-Methyl-adenosine
  modified_base 29: mod_base = OTHER; note = 2'-O-Methyl-guanosine
  modified_base 30: mod_base = OTHER; note = 2'-O-Methyl-cytidine
  modified_base 31: mod_base = OTHER; note = 2'-O-Methyl-uridine
  modified_base 32: mod_base = OTHER; note = 2'-O-Methyl-adenosine
  modified_base 34: mod_base = OTHER; note = 2'-O-Methyl-adenosine
  modified_base 35: mod_base = OTHER; note = 2'-O-Methyl-adenosine
  modified_base 36: mod_base = OTHER; note = 2'-O-Methyl-adenosine
  modified_base 37: mod_base = OTHER; note = 2'-O-Methyl-uridine
  modified_base 38: mod_base = OTHER; note = 2'-O-Methyl-adenosine
  modified_base 39: mod_base = OTHER; note = 2'-O-Methyl-guanosine
  modified_base 40: mod_base = OTHER; note = 2'-O-Methyl-cytidine
  modified_base 41: mod_base = OTHER; note = 2'-O-Methyl-adenosine
  modified_base 42: mod_base = OTHER; note = 2'-O-Methyl-adenosine
  modified_base 46: mod_base = OTHER; note = 2'-O-Methyl-adenosine
  modified_base 48: mod_base = OTHER; note = 2'-O-Methyl-adenosine
  modified_base 50: mod_base = OTHER; note = 2'-O-Methyl-uridine
  modified_base 52: mod_base = OTHER; note = 2'-O-Methyl-adenosine
  modified_base 53: mod_base = OTHER; note = 2'-O-Methyl-guanosine
  modified_base 54: mod_base = OTHER; note = 2'-O-Methyl-guanosine
  modified_base 55: mod_base = OTHER; note = 2'-O-Methyl-cytidine
  modified_base 56: mod_base = OTHER; note = 2'-O-Methyl-uridine
  modified_base 57: mod_base = OTHER; note = 2'-O-Methyl-adenosine
  modified_base 60: mod_base = OTHER; note = 2'-O-Methyl-cytidine
  modified_base 61: mod_base = OTHER; note = 2'-O-Methyl-cytidine
  modified_base 66: mod_base = OTHER; note = 2'-O-Methyl-uridine
  modified_base 67: mod_base = OTHER; note = 2'-O-Methyl-cytidine
  modified_base 70: mod_base = OTHER; note = 2'-O-Methyl-cytidine
  modified_base 71: mod_base = OTHER; note = 2'-O-Methyl-uridine
  modified_base 72: mod_base = OTHER; note = 2'-O-Methyl-uridine
  modified_base 74: mod_base = OTHER; note = 2'-O-Methyl-adenosine
  modified_base 75: mod_base = OTHER; note = 2'-O-Methyl-adenosine
  modified_base 76: mod_base = OTHER; note = 2'-O-Methyl-adenosine
  modified_base 77: mod_base = OTHER; note = 2'-O-Methyl-adenosine
  modified_base 78: mod_base = OTHER; note = 2'-O-Methyl-adenosine
  modified_base 79: mod_base = OTHER; note = 2'-O-Methyl-guanosine
  modified_base 80: mod_base = OTHER; note = 2'-O-Methyl-uridine
  modified_base 81: mod_base = OTHER; note = 2'-O-Methyl-guanosine
  modified_base 83: mod_base = OTHER; note = 2'-O-Methyl-cytidine
  modified_base 84: mod_base = OTHER; note = 2'-O-Methyl-adenosine
  modified_base 85: mod_base = OTHER; note = 2'-O-Methyl-cytidine
  modified_base 86: mod_base = OTHER; note = 2'-O-Methyl-cytidine
  modified_base 87: mod_base = OTHER; note = 2'-O-Methyl-guanosine
  modified_base 88: mod_base = OTHER; note = 2'-O-Methyl-adenosine
  modified_base 89: mod_base = OTHER; note = 2'-O-Methyl-guanosine
  modified_base 90: mod_base = OTHER; note = 2'-O-Methyl-uridine
  modified_base 91: mod_base = OTHER; note = 2'-O-Methyl-cytidine
  modified_base 92: mod_base = OTHER; note = 2'-O-Methyl-guanosine
  modified_base 93: mod_base = OTHER; note = 2'-O-Methyl-guanosine
  modified_base 94: mod_base = OTHER; note = 2'-O-Methyl-uridine
  modified_base 95: mod_base = OTHER; note = 2'-O-Methyl-guanosine
  modified_base 96: mod_base = OTHER; note = 2'-O-Methyl-cytidine
  modified_base 97: mod_base = OTHER; note = 2'-O-Methyl-uridine phosphorothioate
  modified_base 98: mod_base = OTHER; note = 2'-O-Methyl-uridine phosphorothioate
  modified_base 99: mod_base = OTHER; note = 2'-O-Methyl-uridine phosphorothioate
  modified_base 100: mod_base = OTHER; note = 2'-O-Methyl-uridine

SEQ ID NO: 2535 - RNA, 103 nt, synthetic construct; identical to SEQ ID NO: 1700
  source 1..103: mol_type = other RNA
  modified_base 1: mod_base = OTHER; note = 2'-O-Methyl-cytidine phosphorothioate
  modified_base 2: mod_base = OTHER; note = 2'-O-Methyl-adenosine phosphorothioate
  modified_base 3: mod_base = OTHER; note = 2'-O-Methyl-guanosine
  modified_base 21: mod_base = OTHER; note = 2'-O-Methyl-guanosine
  modified_base 25: mod_base = OTHER; note = uridine phosphorothioate
  modified_base 28: mod_base = OTHER; note = 2'-O-Methyl-adenosine
  modified_base 29: mod_base = OTHER; note = 2'-O-Methyl-guanosine
  modified_base 30: mod_base = OTHER; note = 2'-O-Methyl-cytidine
  modified_base 31: mod_base = OTHER; note = 2'-O-Methyl-uridine
  modified_base 32: mod_base = OTHER; note = 2'-O-Methyl-adenosine
  modified_base 33: mod_base = OTHER; note = 2'-O-Methyl-guanosine
  modified_base 34: mod_base = OTHER; note = 2'-O-Methyl-adenosine
  modified_base 35: mod_base = OTHER; note = 2'-O-Methyl-adenosine
  modified_base 36: mod_base = OTHER; note = 2'-O-Methyl-adenosine
  modified_base 37: mod_base = OTHER; note = 2'-O-Methyl-uridine
  modified_base 38: mod_base = OTHER; note = 2'-O-Methyl-adenosine
  modified_base 39: mod_base = OTHER; note = 2'-O-Methyl-guanosine
  modified_base 40: mod_base = OTHER; note = 2'-O-Methyl-cytidine
  modified_base 41: mod_base = OTHER; note = 2'-O-Methyl-adenosine
  modified_base 42: mod_base = OTHER; note = 2'-O-Methyl-adenosine
  modified_base 46: mod_base = OTHER; note = 2'-O-Methyl-adenosine
  modified_base 48: mod_base = OTHER; note = 2'-O-Methyl-adenosine
  modified_base 50: mod_base = OTHER; note = 2'-O-Methyl-uridine
  modified_base 52: mod_base = OTHER; note = 2'-O-Methyl-adenosine
  modified_base 53: mod_base = OTHER; note = 2'-O-Methyl-guanosine
  modified_base 54: mod_base = OTHER; note = 2'-O-Methyl-guanosine
  modified_base 57: mod_base = OTHER; note = 2'-O-Methyl-adenosine
  modified_base 61: mod_base = OTHER; note = 2'-O-Methyl-cytidine
  modified_base 66: mod_base = OTHER; note = 2'-O-Methyl-uridine
  modified_base 67: mod_base = OTHER; note = 2'-O-Methyl-cytidine
  modified_base 70: mod_base = OTHER; note = 2'-O-Methyl-cytidine
  modified_base 71: mod_base = OTHER; note = 2'-O-Methyl-uridine
  modified_base 72: mod_base = OTHER; note = 2'-O-Methyl-uridine
  modified_base 74: mod_base = OTHER; note = 2'-O-Methyl-adenosine
  modified_base 75: mod_base = OTHER; note = 2'-O-Methyl-adenosine
  modified_base 76: mod_base = OTHER; note = 2'-O-Methyl-adenosine
  modified_base 77: mod_base = OTHER; note = 2'-O-Methyl-adenosine
  modified_base 78: mod_base = OTHER; note = 2'-O-Methyl-adenosine
  modified_base 79: mod_base = OTHER; note = 2'-O-Methyl-guanosine
  modified_base 80: mod_base = OTHER; note = 2'-O-Methyl-uridine
  modified_base 82: mod_base = OTHER; note = 2'-O-Methyl-guanosine
  modified_base 83: mod_base = OTHER; note = 2'-O-Methyl-cytidine
  modified_base 84: mod_base = OTHER; note = 2'-O-Methyl-adenosine
  modified_base 85: mod_base = OTHER; note = 2'-O-Methyl-cytidine
  modified_base 86: mod_base = OTHER; note = 2'-O-Methyl-cytidine
  modified_base 87: mod_base = OTHER; note = 2'-O-Methyl-guanosine
  modified_base 89: mod_base = OTHER; note = 2'-O-Methyl-guanosine
  modified_base 92: mod_base = OTHER; note = 2'-O-Methyl-guanosine
  modified_base 93: mod_base = OTHER; note = 2'-O-Methyl-guanosine
  modified_base 94: mod_base = OTHER; note = 2'-O-Methyl-uridine
  modified_base 95: mod_base = OTHER; note = 2'-O-Methyl-guanosine
  modified_base 96: mod_base = OTHER; note = 2'-O-Methyl-cytidine
  modified_base 97: mod_base = OTHER; note = 2'-O-Methyl-uridine phosphorothioate
  modified_base 98: mod_base = OTHER; note = 2'-O-Methyl-uridine phosphorothioate
  modified_base 99: mod_base = OTHER; note = 2'-O-Methyl-uridine phosphorothioate
  modified_base 100: mod_base = OTHER; note = 2'-O-Methyl-uridine

SEQ ID NO: 2536 - RNA, 103 nt, synthetic construct; identical to SEQ ID NO: 1700
  source 1..103: mol_type = other RNA
  modified_base 1: mod_base = OTHER; note = 2'-O-Methyl-cytidine phosphorothioate
  modified_base 2: mod_base = OTHER; note = 2'-O-Methyl-adenosine phosphorothioate
  modified_base 3: mod_base = OTHER; note = 2'-O-Methyl-guanosine
  modified_base 21: mod_base = OTHER; note = 2'-O-Methyl-guanosine
  modified_base 25: mod_base = OTHER; note = uridine phosphorothioate
  modified_base 28: mod_base = OTHER; note = 2'-O-Methyl-adenosine
  modified_base 29: mod_base = OTHER; note = 2'-O-Methyl-guanosine
  modified_base 30: mod_base = OTHER; note = 2'-O-Methyl-cytidine
  modified_base 31: mod_base = OTHER; note = 2'-O-Methyl-uridine
  modified_base 32: mod_base = OTHER; note = 2'-O-Methyl-adenosine
  modified_base 33: mod_base = OTHER; note = 2'-O-Methyl-guanosine
  modified_base 34: mod_base = OTHER; note = 2'-O-Methyl-adenosine
  modified_base 35: mod_base = OTHER; note = 2'-O-Methyl-adenosine
  modified_base 36: mod_base = OTHER; note = 2'-O-Methyl-adenosine
  modified_base 37: mod_base = OTHER; note = 2'-O-Methyl-uridine
  modified_base 38: mod_base = OTHER; note = 2'-O-Methyl-adenosine
  modified_base 39: mod_base = OTHER; note = 2'-O-Methyl-guanosine
  modified_base 40: mod_base = OTHER; note = 2'-O-Methyl-cytidine
  modified_base 41: mod_base = OTHER; note = 2'-O-Methyl-adenosine
  modified_base 42: mod_base = OTHER; note = 2'-O-Methyl-adenosine
  modified_base 46: mod_base = OTHER; note = 2'-O-Methyl-adenosine
  modified_base 48: mod_base = OTHER; note = 2'-O-Methyl-adenosine
  modified_base 50: mod_base = OTHER; note = 2'-O-Methyl-uridine
  modified_base 52: mod_base = OTHER; note = 2'-O-Methyl-adenosine
  modified_base 53: mod_base = OTHER; note = 2'-O-Methyl-guanosine
  modified_base 54: mod_base = OTHER; note = 2'-O-Methyl-guanosine
  modified_base 55: mod_base = OTHER; note = 2'-O-Methyl-cytidine
  modified_base 56: mod_base = OTHER; note = 2'-O-Methyl-uridine
  modified_base 57: mod_base = OTHER; note = 2'-O-Methyl-adenosine
  modified_base 60: mod_base = OTHER; note = 2'-O-Methyl-cytidine
  modified_base 61: mod_base = OTHER; note = 2'-O-Methyl-cytidine
  modified_base 66: mod_base = OTHER; note = 2'-O-Methyl-uridine
  modified_base 67: mod_base = OTHER; note = 2'-O-Methyl-cytidine
  modified_base 70: mod_base = OTHER; note = 2'-O-Methyl-cytidine
  modified_base 71: mod_base = OTHER; note = 2'-O-Methyl-uridine
  modified_base 72: mod_base = OTHER; note = 2'-O-Methyl-uridine
  modified_base 74: mod_base = OTHER; note = 2'-O-Methyl-adenosine
  modified_base 75: mod_base = OTHER; note = 2'-O-Methyl-adenosine
  modified_base 76: mod_base = OTHER; note = 2'-O-Methyl-adenosine
  modified_base 77: mod_base = OTHER; note = 2'-O-Methyl-adenosine
  modified_base 78: mod_base = OTHER; note = 2'-O-Methyl-adenosine
  modified_base 79: mod_base = OTHER; note = 2'-O-Methyl-guanosine
  modified_base 80: mod_base = OTHER; note = 2'-O-Methyl-uridine
  modified_base 82: mod_base = OTHER; note = 2'-O-Methyl-guanosine
  modified_base 83: mod_base = OTHER; note = 2'-O-Methyl-cytidine
  modified_base 84: mod_base = OTHER; note = 2'-O-Methyl-adenosine
  modified_base 85: mod_base = OTHER; note = 2'-O-Methyl-cytidine
  modified_base 86: mod_base = OTHER; note = 2'-O-Methyl-cytidine
  modified_base 87: mod_base = OTHER; note = 2'-O-Methyl-guanosine
  modified_base 89: mod_base = OTHER; note = 2'-O-Methyl-guanosine
  modified_base 92: mod_base = OTHER; note = 2'-O-Methyl-guanosine
  modified_base 93: mod_base = OTHER; note = 2'-O-Methyl-guanosine
  modified_base 94: mod_base = OTHER; note = 2'-O-Methyl-uridine
  modified_base 95: mod_base = OTHER; note = 2'-O-Methyl-guanosine
  modified_base 96: mod_base = OTHER; note = 2'-O-Methyl-cytidine
  modified_base 97: mod_base = OTHER; note = 2'-O-Methyl-uridine phosphorothioate
  modified_base 98: mod_base = OTHER; note = 2'-O-Methyl-uridine phosphorothioate
  modified_base 99: mod_base = OTHER; note = 2'-O-Methyl-uridine phosphorothioate
  modified_base 100: mod_base = OTHER; note = 2'-O-Methyl-uridine

SEQ ID NO: 2537 - RNA, 103 nt, synthetic construct; identical to SEQ ID NO: 1700
  source 1..103: mol_type = other RNA
  modified_base 1: mod_base = OTHER; note = 2'-O-Methyl-cytidine phosphorothioate
  modified_base 2: mod_base = OTHER; note = 2'-O-Methyl-adenosine phosphorothioate
  modified_base 3: mod_base = OTHER; note = 2'-O-Methyl-guanosine
  modified_base 21: mod_base = OTHER; note = 2'-O-Methyl-guanosine
  modified_base 25: mod_base = OTHER; note = uridine phosphorothioate
  modified_base 28: mod_base = OTHER; note = 2'-O-Methyl-adenosine
  modified_base 29: mod_base = OTHER; note = 2'-O-Methyl-guanosine
  modified_base 30: mod_base = OTHER; note = 2'-O-Methyl-cytidine
  modified_base 31: mod_base = OTHER; note = 2'-O-Methyl-uridine
  modified_base 32: mod_base = OTHER; note = 2'-O-Methyl-adenosine
  modified_base 33: mod_base = OTHER; note = 2'-O-Methyl-guanosine
  modified_base 34: mod_base = OTHER; note = 2'-O-Methyl-adenosine
  modified_base 35: mod_base = OTHER; note = 2'-O-Methyl-adenosine
  modified_base 36: mod_base = OTHER; note = 2'-O-Methyl-adenosine
  modified_base 37: mod_base = OTHER; note = 2'-O-Methyl-uridine
  modified_base 38: mod_base = OTHER; note = 2'-O-Methyl-adenosine
  modified_base 39: mod_base = OTHER; note = 2'-O-Methyl-guanosine
  modified_base 40: mod_base = OTHER; note = 2'-O-Methyl-cytidine
  modified_base 41: mod_base = OTHER; note = 2'-O-Methyl-adenosine
  modified_base 42: mod_base = OTHER; note = 2'-O-Methyl-adenosine
  modified_base 46: mod_base = OTHER; note = 2'-O-Methyl-adenosine
  modified_base 48: mod_base = OTHER; note = 2'-O-Methyl-adenosine
  modified_base 50: mod_base = OTHER; note = 2'-O-Methyl-uridine
  modified_base 52: mod_base = OTHER; note = 2'-O-Methyl-adenosine
  modified_base 53: mod_base = OTHER; note = 2'-O-Methyl-guanosine
  modified_base 54: mod_base = OTHER; note = 2'-O-Methyl-guanosine
  modified_base 57: mod_base = OTHER; note = 2'-O-Methyl-adenosine
  modified_base 61: mod_base = OTHER; note = 2'-O-Methyl-cytidine
  modified_base 66: mod_base = OTHER; note = 2'-O-Methyl-uridine
  modified_base 67: mod_base = OTHER; note = 2'-O-Methyl-cytidine
  modified_base 70: mod_base = OTHER; note = 2'-O-Methyl-cytidine
  modified_base 71: mod_base = OTHER; note = 2'-O-Methyl-uridine
  modified_base 72: mod_base = OTHER; note = 2'-O-Methyl-uridine
  modified_base 73: mod_base = OTHER; note = 2'-O-Methyl-guanosine
  modified_base 74: mod_base = OTHER; note = 2'-O-Methyl-adenosine
  modified_base 75: mod_base = OTHER; note = 2'-O-Methyl-adenosine
  modified_base 76: mod_base = OTHER; note = 2'-O-Methyl-adenosine
  modified_base 77: mod_base = OTHER; note = 2'-O-Methyl-adenosine
  modified_base 78: mod_base = OTHER; note = 2'-O-Methyl-adenosine
  modified_base 79: mod_base = OTHER; note = 2'-O-Methyl-guanosine
  modified_base 80: mod_base = OTHER; note = 2'-O-Methyl-uridine
  modified_base 82: mod_base = OTHER; note = 2'-O-Methyl-guanosine
  modified_base 83: mod_base = OTHER; note = 2'-O-Methyl-cytidine
  modified_base 84: mod_base = OTHER; note = 2'-O-Methyl-adenosine
  modified_base 85: mod_base = OTHER; note = 2'-O-Methyl-cytidine
  modified_base 86: mod_base = OTHER; note = 2'-O-Methyl-cytidine
  modified_base 87: mod_base = OTHER; note = 2'-O-Methyl-guanosine
  modified_base 89: mod_base = OTHER; note = 2'-O-Methyl-guanosine
  modified_base 92: mod_base = OTHER; note = 2'-O-Methyl-guanosine
  modified_base 93: mod_base = OTHER; note = 2'-O-Methyl-guanosine
  modified_base 94: mod_base = OTHER; note = 2'-O-Methyl-uridine
  modified_base 95: mod_base = OTHER; note = 2'-O-Methyl-guanosine
  modified_base 96: mod_base = OTHER; note = 2'-O-Methyl-cytidine
  modified_base 97: mod_base = OTHER; note = 2'-O-Methyl-uridine phosphorothioate
  modified_base 98: mod_base = OTHER; note = 2'-O-Methyl-uridine phosphorothioate
  modified_base 99: mod_base = OTHER; note = 2'-O-Methyl-uridine phosphorothioate
  modified_base 100: mod_base = OTHER; note = 2'-O-Methyl-uridine

SEQ ID NO: 2538 - RNA, 103 nt, synthetic construct; identical to SEQ ID NO: 1700
  source 1..103: mol_type = other RNA
  modified_base 1: mod_base = OTHER; note = 2'-O-Methyl-cytidine phosphorothioate
  modified_base 2: mod_base = OTHER; note = 2'-O-Methyl-adenosine phosphorothioate
  modified_base 3: mod_base = OTHER; note = 2'-O-Methyl-guanosine
  modified_base 21: mod_base = OTHER; note = 2'-O-Methyl-guanosine
  modified_base 25: mod_base = OTHER; note = uridine phosphorothioate
  modified_base 28: mod_base = OTHER; note = 2'-O-Methyl-adenosine
  modified_base 29: mod_base = OTHER; note = 2'-O-Methyl-guanosine
  modified_base 30: mod_base = OTHER; note = 2'-O-Methyl-cytidine
  modified_base 31: mod_base = OTHER; note = 2'-O-Methyl-uridine
  modified_base 32: mod_base = OTHER; note = 2'-O-Methyl-adenosine
  modified_base 33: mod_base = OTHER; note = 2'-O-Methyl-guanosine
  modified_base 34: mod_base = OTHER; note = 2'-O-Methyl-adenosine
  modified_base 35: mod_base = OTHER; note = 2'-O-Methyl-adenosine
  modified_base 36: mod_base = OTHER; note = 2'-O-Methyl-adenosine
  modified_base 37: mod_base = OTHER; note = 2'-O-Methyl-uridine
  modified_base 38: mod_base = OTHER; note = 2'-O-Methyl-adenosine
  modified_base 39: mod_base = OTHER; note = 2'-O-Methyl-guanosine
  modified_base 40: mod_base = OTHER; note = 2'-O-Methyl-cytidine
  modified_base 41: mod_base = OTHER; note = 2'-O-Methyl-adenosine
  modified_base 42: mod_base = OTHER; note = 2'-O-Methyl-adenosine
  modified_base 46: mod_base = OTHER; note = 2'-O-Methyl-adenosine
  modified_base 48: mod_base = OTHER; note = 2'-O-Methyl-adenosine
  modified_base 50: mod_base = OTHER; note = 2'-O-Methyl-uridine
  modified_base 52: mod_base = OTHER; note = 2'-O-Methyl-adenosine
  modified_base 53: mod_base = OTHER; note = 2'-O-Methyl-guanosine
  modified_base 54: mod_base = OTHER; note = 2'-O-Methyl-guanosine
  modified_base 57: mod_base = OTHER; note = 2'-O-Methyl-adenosine
  modified_base 61: mod_base = OTHER; note = 2'-O-Methyl-cytidine
  modified_base 66: mod_base = OTHER; note = 2'-O-Methyl-uridine
  modified_base 67: mod_base = OTHER; note = 2'-O-Methyl-cytidine
  modified_base 70: mod_base = OTHER; note = 2'-O-Methyl-cytidine
  modified_base 71: mod_base = OTHER; note = 2'-O-Methyl-uridine
  modified_base 72: mod_base = OTHER; note = 2'-O-Methyl-uridine
  modified_base 73: mod_base = OTHER; note = 2'-O-Methyl-guanosine
  modified_base 74: mod_base = OTHER; note = 2'-O-Methyl-adenosine
  modified_base 75: mod_base = OTHER; note = 2'-O-Methyl-adenosine
  modified_base 76: mod_base = OTHER; note = 2'-O-Methyl-adenosine
  modified_base 77: mod_base = OTHER; note = 2'-O-Methyl-adenosine
  modified_base 78: mod_base = OTHER; note = 2'-O-Methyl-adenosine
  modified_base 79: mod_base = OTHER; note = 2'-O-Methyl-guanosine
  modified_base 80: mod_base = OTHER; note = 2'-O-Methyl-uridine
  modified_base 82: mod_base = OTHER; note = 2'-O-Methyl-guanosine
  modified_base 83: mod_base = OTHER; note = 2'-O-Methyl-cytidine
  modified_base 84: mod_base = OTHER; note = 2'-O-Methyl-adenosine
  modified_base 85: mod_base = OTHER; note = 2'-O-Methyl-cytidine
  modified_base 86: mod_base = OTHER; note = 2'-O-Methyl-cytidine
  modified_base 87: mod_base = OTHER; note = 2'-O-Methyl-guanosine
  modified_base 89: mod_base = OTHER; note = 2'-O-Methyl-guanosine
  modified_base 91: mod_base = OTHER; note = 2'-O-Methyl-cytidine
  modified_base 92: mod_base = OTHER; note = 2'-O-Methyl-guanosine
  modified_base 93: mod_base = OTHER; note = 2'-O-Methyl-guanosine
  modified_base 94: mod_base = OTHER; note = 2'-O-Methyl-uridine
  modified_base 95: mod_base = OTHER; note = 2'-O-Methyl-guanosine
  modified_base 96: mod_base = OTHER; note = 2'-O-Methyl-cytidine
  modified_base 97: mod_base = OTHER; note = 2'-O-Methyl-uridine phosphorothioate
  modified_base 98: mod_base = OTHER; note = 2'-O-Methyl-uridine phosphorothioate
  modified_base 99: mod_base = OTHER; note = 2'-O-Methyl-uridine phosphorothioate
  modified_base 100: mod_base = OTHER; note = 2'-O-Methyl-uridine

SEQ ID NO: 2539 - RNA, 103 nt, synthetic construct; identical to SEQ ID NO: 1700
  source 1..103: mol_type = other RNA
  modified_base 1: mod_base = OTHER; note = 2'-O-Methyl-cytidine phosphorothioate
  modified_base 2: mod_base = OTHER; note = 2'-O-Methyl-adenosine phosphorothioate
  modified_base 3: mod_base = OTHER; note = 2'-O-Methyl-guanosine
  modified_base 21: mod_base = OTHER; note = 2'-O-Methyl-guanosine
  modified_base 25: mod_base = OTHER; note = uridine phosphorothioate
  modified_base 28: mod_base = OTHER; note = 2'-O-Methyl-adenosine
  modified_base 29: mod_base = OTHER; note = 2'-O-Methyl-guanosine
  modified_base 30: mod_base = OTHER; note = 2'-O-Methyl-cytidine
  modified_base 31: mod_base = OTHER; note = 2'-O-Methyl-uridine
  modified_base 32: mod_base = OTHER; note = 2'-O-Methyl-adenosine
  modified_base 34: mod_base = OTHER; note = 2'-O-Methyl-adenosine
  modified_base 35: mod_base = OTHER; note = 2'-O-Methyl-adenosine
  modified_base 36: mod_base = OTHER; note = 2'-O-Methyl-adenosine
  modified_base 37: mod_base = OTHER; note = 2'-O-Methyl-uridine
  modified_base 38: mod_base = OTHER; note = 2'-O-Methyl-adenosine
  modified_base 39: mod_base = OTHER; note = 2'-O-Methyl-guanosine
  modified_base 40: mod_base = OTHER; note = 2'-O-Methyl-cytidine
  modified_base 41: mod_base = OTHER; note = 2'-O-Methyl-adenosine
  modified_base 42: mod_base = OTHER; note = 2'-O-Methyl-adenosine
  modified_base 46: mod_base = OTHER; note = 2'-O-Methyl-adenosine
  modified_base 48: mod_base = OTHER; note = 2'-O-Methyl-adenosine
  modified_base 50: mod_base = OTHER; note = 2'-O-Methyl-uridine
  modified_base 52: mod_base = OTHER; note = 2'-O-Methyl-adenosine
  modified_base 53: mod_base = OTHER; note = 2'-O-Methyl-guanosine
  modified_base 54: mod_base = OTHER; note = 2'-O-Methyl-guanosine
  modified_base 57: mod_base = OTHER; note = 2'-O-Methyl-adenosine
  modified_base 61: mod_base = OTHER; note = 2'-O-Methyl-cytidine
  modified_base 66: mod_base = OTHER; note = 2'-O-Methyl-uridine
  modified_base 67: mod_base = OTHER; note = 2'-O-Methyl-cytidine
  modified_base 70: mod_base = OTHER; note = 2'-O-Methyl-cytidine
  modified_base 71: mod_base = OTHER; note = 2'-O-Methyl-uridine
  modified_base 72: mod_base = OTHER; note = 2'-O-Methyl-uridine
  modified_base 73: mod_base = OTHER; note = 2'-O-Methyl-guanosine
  modified_base 74: mod_base = OTHER; note = 2'-O-Methyl-adenosine
  modified_base 75: mod_base = OTHER; note = 2'-O-Methyl-adenosine
  modified_base 76: mod_base = OTHER; note = 2'-O-Methyl-adenosine
  modified_base 77: mod_base = OTHER; note = 2'-O-Methyl-adenosine
  modified_base 78: mod_base = OTHER; note = 2'-O-Methyl-adenosine
  modified_base 79: mod_base = OTHER; note = 2'-O-Methyl-guanosine
  modified_base 80: mod_base = OTHER; note = 2'-O-Methyl-uridine
  modified_base 82: mod_base = OTHER; note = 2'-O-Methyl-guanosine
  modified_base 83: mod_base = OTHER; note = 2'-O-Methyl-cytidine
  modified_base 84: mod_base = OTHER; note = 2'-O-Methyl-adenosine
  modified_base 85: mod_base = OTHER; note = 2'-O-Methyl-cytidine
  modified_base 86: mod_base = OTHER; note = 2'-O-Methyl-cytidine
  modified_base 87: mod_base = OTHER; note = 2'-O-Methyl-guanosine
  modified_base 89: mod_base = OTHER; note = 2'-O-Methyl-guanosine
  modified_base 92: mod_base = OTHER; note = 2'-O-Methyl-guanosine
  modified_base 93: mod_base = OTHER; note = 2'-O-Methyl-guanosine
  modified_base 94: mod_base = OTHER; note = 2'-O-Methyl-uridine
  modified_base 95: mod_base = OTHER; note = 2'-O-Methyl-guanosine
  modified_base 96: mod_base = OTHER; note = 2'-O-Methyl-cytidine
  modified_base 97: mod_base = OTHER; note = 2'-O-Methyl-uridine phosphorothioate
  modified_base 98: mod_base = OTHER; note = 2'-O-Methyl-uridine phosphorothioate
  modified_base 99: mod_base = OTHER; note = 2'-O-Methyl-uridine phosphorothioate
  modified_base 100: mod_base = OTHER; note = 2'-O-Methyl-uridine

SEQ ID NO: 2540 - RNA, 103 nt, synthetic construct; identical to SEQ ID NO: 1700
  source 1..103: mol_type = other RNA
  modified_base 1: mod_base = OTHER; note = 2'-O-Methyl-cytidine phosphorothioate
  modified_base 2: mod_base = OTHER; note = 2'-O-Methyl-adenosine phosphorothioate
  modified_base 3: mod_base = OTHER; note = 2'-O-Methyl-guanosine
  modified_base 21: mod_base = OTHER; note = 2'-O-Methyl-guanosine
  modified_base 25: mod_base = OTHER; note = uridine phosphorothioate
  modified_base 28: mod_base = OTHER; note = 2'-O-Methyl-adenosine
  modified_base 29: mod_base = OTHER; note = 2'-O-Methyl-guanosine
  modified_base 30: mod_base = OTHER; note = 2'-O-Methyl-cytidine
  modified_base 31: mod_base = OTHER; note = 2'-O-Methyl-uridine
  modified_base 32: mod_base = OTHER; note = 2'-O-Methyl-adenosine
  modified_base 34: mod_base = OTHER; note = 2'-O-Methyl-adenosine
  modified_base 35: mod_base = OTHER; note = 2'-O-Methyl-adenosine
  modified_base 36: mod_base = OTHER; note = 2'-O-Methyl-adenosine
  modified_base 37: mod_base = OTHER; note = 2'-O-Methyl-uridine
  modified_base 38: mod_base = OTHER; note = 2'-O-Methyl-adenosine
  modified_base 39: mod_base = OTHER; note = 2'-O-Methyl-guanosine
  modified_base 40: mod_base = OTHER; note = 2'-O-Methyl-cytidine
  modified_base 41: mod_base = OTHER; note = 2'-O-Methyl-adenosine
  modified_base 42: mod_base = OTHER; note = 2'-O-Methyl-adenosine
  modified_base 46: mod_base = OTHER; note = 2'-O-Methyl-adenosine
  modified_base 48: mod_base = OTHER; note = 2'-O-Methyl-adenosine
  modified_base 50: mod_base = OTHER; note = 2'-O-Methyl-uridine
  modified_base 52: mod_base = OTHER; note = 2'-O-Methyl-adenosine
  modified_base 53: mod_base = OTHER; note = 2'-O-Methyl-guanosine
  modified_base 54: mod_base = OTHER; note = 2'-O-Methyl-guanosine
  modified_base 57: mod_base = OTHER; note = 2'-O-Methyl-adenosine
  modified_base 61: mod_base = OTHER; note = 2'-O-Methyl-cytidine
  modified_base 66: mod_base = OTHER; note = 2'-O-Methyl-uridine
  modified_base 67: mod_base = OTHER; note = 2'-O-Methyl-cytidine
  modified_base 70: mod_base = OTHER; note = 2'-O-Methyl-cytidine
  modified_base 71: mod_base = OTHER; note = 2'-O-Methyl-uridine
  modified_base 72: mod_base = OTHER; note = 2'-O-Methyl-uridine
  modified_base 73: mod_base = OTHER; note = 2'-O-Methyl-guanosine
  modified_base 74: mod_base = OTHER; note = 2'-O-Methyl-adenosine
  modified_base 75: mod_base = OTHER; note = 2'-O-Methyl-adenosine
  modified_base 76: mod_base = OTHER; note = 2'-O-Methyl-adenosine
  modified_base 77: mod_base = OTHER; note = 2'-O-Methyl-adenosine
  modified_base 78: mod_base = OTHER; note = 2'-O-Methyl-adenosine
  modified_base 79: mod_base = OTHER; note = 2'-O-Methyl-guanosine
  modified_base 80: mod_base = OTHER; note = 2'-O-Methyl-uridine
  modified_base 82: mod_base = OTHER; note = 2'-O-Methyl-guanosine
  modified_base 83: mod_base = OTHER; note = 2'-O-Methyl-cytidine
  modified_base 84: mod_base = OTHER; note = 2'-O-Methyl-adenosine
  modified_base 85: mod_base = OTHER; note = 2'-O-Methyl-cytidine
  modified_base 86: mod_base = OTHER; note = 2'-O-Methyl-cytidine
  modified_base 87: mod_base = OTHER; note = 2'-O-Methyl-guanosine
  modified_base 89: mod_base = OTHER; note = 2'-O-Methyl-guanosine
  modified_base 91: mod_base = OTHER; note = 2'-O-Methyl-cytidine
  modified_base 92: mod_base = OTHER; note = 2'-O-Methyl-guanosine
  modified_base 93: mod_base = OTHER; note = 2'-O-Methyl-guanosine
  modified_base 94: mod_base = OTHER; note = 2'-O-Methyl-uridine
  modified_base 95: mod_base = OTHER; note = 2'-O-Methyl-guanosine
  modified_base 96: mod_base = OTHER; note = 2'-O-Methyl-cytidine
  modified_base 97: mod_base = OTHER; note = 2'-O-Methyl-uridine phosphorothioate
  modified_base 98: mod_base = OTHER; note = 2'-O-Methyl-uridine phosphorothioate
  modified_base 99: mod_base = OTHER; note = 2'-O-Methyl-uridine phosphorothioate
  modified_base 100: mod_base = OTHER; note = 2'-O-Methyl-uridine

SEQ ID NO: 2541 - RNA, 103 nt, synthetic construct; identical to SEQ ID NO: 1700
  source 1..103: mol_type = other RNA
  modified_base 1: mod_base = OTHER; note = 2'-O-Methyl-cytidine phosphorothioate
  modified_base 2: mod_base = OTHER; note = 2'-O-Methyl-adenosine phosphorothioate
  modified_base 3: mod_base = OTHER; note = 2'-O-Methyl-guanosine
  modified_base 21: mod_base = OTHER; note = 2'-O-Methyl-guanosine
  modified_base 25: mod_base = OTHER; note = uridine phosphorothioate
  modified_base 28: mod_base = OTHER; note = 2'-O-Methyl-adenosine
  modified_base 29: mod_base = OTHER; note = 2'-O-Methyl-guanosine
  modified_base 30: mod_base = OTHER; note = 2'-O-Methyl-cytidine
  modified_base 31: mod_base = OTHER; note = 2'-O-Methyl-uridine
  modified_base 32: mod_base = OTHER; note = 2'-O-Methyl-adenosine
  modified_base 34: mod_base = OTHER; note = 2'-O-Methyl-adenosine
  modified_base 35: mod_base = OTHER; note = 2'-O-Methyl-adenosine
  modified_base 36: mod_base = OTHER; note = 2'-O-Methyl-adenosine
  modified_base 37: mod_base = OTHER; note = 2'-O-Methyl-uridine
  modified_base 38: mod_base = OTHER; note = 2'-O-Methyl-adenosine
  modified_base 39: mod_base = OTHER; note = 2'-O-Methyl-guanosine
  modified_base 40: mod_base = OTHER; note = 2'-O-Methyl-cytidine
  modified_base 41: mod_base = OTHER; note = 2'-O-Methyl-adenosine
  modified_base 42: mod_base = OTHER; note = 2'-O-Methyl-adenosine
  modified_base 46: mod_base = OTHER; note = 2'-O-Methyl-adenosine
  modified_base 48: mod_base = OTHER; note = 2'-O-Methyl-adenosine
  modified_base 50: mod_base = OTHER; note = 2'-O-Methyl-uridine
  modified_base 52: mod_base = OTHER; note = 2'-O-Methyl-adenosine
  modified_base 53: mod_base = OTHER; note = 2'-O-Methyl-guanosine
  modified_base 54: mod_base = OTHER; note = 2'-O-Methyl-guanosine
  modified_base 55: mod_base = OTHER; note = 2'-O-Methyl-cytidine
  modified_base 56: mod_base = OTHER; note = 2'-O-Methyl-uridine
  modified_base 57: mod_base = OTHER; note = 2'-O-Methyl-adenosine
  modified_base 60: mod_base = OTHER; note = 2'-O-Methyl-cytidine
  modified_base 61: mod_base = OTHER; note = 2'-O-Methyl-cytidine
  modified_base 66: mod_base = OTHER; note = 2'-O-Methyl-uridine
  modified_base 67: mod_base = OTHER; note = 2'-O-Methyl-cytidine
  modified_base 70: mod_base = OTHER; note = 2'-O-Methyl-cytidine
  modified_base 71: mod_base = OTHER; note = 2'-O-Methyl-uridine
  modified_base 72: mod_base = OTHER; note = 2'-O-Methyl-uridine
  modified_base 74: mod_base = OTHER; note = 2'-O-Methyl-adenosine
  modified_base 75: mod_base = OTHER; note = 2'-O-Methyl-adenosine
  modified_base 76: mod_base = OTHER; note = 2'-O-Methyl-adenosine
  modified_base 77: mod_base = OTHER; note = 2'-O-Methyl-adenosine
  modified_base 78: mod_base = OTHER; note = 2'-O-Methyl-adenosine
  modified_base 79: mod_base = OTHER; note = 2'-O-Methyl-guanosine
  modified_base 80: mod_base = OTHER; note = 2'-O-Methyl-uridine
  modified_base 82: mod_base = OTHER; note = 2'-O-Methyl-guanosine
  modified_base 83: mod_base = OTHER; note = 2'-O-Methyl-cytidine
  modified_base 84: mod_base = OTHER; note = 2'-O-Methyl-adenosine
  modified_base 85: mod_base = OTHER; note = 2'-O-Methyl-cytidine
  modified_base 86: mod_base = OTHER; note = 2'-O-Methyl-cytidine
  modified_base 87: mod_base = OTHER; note = 2'-O-Methyl-guanosine
  modified_base 89: mod_base = OTHER; note = 2'-O-Methyl-guanosine
  modified_base 92: mod_base = OTHER; note = 2'-O-Methyl-guanosine
  modified_base 93: mod_base = OTHER; note = 2'-O-Methyl-guanosine
  modified_base 94: mod_base = OTHER; note = 2'-O-Methyl-uridine
  modified_base 95: mod_base = OTHER; note = 2'-O-Methyl-guanosine
  modified_base 96: mod_base = OTHER; note = 2'-O-Methyl-cytidine
  modified_base 97: mod_base = OTHER; note = 2'-O-Methyl-uridine phosphorothioate
  modified_base 98: mod_base = OTHER; note = 2'-O-Methyl-uridine phosphorothioate
  modified_base 99: mod_base = OTHER; note = 2'-O-Methyl-uridine phosphorothioate
  modified_base 100: mod_base = OTHER; note = 2'-O-Methyl-uridine

SEQ ID NO: 2542 - RNA, 103 nt, synthetic construct; identical to SEQ ID NO: 1643
  source 1..103: mol_type = other RNA
  modified_base 1: mod_base = OTHER; note = 2'-O-Methyl-cytidine phosphorothioate
  modified_base 2: mod_base = OTHER; note = 2'-O-Methyl-cytidine phosphorothioate
  modified_base 3: mod_base = OTHER; note = 2'-O-Methyl-cytidine
  modified_base 21: mod_base = OTHER; note = 2'-O-Methyl-guanosine
  modified_base 28: mod_base = OTHER; note = 2'-O-Methyl-adenosine
  modified_base 29: mod_base = OTHER; note = 2'-O-Methyl-guanosine
  modified_base 30: mod_base = OTHER; note = 2'-O-Methyl-cytidine
  modified_base 31: mod_base = OTHER; note = 2'-O-Methyl-uridine
  modified_base 32: mod_base = OTHER; note = 2'-O-Methyl-adenosine
  modified_base 33: mod_base = OTHER; note = 2'-O-Methyl-guanosine
  modified_base 34: mod_base = OTHER; note = 2'-O-Methyl-adenosine
  modified_base 35: mod_base = OTHER; note = 2'-O-Methyl-adenosine
  modified_base 36: mod_base = OTHER; note = 2'-O-Methyl-adenosine
  modified_base 37: mod_base = OTHER; note = 2'-O-Methyl-uridine
  modified_base 38: mod_base = OTHER; note = 2'-O-Methyl-adenosine
  modified_base 39: mod_base = OTHER; note = 2'-O-Methyl-guanosine
  modified_base 40: mod_base = OTHER; note = 2'-O-Methyl-cytidine
  modified_base 41: mod_base = OTHER; note = 2'-O-Methyl-adenosine
  modified_base 42: mod_base = OTHER; note = 2'-O-Methyl-adenosine
  modified_base 45: mod_base = OTHER; note = uridine phosphorothioate
  modified_base 46: mod_base = OTHER; note = 2'-O-Methyl-adenosine
  modified_base 48: mod_base = OTHER; note = 2'-O-Methyl-adenosine
  modified_base 50: mod_base = OTHER; note = 2'-O-Methyl-uridine
  modified_base 52: mod_base = OTHER; note = 2'-O-Methyl-adenosine
  modified_base 53: mod_base = OTHER; note = 2'-O-Methyl-guanosine
  modified_base 54: mod_base = OTHER; note = 2'-O-Methyl-guanosine
  modified_base 55: mod_base = OTHER; note = 2'-O-Methyl-cytidine
  modified_base 56: mod_base = OTHER; note = 2'-O-Methyl-uridine
  modified_base 57: mod_base = OTHER; note = 2'-O-Methyl-adenosine
  modified_base 60: mod_base = OTHER; note = 2'-O-Methyl-cytidine
  modified_base 61: mod_base = OTHER; note = 2'-O-Methyl-cytidine
  modified_base 64: mod_base = OTHER; note = uridine phosphorothioate
  modified_base 66: mod_base = OTHER; note = 2'-O-Methyl-uridine
  modified_base 67: mod_base = OTHER; note = 2'-O-Methyl-cytidine
  modified_base 70: mod_base = OTHER; note = 2'-O-Methyl-cytidine
  modified_base 71: mod_base = OTHER; note = 2'-O-Methyl-uridine
  modified_base 72: mod_base = OTHER; note = 2'-O-Methyl-uridine
  modified_base 73: mod_base = OTHER; note = 2'-O-Methyl-guanosine
  modified_base 74: mod_base = OTHER; note = 2'-O-Methyl-adenosine
  modified_base 75: mod_base = OTHER; note = 2'-O-Methyl-adenosine
  modified_base 76: mod_base = OTHER; note = 2'-O-Methyl-adenosine
  modified_base 77: mod_base = OTHER; note = 2'-O-Methyl-adenosine
  modified_base 78: mod_base = OTHER; note = 2'-O-Methyl-adenosine
  modified_base 79: mod_base = OTHER; note = 2'-O-Methyl-guanosine
  modified_base 80: mod_base = OTHER; note = 2'-O-Methyl-uridine
  modified_base 81: mod_base = OTHER; note = 2'-O-Methyl-guanosine
  modified_base 83: mod_base = OTHER; note = 2'-O-Methyl-cytidine
  modified_base 84: mod_base = OTHER; note = 2'-O-Methyl-adenosine
  modified_base 85: mod_base = OTHER; note = 2'-O-Methyl-cytidine
  modified_base 86: mod_base = OTHER; note = 2'-O-Methyl-cytidine
  modified_base 87: mod_base = OTHER; note = 2'-O-Methyl-guanosine
  modified_base 88: mod_base = OTHER; note = 2'-O-Methyl-adenosine
  modified_base 89: mod_base = OTHER; note = 2'-O-Methyl-guanosine
  modified_base 90: mod_base = OTHER; note = 2'-O-Methyl-uridine
  modified_base 91: mod_base = OTHER; note = 2'-O-Methyl-cytidine
  modified_base 92: mod_base = OTHER; note = 2'-O-Methyl-guanosine
  modified_base 93: mod_base = OTHER; note = 2'-O-Methyl-guanosine
  modified_base 94: mod_base = OTHER; note = 2'-O-Methyl-uridine
  modified_base 95: mod_base = OTHER; note = 2'-O-Methyl-guanosine
  modified_base 96: mod_base = OTHER; note = 2'-O-Methyl-cytidine
  modified_base 97: mod_base = OTHER; note = 2'-O-Methyl-uridine phosphorothioate
  modified_base 98: mod_base = OTHER; note = 2'-O-Methyl-uridine phosphorothioate
  modified_base 99: mod_base = OTHER; note = 2'-O-Methyl-uridine phosphorothioate
  modified_base 100: mod_base = OTHER; note = 2'-O-Methyl-uridine

SEQ ID NO: 2543 - RNA, 103 nt, synthetic construct; identical to SEQ ID NO: 1643
  source 1..103: mol_type = other RNA
  modified_base 1: mod_base = OTHER; note = 2'-O-Methyl-cytidine phosphorothioate
  modified_base 2: mod_base = OTHER; note = 2'-O-Methyl-cytidine phosphorothioate
  modified_base 3: mod_base = OTHER; note = 2'-O-Methyl-cytidine
  modified_base 21: mod_base = OTHER; note = 2'-O-Methyl-guanosine
  modified_base 28: mod_base = OTHER; note = 2'-O-Methyl-adenosine
  modified_base 29: mod_base = OTHER; note = 2'-O-Methyl-guanosine
  modified_base 30: mod_base = OTHER; note = 2'-O-Methyl-cytidine
  modified_base 31: mod_base = OTHER; note = 2'-O-Methyl-uridine
  modified_base 32: mod_base = OTHER; note = 2'-O-Methyl-adenosine
  modified_base 34: mod_base = OTHER; note = 2'-O-Methyl-adenosine
  modified_base 35: mod_base = OTHER; note = 2'-O-Methyl-adenosine
  modified_base 36: mod_base = OTHER; note = 2'-O-Methyl-adenosine
  modified_base 37: mod_base = OTHER; note = 2'-O-Methyl-uridine
  modified_base 38: mod_base = OTHER; note = 2'-O-Methyl-adenosine
  modified_base 39: mod_base = OTHER; note = 2'-O-Methyl-guanosine
  modified_base 40: mod_base = OTHER; note = 2'-O-Methyl-cytidine
  modified_base 41: mod_base = OTHER; note = 2'-O-Methyl-adenosine
  modified_base 42: mod_base = OTHER; note = 2'-O-Methyl-adenosine
  modified_base 45: mod_base = OTHER; note = uridine phosphorothioate
  modified_base 46: mod_base = OTHER; note = 2'-O-Methyl-adenosine
  modified_base 48: mod_base = OTHER; note = 2'-O-Methyl-adenosine
  modified_base 50: mod_base = OTHER; note = 2'-O-Methyl-uridine
  modified_base 52: mod_base = OTHER; note = 2'-O-Methyl-adenosine
  modified_base 53: mod_base = OTHER; note = 2'-O-Methyl-guanosine
  modified_base 54: mod_base = OTHER; note = 2'-O-Methyl-guanosine
  modified_base 55: mod_base = OTHER; note = 2'-O-Methyl-cytidine
  modified_base 56: mod_base = OTHER; note = 2'-O-Methyl-uridine
  modified_base 57: mod_base = OTHER; note = 2'-O-Methyl-adenosine
  modified_base 60: mod_base = OTHER; note = 2'-O-Methyl-cytidine
  modified_base 61: mod_base = OTHER; note = 2'-O-Methyl-cytidine
  modified_base 64: mod_base = OTHER; note = uridine phosphorothioate
  modified_base 66: mod_base = OTHER; note = 2'-O-Methyl-uridine
  modified_base 67: mod_base = OTHER; note = 2'-O-Methyl-cytidine
  modified_base 70: mod_base = OTHER; note = 2'-O-Methyl-cytidine
  modified_base 71: mod_base = OTHER; note = 2'-O-Methyl-uridine
  modified_base 72: mod_base = OTHER; note = 2'-O-Methyl-uridine
  modified_base 74: mod_base = OTHER; note = 2'-O-Methyl-adenosine
  modified_base 75: mod_base = OTHER; note = 2'-O-Methyl-adenosine
  modified_base 76: mod_base = OTHER; note = 2'-O-Methyl-adenosine
  modified_base 77: mod_base = OTHER; note = 2'-O-Methyl-adenosine
  modified_base 78: mod_base = OTHER; note = 2'-O-Methyl-adenosine
  modified_base 79: mod_base = OTHER; note = 2'-O-Methyl-guanosine
  modified_base 80: mod_base = OTHER; note = 2'-O-Methyl-uridine
  modified_base 81: mod_base = OTHER; note = 2'-O-Methyl-guanosine
  modified_base 83: mod_base = OTHER; note = 2'-O-Methyl-cytidine
  modified_base 84: mod_base = OTHER; note = 2'-O-Methyl-adenosine
  modified_base 85: mod_base = OTHER; note = 2'-O-Methyl-cytidine
  modified_base 86: mod_base = OTHER; note = 2'-O-Methyl-cytidine
  modified_base 87: mod_base = OTHER; note = 2'-O-Methyl-guanosine
  modified_base 88: mod_base = OTHER; note = 2'-O-Methyl-adenosine
  modified_base 89: mod_base = OTHER; note = 2'-O-Methyl-guanosine
  modified_base 90: mod_base = OTHER; note = 2'-O-Methyl-uridine
  modified_base 91: mod_base = OTHER; note = 2'-O-Methyl-cytidine
  modified_base 92: mod_base = OTHER; note = 2'-O-Methyl-guanosine
  modified_base 93: mod_base = OTHER; note = 2'-O-Methyl-guanosine
  modified_base 94: mod_base = OTHER; note = 2'-O-Methyl-uridine
  modified_base 95: mod_base = OTHER; note = 2'-O-Methyl-guanosine
  modified_base 96: mod_base = OTHER; note = 2'-O-Methyl-cytidine
  modified_base 97: mod_base = OTHER; note = 2'-O-Methyl-uridine phosphorothioate
  modified_base 98: mod_base = OTHER; note = 2'-O-Methyl-uridine phosphorothioate
  modified_base 99: mod_base = OTHER; note = 2'-O-Methyl-uridine phosphorothioate
  modified_base 100: mod_base = OTHER; note = 2'-O-Methyl-uridine

SEQ ID NO: 2544 - RNA, 103 nt, synthetic construct; identical to SEQ ID NO: 1699
  source 1..103: mol_type = other RNA
  modified_base 1: mod_base = OTHER; note = 2'-O-Methyl-guanosine phosphorothioate
  modified_base 2: mod_base = OTHER; note = 2'-O-Methyl-adenosine phosphorothioate
  modified_base 3: mod_base = OTHER; note = 2'-O-Methyl-guanosine
  modified_base 21: mod_base = OTHER; note = 2'-O-Methyl-guanosine
  modified_base 28: mod_base = OTHER; note = 2'-O-Methyl-adenosine
  modified_base 29: mod_base = OTHER; note = 2'-O-Methyl-guanosine
  modified_base 30: mod_base = OTHER; note = 2'-O-Methyl-cytidine
  modified_base 31: mod_base = OTHER; note = 2'-O-Methyl-uridine
  modified_base 32: mod_base = OTHER; note = 2'-O-Methyl-adenosine
  modified_base 33: mod_base = OTHER; note = 2'-O-Methyl-guanosine
  modified_base 34: mod_base = OTHER; note = 2'-O-Methyl-adenosine
  modified_base 35: mod_base = OTHER; note = 2'-O-Methyl-adenosine
  modified_base 36: mod_base = OTHER; note = 2'-O-Methyl-adenosine
  modified_base 37: mod_base = OTHER; note = 2'-O-Methyl-uridine
  modified_base 38: mod_base = OTHER; note = 2'-O-Methyl-adenosine
  modified_base 39: mod_base = OTHER; note = 2'-O-Methyl-guanosine
  modified_base 40: mod_base = OTHER; note = 2'-O-Methyl-cytidine
  modified_base 41: mod_base = OTHER; note = 2'-O-Methyl-adenosine
  modified_base 42: mod_base = OTHER; note = 2'-O-Methyl-adenosine
  modified_base 45: mod_base = OTHER; note = uridine phosphorothioate
  modified_base 46: mod_base = OTHER; note = 2'-O-Methyl-adenosine
  modified_base 48: mod_base = OTHER; note = 2'-O-Methyl-adenosine
  modified_base 50: mod_base = OTHER; note = 2'-O-Methyl-uridine
  modified_base 52: mod_base = OTHER; note = 2'-O-Methyl-adenosine
  modified_base 53: mod_base = OTHER; note = 2'-O-Methyl-guanosine
  modified_base 54: mod_base = OTHER; note = 2'-O-Methyl-guanosine
  modified_base 55: mod_base = OTHER; note = 2'-O-Methyl-cytidine
  modified_base 56: mod_base = OTHER; note = 2'-O-Methyl-uridine
  modified_base 57: mod_base = OTHER; note = 2'-O-Methyl-adenosine
  modified_base 60: mod_base = OTHER; note = 2'-O-Methyl-cytidine
  modified_base 61: mod_base = OTHER; note = 2'-O-Methyl-cytidine
  modified_base 64: mod_base = OTHER; note = uridine phosphorothioate
  modified_base 66: mod_base = OTHER; note = 2'-O-Methyl-uridine
  modified_base 67: mod_base = OTHER; note = 2'-O-Methyl-cytidine
  modified_base 70: mod_base = OTHER; note = 2'-O-Methyl-cytidine
  modified_base 71: mod_base = OTHER; note = 2'-O-Methyl-uridine
  modified_base 72: mod_base = OTHER; note = 2'-O-Methyl-uridine
  modified_base 73: mod_base = OTHER; note = 2'-O-Methyl-guanosine
  modified_base 74: mod_base = OTHER; note = 2'-O-Methyl-adenosine
  modified_base 75: mod_base = OTHER; note = 2'-O-Methyl-adenosine
  modified_base 76: mod_base = OTHER; note = 2'-O-Methyl-adenosine
  modified_base 77: mod_base = OTHER; note = 2'-O-Methyl-adenosine
  modified_base 78: mod_base = OTHER; note = 2'-O-Methyl-adenosine
  modified_base 79: mod_base = OTHER; note = 2'-O-Methyl-guanosine
  modified_base 80: mod_base = OTHER; note = 2'-O-Methyl-uridine
  modified_base 81: mod_base = OTHER; note = 2'-O-Methyl-guanosine
  modified_base 83: mod_base = OTHER; note = 2'-O-Methyl-cytidine
  modified_base 84: mod_base = OTHER; note = 2'-O-Methyl-adenosine
  modified_base 85: mod_base = OTHER; note = 2'-O-Methyl-cytidine
  modified_base 86: mod_base = OTHER; note = 2'-O-Methyl-cytidine
  modified_base 87: mod_base = OTHER; note = 2'-O-Methyl-guanosine
  modified_base 88: mod_base = OTHER; note = 2'-O-Methyl-adenosine
  modified_base 89: mod_base = OTHER; note = 2'-O-Methyl-guanosine
  modified_base 90: mod_base = OTHER; note = 2'-O-Methyl-uridine
  modified_base 91: mod_base = OTHER; note = 2'-O-Methyl-cytidine
  modified_base 92: mod_base = OTHER; note = 2'-O-Methyl-guanosine
  modified_base 93: mod_base = OTHER; note = 2'-O-Methyl-guanosine
  modified_base 94: mod_base = OTHER; note = 2'-O-Methyl-uridine
  modified_base 95: mod_base = OTHER; note = 2'-O-Methyl-guanosine
  modified_base 96: mod_base = OTHER; note = 2'-O-Methyl-cytidine
  modified_base 97: mod_base = OTHER; note = 2'-O-Methyl-uridine phosphorothioate
  modified_base 98: mod_base = OTHER; note = 2'-O-Methyl-uridine phosphorothioate
  modified_base 99: mod_base = OTHER; note = 2'-O-Methyl-uridine phosphorothioate
  modified_base 100: mod_base = OTHER; note = 2'-O-Methyl-uridine

SEQ ID NO: 2545 - RNA, 103 nt, synthetic construct; identical to SEQ ID NO: 1699
  source 1..103: mol_type = other RNA
  modified_base 1: mod_base = OTHER; note = 2'-O-Methyl-guanosine phosphorothioate
  modified_base 2: mod_base = OTHER; note = 2'-O-Methyl-adenosine phosphorothioate
  modified_base 3: mod_base = OTHER; note = 2'-O-Methyl-guanosine
  modified_base 21: mod_base = OTHER; note = 2'-O-Methyl-guanosine
  modified_base 28: mod_base = OTHER; note = 2'-O-Methyl-adenosine
  modified_base 29: mod_base = OTHER; note = 2'-O-Methyl-guanosine
  modified_base 30: mod_base = OTHER; note = 2'-O-Methyl-cytidine
  modified_base 31: mod_base = OTHER; note = 2'-O-Methyl-uridine
  modified_base 32: mod_base = OTHER; note = 2'-O-Methyl-adenosine
  modified_base 34: mod_base = OTHER; note = 2'-O-Methyl-adenosine
  modified_base 35: mod_base = OTHER; note = 2'-O-Methyl-adenosine
  modified_base 36: mod_base = OTHER; note = 2'-O-Methyl-adenosine
  modified_base 37: mod_base = OTHER; note = 2'-O-Methyl-uridine
  modified_base 38: mod_base = OTHER; note = 2'-O-Methyl-adenosine
  modified_base 39: mod_base = OTHER; note = 2'-O-Methyl-guanosine
  modified_base 40: mod_base = OTHER; note = 2'-O-Methyl-cytidine
  modified_base 41: mod_base = OTHER; note = 2'-O-Methyl-adenosine
  modified_base 42: mod_base = OTHER; note = 2'-O-Methyl-adenosine
  modified_base 45: mod_base = OTHER; note = uridine phosphorothioate
  modified_base 46: mod_base = OTHER; note = 2'-O-Methyl-adenosine
  modified_base 48: mod_base = OTHER; note = 2'-O-Methyl-adenosine
  modified_base 50: mod_base = OTHER; note = 2'-O-Methyl-uridine
  modified_base 52: mod_base = OTHER; note = 2'-O-Methyl-adenosine
  modified_base 53: mod_base = OTHER; note = 2'-O-Methyl-guanosine
  modified_base 54: mod_base = OTHER; note = 2'-O-Methyl-guanosine
  modified_base 55: mod_base = OTHER; note = 2'-O-Methyl-cytidine
  modified_base 56: mod_base = OTHER; note = 2'-O-Methyl-uridine
  modified_base 57: mod_base = OTHER; note = 2'-O-Methyl-adenosine
  modified_base 60: mod_base = OTHER; note = 2'-O-Methyl-cytidine
  modified_base 61: mod_base = OTHER; note = 2'-O-Methyl-cytidine
  modified_base 64: mod_base = OTHER; note = uridine phosphorothioate
  modified_base 66: mod_base = OTHER; note = 2'-O-Methyl-uridine
  modified_base 67: mod_base = OTHER; note = 2'-O-Methyl-cytidine
  modified_base 70: mod_base = OTHER; note = 2'-O-Methyl-cytidine
  modified_base 71: mod_base = OTHER; note = 2'-O-Methyl-uridine
  modified_base 72: mod_base = OTHER; note = 2'-O-Methyl-uridine
  modified_base 74: mod_base = OTHER; note = 2'-O-Methyl-adenosine
  modified_base 75: mod_base = OTHER; note = 2'-O-Methyl-adenosine
  modified_base 76: mod_base = OTHER; note = 2'-O-Methyl-adenosine
  modified_base 77: mod_base = OTHER; note = 2'-O-Methyl-adenosine
  modified_base 78: mod_base = OTHER; note = 2'-O-Methyl-adenosine
  modified_base 79: mod_base = OTHER; note = 2'-O-Methyl-guanosine
  modified_base 80: mod_base = OTHER; note = 2'-O-Methyl-uridine
  modified_base 81: mod_base = OTHER; note = 2'-O-Methyl-guanosine
  modified_base 83: mod_base = OTHER; note = 2'-O-Methyl-cytidine
  modified_base 84: mod_base = OTHER; note = 2'-O-Methyl-adenosine
  modified_base 85: mod_base = OTHER; note = 2'-O-Methyl-cytidine
  modified_base 86: mod_base = OTHER; note = 2'-O-Methyl-cytidine
  modified_base 87: mod_base = OTHER; note = 2'-O-Methyl-guanosine
  modified_base 88: mod_base = OTHER; note = 2'-O-Methyl-adenosine
  modified_base 89: mod_base = OTHER; note = 2'-O-Methyl-guanosine
  modified_base 90: mod_base = OTHER; note = 2'-O-Methyl-uridine
  modified_base 91: mod_base = OTHER; note = 2'-O-Methyl-cytidine
  modified_base 92: mod_base = OTHER; note = 2'-O-Methyl-guanosine
  modified_base 93: mod_base = OTHER; note = 2'-O-Methyl-guanosine
  modified_base 94: mod_base = OTHER; note = 2'-O-Methyl-uridine
  modified_base 95: mod_base = OTHER; note = 2'-O-Methyl-guanosine
  modified_base 96: mod_base = OTHER; note = 2'-O-Methyl-cytidine
  modified_base 97: mod_base = OTHER; note = 2'-O-Methyl-uridine phosphorothioate
  modified_base 98: mod_base = OTHER; note = 2'-O-Methyl-uridine phosphorothioate
  modified_base 99: mod_base = OTHER; note = 2'-O-Methyl-uridine phosphorothioate
  modified_base 100: mod_base = OTHER; note = 2'-O-Methyl-uridine

SEQ ID NO: 2546 - RNA, 103 nt, synthetic construct; identical to SEQ ID NO: 1700
  source 1..103: mol_type = other RNA
  modified_base 1: mod_base = OTHER; note = 2'-O-Methyl-cytidine phosphorothioate
  modified_base 2: mod_base = OTHER; note = 2'-O-Methyl-adenosine phosphorothioate
  modified_base 3: mod_base = OTHER; note = 2'-O-Methyl-guanosine
  modified_base 21: mod_base = OTHER; note = 2'-O-Methyl-guanosine
  modified_base 28: mod_base = OTHER; note = 2'-O-Methyl-adenosine
  modified_base 29: mod_base = OTHER; note = 2'-O-Methyl-guanosine
  modified_base 30: mod_base = OTHER; note = 2'-O-Methyl-cytidine
  modified_base 31: mod_base = OTHER; note = 2'-O-Methyl-uridine
  modified_base 32: mod_base = OTHER; note = 2'-O-Methyl-adenosine
  modified_base 33: mod_base = OTHER; note = 2'-O-Methyl-guanosine
  modified_base 34: mod_base = OTHER; note = 2'-O-Methyl-adenosine
  modified_base 35: mod_base = OTHER; note = 2'-O-Methyl-adenosine
  modified_base 36: mod_base = OTHER; note = 2'-O-Methyl-adenosine
  modified_base 37: mod_base = OTHER; note = 2'-O-Methyl-uridine
  modified_base 38: mod_base = OTHER; note = 2'-O-Methyl-adenosine
  modified_base 39: mod_base = OTHER; note = 2'-O-Methyl-guanosine
  modified_base 40: mod_base = OTHER; note = 2'-O-Methyl-cytidine
  modified_base 41: mod_base = OTHER; note = 2'-O-Methyl-adenosine
  modified_base 42: mod_base = OTHER; note = 2'-O-Methyl-adenosine
  modified_base 45: mod_base = OTHER; note = uridine phosphorothioate
  modified_base 46: mod_base = OTHER; note = 2'-O-Methyl-adenosine
  modified_base 48: mod_base = OTHER; note = 2'-O-Methyl-adenosine
  modified_base 50: mod_base = OTHER; note = 2'-O-Methyl-uridine
  modified_base 52: mod_base = OTHER; note = 2'-O-Methyl-adenosine
  modified_base 53: mod_base = OTHER; note = 2'-O-Methyl-guanosine
  modified_base 54: mod_base = OTHER; note = 2'-O-Methyl-guanosine
  modified_base 57: mod_base = OTHER; note = 2'-O-Methyl-adenosine
  modified_base 61: mod_base = OTHER; note = 2'-O-Methyl-cytidine
  modified_base 64: mod_base = OTHER; note = uridine phosphorothioate
  modified_base 66: mod_base = OTHER; note = 2'-O-Methyl-uridine
  modified_base 67: mod_base = OTHER; note = 2'-O-Methyl-cytidine
  modified_base 70: mod_base = OTHER; note = 2'-O-Methyl-cytidine
  modified_base 71: mod_base = OTHER; note = 2'-O-Methyl-uridine
  modified_base 72: mod_base = OTHER; note = 2'-O-Methyl-uridine
  modified_base 74: mod_base = OTHER; note = 2'-O-Methyl-adenosine
  modified_base 75: mod_base = OTHER; note = 2'-O-Methyl-adenosine
  modified_base 76: mod_base = OTHER; note = 2'-O-Methyl-adenosine
  modified_base 77: mod_base = OTHER; note = 2'-O-Methyl-adenosine
  modified_base 78: mod_base = OTHER; note = 2'-O-Methyl-adenosine
  modified_base 79: mod_base = OTHER; note = 2'-O-Methyl-guanosine
  modified_base 80: mod_base = OTHER; note = 2'-O-Methyl-uridine
  modified_base 82: mod_base = OTHER; note = 2'-O-Methyl-guanosine
  modified_base 83: mod_base = OTHER; note = 2'-O-Methyl-cytidine
  modified_base 84: mod_base = OTHER; note = 2'-O-Methyl-adenosine
  modified_base 85: mod_base = OTHER; note = 2'-O-Methyl-cytidine
  modified_base 86: mod_base = OTHER; note = 2'-O-Methyl-cytidine
  modified_base 87: mod_base = OTHER; note = 2'-O-Methyl-guanosine
  modified_base 89: mod_base = OTHER; note = 2'-O-Methyl-guanosine
  modified_base 92: mod_base = OTHER; note = 2'-O-Methyl-guanosine
  modified_base 93: mod_base = OTHER; note = 2'-O-Methyl-guanosine
  modified_base 94: mod_base = OTHER; note = 2'-O-Methyl-uridine
  modified_base 95: mod_base = OTHER; note = 2'-O-Methyl-guanosine
  modified_base 96: mod_base = OTHER; note = 2'-O-Methyl-cytidine
  modified_base 97: mod_base = OTHER; note = 2'-O-Methyl-uridine phosphorothioate
  modified_base 98: mod_base = OTHER; note = 2'-O-Methyl-uridine phosphorothioate
  modified_base 99: mod_base = OTHER; note = 2'-O-Methyl-uridine phosphorothioate
  modified_base 100: mod_base = OTHER; note = 2'-O-Methyl-uridine

SEQ ID NO: 2547 - RNA, 103 nt, synthetic construct; identical to SEQ ID NO: 1700
  source 1..103: mol_type = other RNA
  modified_base 1: mod_base = OTHER; note = 2'-O-Methyl-cytidine phosphorothioate
  modified_base 2: mod_base = OTHER; note = 2'-O-Methyl-adenosine phosphorothioate
  modified_base 3: mod_base = OTHER; note = 2'-O-Methyl-guanosine
  modified_base 21: mod_base = OTHER; note = 2'-O-Methyl-guanosine
  modified_base 28: mod_base = OTHER; note = 2'-O-Methyl-adenosine
  modified_base 29: mod_base = OTHER; note = 2'-O-Methyl-guanosine
  modified_base 30: mod_base = OTHER; note = 2'-O-Methyl-cytidine
  modified_base 31: mod_base = OTHER; note = 2'-O-Methyl-uridine
  modified_base 32: mod_base = OTHER; note = 2'-O-Methyl-adenosine
  modified_base 33: mod_base = OTHER; note = 2'-O-Methyl-guanosine
  modified_base 34: mod_base = OTHER; note = 2'-O-Methyl-adenosine
  modified_base 35: mod_base = OTHER; note = 2'-O-Methyl-adenosine
  modified_base 36: mod_base = OTHER; note = 2'-O-Methyl-adenosine
  modified_base 37: mod_base = OTHER; note = 2'-O-Methyl-uridine
  modified_base 38: mod_base = OTHER; note = 2'-O-Methyl-adenosine
  modified_base 39: mod_base = OTHER; note = 2'-O-Methyl-guanosine
  modified_base 40: mod_base = OTHER; note = 2'-O-Methyl-cytidine
  modified_base 41: mod_base = OTHER; note = 2'-O-Methyl-adenosine
  modified_base 42: mod_base = OTHER; note = 2'-O-Methyl-adenosine
  modified_base 45: mod_base = OTHER; note = uridine phosphorothioate
  modified_base 46: mod_base = OTHER; note = 2'-O-Methyl-adenosine
  modified_base 48: mod_base = OTHER; note = 2'-O-Methyl-adenosine
  modified_base 50: mod_base = OTHER; note = 2'-O-Methyl-uridine
  modified_base 52: mod_base = OTHER; note = 2'-O-Methyl-adenosine
  modified_base 53: mod_base = OTHER; note = 2'-O-Methyl-guanosine
  modified_base 54: mod_base = OTHER; note = 2'-O-Methyl-guanosine
  modified_base 55: mod_base = OTHER; note = 2'-O-Methyl-cytidine
  modified_base 56: mod_base = OTHER; note = 2'-O-Methyl-uridine
  modified_base 57: mod_base = OTHER; note = 2'-O-Methyl-adenosine
  modified_base 60: mod_base = OTHER; note = 2'-O-Methyl-cytidine
  modified_base 61: mod_base = OTHER; note = 2'-O-Methyl-cytidine
  modified_base 64: mod_base = OTHER; note = uridine phosphorothioate
  modified_base 66: mod_base = OTHER; note = 2'-O-Methyl-uridine
  modified_base 67: mod_base = OTHER; note = 2'-O-Methyl-cytidine
  modified_base 70: mod_base = OTHER; note = 2'-O-Methyl-cytidine
  modified_base 71: mod_base = OTHER; note = 2'-O-Methyl-uridine
  modified_base 72: mod_base = OTHER; note = 2'-O-Methyl-uridine
  modified_base 74: mod_base = OTHER; note = 2'-O-Methyl-adenosine
  modified_base 75: mod_base = OTHER; note = 2'-O-Methyl-adenosine
  modified_base 76: mod_base = OTHER; note = 2'-O-Methyl-adenosine
  modified_base 77: mod_base = OTHER; note = 2'-O-Methyl-adenosine
  modified_base 78: mod_base = OTHER; note = 2'-O-Methyl-adenosine
  modified_base 79: mod_base = OTHER; note = 2'-O-Methyl-guanosine
  modified_base 80: mod_base = OTHER; note = 2'-O-Methyl-uridine
  modified_base 82: mod_base = OTHER; note = 2'-O-Methyl-guanosine
  modified_base 83: mod_base = OTHER; note = 2'-O-Methyl-cytidine
  modified_base 84: mod_base = OTHER; note = 2'-O-Methyl-adenosine
  modified_base 85: mod_base = OTHER; note = 2'-O-Methyl-cytidine
  modified_base 86: mod_base = OTHER; note = 2'-O-Methyl-cytidine
  modified_base 87: mod_base = OTHER; note = 2'-O-Methyl-guanosine
  modified_base 89: mod_base = OTHER; note = 2'-O-Methyl-guanosine
  modified_base 92: mod_base = OTHER; note = 2'-O-Methyl-guanosine
  modified_base 93: mod_base = OTHER; note = 2'-O-Methyl-guanosine
  modified_base 94: mod_base = OTHER; note = 2'-O-Methyl-uridine
  modified_base 95: mod_base = OTHER; note = 2'-O-Methyl-guanosine
  modified_base 96: mod_base = OTHER; note = 2'-O-Methyl-cytidine
  modified_base 97: mod_base = OTHER; note = 2'-O-Methyl-uridine phosphorothioate
  modified_base 98: mod_base = OTHER; note = 2'-O-Methyl-uridine phosphorothioate
  modified_base 99: mod_base = OTHER; note = 2'-O-Methyl-uridine phosphorothioate
  modified_base 100: mod_base = OTHER; note = 2'-O-Methyl-uridine

SEQ ID NO: 2548 - RNA, 103 nt, synthetic construct; identical to SEQ ID NO: 1700
  source 1..103: mol_type = other RNA
  modified_base 1: mod_base = OTHER; note = 2'-O-Methyl-cytidine phosphorothioate
  modified_base 2: mod_base = OTHER; note = 2'-O-Methyl-adenosine phosphorothioate
  modified_base 3: mod_base = OTHER; note = 2'-O-Methyl-guanosine
  modified_base 21: mod_base = OTHER; note = 2'-O-Methyl-guanosine
  modified_base 28: mod_base = OTHER; note = 2'-O-Methyl-adenosine
  modified_base 29: mod_base = OTHER; note = 2'-O-Methyl-guanosine
  modified_base 30: mod_base = OTHER; note = 2'-O-Methyl-cytidine
  modified_base 31: mod_base = OTHER; note = 2'-O-Methyl-uridine
  modified_base 32: mod_base = OTHER; note = 2'-O-Methyl-adenosine
  modified_base 33: mod_base = OTHER; note = 2'-O-Methyl-guanosine
  modified_base 34: mod_base = OTHER; note = 2'-O-Methyl-adenosine
  modified_base 35: mod_base = OTHER; note = 2'-O-Methyl-adenosine
  modified_base 36: mod_base = OTHER; note = 2'-O-Methyl-adenosine
  modified_base 37: mod_base = OTHER; note = 2'-O-Methyl-uridine
  modified_base 38: mod_base = OTHER; note = 2'-O-Methyl-adenosine
  modified_base 39: mod_base = OTHER; note = 2'-O-Methyl-guanosine
  modified_base 40: mod_base = OTHER; note = 2'-O-Methyl-cytidine
  modified_base 41: mod_base = OTHER; note = 2'-O-Methyl-adenosine
  modified_base 42: mod_base = OTHER; note = 2'-O-Methyl-adenosine
  modified_base 45: mod_base = OTHER; note = uridine phosphorothioate
  modified_base 46: mod_base = OTHER; note = 2'-O-Methyl-adenosine
  modified_base 48: mod_base = OTHER; note = 2'-O-Methyl-adenosine
  modified_base 50: mod_base = OTHER; note = 2'-O-Methyl-uridine
  modified_base 52: mod_base = OTHER; note = 2'-O-Methyl-adenosine
  modified_base 53: mod_base = OTHER; note = 2'-O-Methyl-guanosine
  modified_base 54: mod_base = OTHER; note = 2'-O-Methyl-guanosine
  modified_base 57: mod_base = OTHER; note = 2'-O-Methyl-adenosine
  modified_base 61: mod_base = OTHER; note = 2'-O-Methyl-cytidine
  modified_base 64: mod_base = OTHER; note = uridine phosphorothioate
  modified_base 66: mod_base = OTHER; note = 2'-O-Methyl-uridine
  modified_base 67: mod_base = OTHER; note = 2'-O-Methyl-cytidine
  modified_base 70: mod_base = OTHER; note = 2'-O-Methyl-cytidine
  modified_base 71: mod_base = OTHER; note = 2'-O-Methyl-uridine
  modified_base 72: mod_base = OTHER; note = 2'-O-Methyl-uridine
  modified_base 73: mod_base = OTHER; note = 2'-O-Methyl-guanosine
  modified_base 74: mod_base = OTHER; note = 2'-O-Methyl-adenosine
  modified_base 75: mod_base = OTHER; note = 2'-O-Methyl-adenosine
  modified_base 76: mod_base = OTHER; note = 2'-O-Methyl-adenosine
  modified_base 77: mod_base = OTHER; note = 2'-O-Methyl-adenosine
  modified_base 78: mod_base = OTHER; note = 2'-O-Methyl-adenosine
  modified_base 79: mod_base = OTHER; note = 2'-O-Methyl-guanosine
  modified_base 80: mod_base = OTHER; note = 2'-O-Methyl-uridine
  modified_base 82: mod_base = OTHER; note = 2'-O-Methyl-guanosine
  modified_base 83: mod_base = OTHER; note = 2'-O-Methyl-cytidine
  modified_base 84: mod_base = OTHER; note = 2'-O-Methyl-adenosine
  modified_base 85: mod_base = OTHER; note = 2'-O-Methyl-cytidine
  modified_base 86: mod_base = OTHER; note = 2'-O-Methyl-cytidine
  modified_base 87: mod_base = OTHER; note = 2'-O-Methyl-guanosine
  modified_base 89: mod_base = OTHER; note = 2'-O-Methyl-guanosine
  modified_base 92: mod_base = OTHER; note = 2'-O-Methyl-guanosine
  modified_base 93: mod_base = OTHER; note = 2'-O-Methyl-guanosine
  modified_base 94: mod_base = OTHER; note = 2'-O-Methyl-uridine
  modified_base 95: mod_base = OTHER; note = 2'-O-Methyl-guanosine
  modified_base 96: mod_base = OTHER; note = 2'-O-Methyl-cytidine
  modified_base 97: mod_base = OTHER; note = 2'-O-Methyl-uridine phosphorothioate
  modified_base 98: mod_base = OTHER; note = 2'-O-Methyl-uridine phosphorothioate
  modified_base 99: mod_base = OTHER; note = 2'-O-Methyl-uridine phosphorothioate
  modified_base 100: mod_base = OTHER; note = 2'-O-Methyl-uridine

SEQ ID NO: 2549 - RNA, 103 nt, synthetic construct; identical to SEQ ID NO: 1700
  source 1..103: mol_type = other RNA
  modified_base 1: mod_base = OTHER; note = 2'-O-Methyl-cytidine phosphorothioate
  modified_base 2: mod_base = OTHER; note = 2'-O-Methyl-adenosine phosphorothioate
  modified_base 3: mod_base = OTHER; note = 2'-O-Methyl-guanosine
  modified_base 21: mod_base = OTHER; note = 2'-O-Methyl-guanosine
  modified_base 28: mod_base = OTHER; note = 2'-O-Methyl-adenosine
  modified_base 29: mod_base = OTHER; note = 2'-O-Methyl-guanosine
  modified_base 30: mod_base = OTHER; note = 2'-O-Methyl-cytidine
  modified_base 31: mod_base = OTHER; note = 2'-O-Methyl-uridine
  modified_base 32: mod_base = OTHER; note = 2'-O-Methyl-adenosine
  modified_base 33: mod_base = OTHER; note = 2'-O-Methyl-guanosine
  modified_base 34: mod_base = OTHER; note = 2'-O-Methyl-adenosine
  modified_base 35: mod_base = OTHER; note = 2'-O-Methyl-adenosine
  modified_base 36: mod_base = OTHER; note = 2'-O-Methyl-adenosine
  modified_base 37: mod_base = OTHER; note = 2'-O-Methyl-uridine
  modified_base 38: mod_base = OTHER; note = 2'-O-Methyl-adenosine
  modified_base 39: mod_base = OTHER; note = 2'-O-Methyl-guanosine
  modified_base 40: mod_base = OTHER; note = 2'-O-Methyl-cytidine
  modified_base 41: mod_base = OTHER; note = 2'-O-Methyl-adenosine
  modified_base 42: mod_base = OTHER; note = 2'-O-Methyl-adenosine
  modified_base 45: mod_base = OTHER; note = uridine phosphorothioate
  modified_base 46: mod_base = OTHER; note = 2'-O-Methyl-adenosine
  modified_base 48: mod_base = OTHER; note = 2'-O-Methyl-adenosine
  modified_base 50: mod_base = OTHER; note = 2'-O-Methyl-uridine
  modified_base 52: mod_base = OTHER; note = 2'-O-Methyl-adenosine
  modified_base 53: mod_base = OTHER; note = 2'-O-Methyl-guanosine
  modified_base 54: mod_base = OTHER; note = 2'-O-Methyl-guanosine
  modified_base 57: mod_base = OTHER; note = 2'-O-Methyl-adenosine
  modified_base 61: mod_base = OTHER; note = 2'-O-Methyl-cytidine
  modified_base 64: mod_base = OTHER; note = uridine phosphorothioate
  modified_base 66: mod_base = OTHER; note = 2'-O-Methyl-uridine
  modified_base 67: mod_base = OTHER; note = 2'-O-Methyl-cytidine
  modified_base 70: mod_base = OTHER; note = 2'-O-Methyl-cytidine
  modified_base 71: mod_base = OTHER; note = 2'-O-Methyl-uridine
  modified_base 72: mod_base = OTHER; note = 2'-O-Methyl-uridine
  modified_base 73: mod_base = OTHER; note = 2'-O-Methyl-guanosine
  modified_base 74: mod_base = OTHER; note = 2'-O-Methyl-adenosine
  modified_base 75: mod_base = OTHER; note = 2'-O-Methyl-adenosine
  modified_base 76: mod_base = OTHER; note = 2'-O-Methyl-adenosine
  modified_base 77: mod_base = OTHER; note = 2'-O-Methyl-adenosine
  modified_base 78: mod_base = OTHER; note = 2'-O-Methyl-adenosine
  modified_base 79: mod_base = OTHER; note = 2'-O-Methyl-guanosine
  modified_base 80: mod_base = OTHER; note = 2'-O-Methyl-uridine
  modified_base 82: mod_base = OTHER; note = 2'-O-Methyl-guanosine
  modified_base 83: mod_base = OTHER; note = 2'-O-Methyl-cytidine
  modified_base 84: mod_base = OTHER; note = 2'-O-Methyl-adenosine
  modified_base 85: mod_base = OTHER; note = 2'-O-Methyl-cytidine
  modified_base 86: mod_base = OTHER; note = 2'-O-Methyl-cytidine
  modified_base 87: mod_base = OTHER; note = 2'-O-Methyl-guanosine
  modified_base 89: mod_base = OTHER; note = 2'-O-Methyl-guanosine
  modified_base 91: mod_base = OTHER; note = 2'-O-Methyl-cytidine
  modified_base 92: mod_base = OTHER; note = 2'-O-Methyl-guanosine
  modified_base 93: mod_base = OTHER; note = 2'-O-Methyl-guanosine
  modified_base 94: mod_base = OTHER; note = 2'-O-Methyl-uridine
  modified_base 95: mod_base = OTHER; note = 2'-O-Methyl-guanosine
  modified_base 96: mod_base = OTHER; note = 2'-O-Methyl-cytidine
  modified_base 97: mod_base = OTHER; note = 2'-O-Methyl-uridine phosphorothioate
  modified_base 98: mod_base = OTHER; note = 2'-O-Methyl-uridine phosphorothioate
  modified_base 99: mod_base = OTHER; note = 2'-O-Methyl-uridine phosphorothioate
  modified_base 100: mod_base = OTHER; note = 2'-O-Methyl-uridine

SEQ ID NO: 2550 - RNA, 103 nt, synthetic construct; identical to SEQ ID NO: 1700
  source 1..103: mol_type = other RNA
  modified_base 1: mod_base = OTHER; note = 2'-O-Methyl-cytidine phosphorothioate
  modified_base 2: mod_base = OTHER; note = 2'-O-Methyl-adenosine phosphorothioate
  modified_base 3: mod_base = OTHER; note = 2'-O-Methyl-guanosine
  modified_base 21: mod_base = OTHER; note = 2'-O-Methyl-guanosine
  modified_base 28: mod_base = OTHER; note = 2'-O-Methyl-adenosine
  modified_base 29: mod_base = OTHER; note = 2'-O-Methyl-guanosine
  modified_base 30: mod_base = OTHER; note = 2'-O-Methyl-cytidine
  modified_base 31: mod_base = OTHER; note = 2'-O-Methyl-uridine
  modified_base 32: mod_base = OTHER; note = 2'-O-Methyl-adenosine
  modified_base 34: mod_base = OTHER; note = 2'-O-Methyl-adenosine
  modified_base 35: mod_base = OTHER; note = 2'-O-Methyl-adenosine
  modified_base 36: mod_base = OTHER; note = 2'-O-Methyl-adenosine
  modified_base 37: mod_base = OTHER; note = 2'-O-Methyl-uridine
  modified_base 38: mod_base = OTHER; note = 2'-O-Methyl-adenosine
  modified_base 39: mod_base = OTHER; note = 2'-O-Methyl-guanosine
  modified_base 40: mod_base = OTHER; note = 2'-O-Methyl-cytidine
  modified_base 41: mod_base = OTHER; note = 2'-O-Methyl-adenosine
  modified_base 42: mod_base = OTHER; note = 2'-O-Methyl-adenosine
  modified_base 45: mod_base = OTHER; note = uridine phosphorothioate
  modified_base 46: mod_base = OTHER; note = 2'-O-Methyl-adenosine
  modified_base 48: mod_base = OTHER; note = 2'-O-Methyl-adenosine
  modified_base 50: mod_base = OTHER; note = 2'-O-Methyl-uridine
  modified_base 52: mod_base = OTHER; note = 2'-O-Methyl-adenosine
  modified_base 53: mod_base = OTHER; note = 2'-O-Methyl-guanosine
  modified_base 54: mod_base = OTHER; note = 2'-O-Methyl-guanosine
  modified_base 57: mod_base = OTHER; note = 2'-O-Methyl-adenosine
  modified_base 61: mod_base = OTHER; note = 2'-O-Methyl-cytidine
  modified_base 64: mod_base = OTHER; note = uridine phosphorothioate
  modified_base 66: mod_base = OTHER; note = 2'-O-Methyl-uridine
  modified_base 67: mod_base = OTHER; note = 2'-O-Methyl-cytidine
  modified_base 70: mod_base = OTHER; note = 2'-O-Methyl-cytidine
  modified_base 71: mod_base = OTHER; note = 2'-O-Methyl-uridine
  modified_base 72: mod_base = OTHER; note = 2'-O-Methyl-uridine
  modified_base 73: mod_base = OTHER; note = 2'-O-Methyl-guanosine
  modified_base 74: mod_base = OTHER; note = 2'-O-Methyl-adenosine
  modified_base 75: mod_base = OTHER; note = 2'-O-Methyl-adenosine
  modified_base 76: mod_base = OTHER; note = 2'-O-Methyl-adenosine
  modified_base 77: mod_base = OTHER; note = 2'-O-Methyl-adenosine
  modified_base 78: mod_base = OTHER; note = 2'-O-Methyl-adenosine
  modified_base 79: mod_base = OTHER; note = 2'-O-Methyl-guanosine
  modified_base 80: mod_base = OTHER; note = 2'-O-Methyl-uridine
  modified_base 82: mod_base = OTHER; note = 2'-O-Methyl-guanosine
  modified_base 83: mod_base = OTHER; note = 2'-O-Methyl-cytidine
  modified_base 84: mod_base = OTHER; note = 2'-O-Methyl-adenosine
  modified_base 85: mod_base = OTHER; note = 2'-O-Methyl-cytidine
  modified_base 86: mod_base = OTHER; note = 2'-O-Methyl-cytidine
  modified_base 87: mod_base = OTHER; note = 2'-O-Methyl-guanosine
  modified_base 89: mod_base = OTHER; note = 2'-O-Methyl-guanosine
  modified_base 92: mod_base = OTHER; note = 2'-O-Methyl-guanosine
  modified_base 93: mod_base = OTHER; note = 2'-O-Methyl-guanosine
  modified_base 94: mod_base = OTHER; note = 2'-O-Methyl-uridine
  modified_base 95: mod_base = OTHER; note = 2'-O-Methyl-guanosine
  modified_base 96: mod_base = OTHER; note = 2'-O-Methyl-cytidine
  modified_base 97: mod_base = OTHER; note = 2'-O-Methyl-uridine phosphorothioate
  modified_base 98: mod_base = OTHER; note = 2'-O-Methyl-uridine phosphorothioate
  modified_base 99: mod_base = OTHER; note = 2'-O-Methyl-uridine phosphorothioate
  modified_base 100: mod_base = OTHER; note = 2'-O-Methyl-uridine

SEQ ID NO: 2551 - RNA, 103 nt, synthetic construct; identical to SEQ ID NO: 1700
  source 1..103: mol_type = other RNA
  modified_base 1: mod_base = OTHER; note = 2'-O-Methyl-cytidine phosphorothioate
  modified_base 2: mod_base = OTHER; note = 2'-O-Methyl-adenosine phosphorothioate
  modified_base 3: mod_base = OTHER; note = 2'-O-Methyl-guanosine
  modified_base 21: mod_base = OTHER; note = 2'-O-Methyl-guanosine
  modified_base 28: mod_base = OTHER; note = 2'-O-Methyl-adenosine
  modified_base 29: mod_base = OTHER; note = 2'-O-Methyl-guanosine
  modified_base 30: mod_base = OTHER; note = 2'-O-Methyl-cytidine
  modified_base 31: mod_base = OTHER; note = 2'-O-Methyl-uridine
  modified_base 32: mod_base = OTHER; note = 2'-O-Methyl-adenosine
  modified_base 34: mod_base = OTHER; note = 2'-O-Methyl-adenosine
  modified_base 35: mod_base = OTHER; note = 2'-O-Methyl-adenosine
  modified_base 36: mod_base = OTHER; note = 2'-O-Methyl-adenosine
  modified_base 37: mod_base = OTHER; note = 2'-O-Methyl-uridine
  modified_base 38: mod_base = OTHER; note = 2'-O-Methyl-adenosine
  modified_base 39: mod_base = OTHER; note = 2'-O-Methyl-guanosine
  modified_base 40: mod_base = OTHER; note = 2'-O-Methyl-cytidine
  modified_base 41: mod_base = OTHER; note = 2'-O-Methyl-adenosine
  modified_base 42: mod_base = OTHER; note = 2'-O-Methyl-adenosine
  modified_base 45: mod_base = OTHER; note = uridine phosphorothioate
  modified_base 46: mod_base = OTHER; note = 2'-O-Methyl-adenosine
  modified_base 48: mod_base = OTHER; note = 2'-O-Methyl-adenosine
  modified_base 50: mod_base = OTHER; note = 2'-O-Methyl-uridine
  modified_base 52: mod_base = OTHER; note = 2'-O-Methyl-adenosine
  modified_base 53: mod_base = OTHER; note = 2'-O-Methyl-guanosine
  modified_base 54: mod_base = OTHER; note = 2'-O-Methyl-guanosine
  modified_base 57: mod_base = OTHER; note = 2'-O-Methyl-adenosine
  modified_base 61: mod_base = OTHER; note = 2'-O-Methyl-cytidine
  modified_base 64: mod_base = OTHER; note = uridine phosphorothioate
  modified_base 66: mod_base = OTHER; note = 2'-O-Methyl-uridine
  modified_base 67: mod_base = OTHER; note = 2'-O-Methyl-cytidine
  modified_base 70: mod_base = OTHER; note = 2'-O-Methyl-cytidine
  modified_base 71: mod_base = OTHER; note = 2'-O-Methyl-uridine
  modified_base 72: mod_base = OTHER; note = 2'-O-Methyl-uridine
  modified_base 73: mod_base = OTHER; note = 2'-O-Methyl-guanosine
  modified_base 74: mod_base = OTHER; note = 2'-O-Methyl-adenosine
  modified_base 75: mod_base = OTHER; note = 2'-O-Methyl-adenosine
  modified_base 76: mod_base = OTHER; note = 2'-O-Methyl-adenosine
  modified_base 77: mod_base = OTHER; note = 2'-O-Methyl-adenosine
  modified_base 78: mod_base = OTHER; note = 2'-O-Methyl-adenosine
  modified_base 79: mod_base = OTHER; note = 2'-O-Methyl-guanosine
  modified_base 80: mod_base = OTHER; note = 2'-O-Methyl-uridine
  modified_base 82: mod_base = OTHER; note = 2'-O-Methyl-guanosine
  modified_base 83: mod_base = OTHER; note = 2'-O-Methyl-cytidine
  modified_base 84: mod_base = OTHER; note = 2'-O-Methyl-adenosine
  modified_base 85: mod_base = OTHER; note = 2'-O-Methyl-cytidine
  modified_base 86: mod_base = OTHER; note = 2'-O-Methyl-cytidine
  modified_base 87: mod_base = OTHER; note = 2'-O-Methyl-guanosine
  modified_base 89: mod_base = OTHER; note = 2'-O-Methyl-guanosine
  modified_base 91: mod_base = OTHER; note = 2'-O-Methyl-cytidine
  modified_base 92: mod_base = OTHER; note = 2'-O-Methyl-guanosine
  modified_base 93: mod_base = OTHER; note = 2'-O-Methyl-guanosine
  modified_base 94: mod_base = OTHER; note = 2'-O-Methyl-uridine
  modified_base 95: mod_base = OTHER; note = 2'-O-Methyl-guanosine
  modified_base 96: mod_base = OTHER; note = 2'-O-Methyl-cytidine
  modified_base 97: mod_base = OTHER; note = 2'-O-Methyl-uridine phosphorothioate
  modified_base 98: mod_base = OTHER; note = 2'-O-Methyl-uridine phosphorothioate
  modified_base 99: mod_base = OTHER; note = 2'-O-Methyl-uridine phosphorothioate
  modified_base 100: mod_base = OTHER; note = 2'-O-Methyl-uridine

SEQ ID NO: 2552 - RNA, 103 nt, synthetic construct; identical to SEQ ID NO: 1700
  source 1..103: mol_type = other RNA
  modified_base 1: mod_base = OTHER; note = 2'-O-Methyl-cytidine phosphorothioate
  modified_base 2: mod_base = OTHER; note = 2'-O-Methyl-adenosine phosphorothioate
  modified_base 3: mod_base = OTHER; note = 2'-O-Methyl-guanosine
  modified_base 21: mod_base = OTHER; note = 2'-O-Methyl-guanosine
  modified_base 28: mod_base = OTHER; note = 2'-O-Methyl-adenosine
  modified_base 29: mod_base = OTHER; note = 2'-O-Methyl-guanosine
  modified_base 30: mod_base = OTHER; note = 2'-O-Methyl-cytidine
  modified_base 31: mod_base = OTHER; note = 2'-O-Methyl-uridine
  modified_base 32: mod_base = OTHER; note = 2'-O-Methyl-adenosine
  modified_base 34: mod_base = OTHER; note = 2'-O-Methyl-adenosine
  modified_base 35: mod_base = OTHER; note = 2'-O-Methyl-adenosine
  modified_base 36: mod_base = OTHER; note = 2'-O-Methyl-adenosine
  modified_base 37: mod_base = OTHER; note = 2'-O-Methyl-uridine
  modified_base 38: mod_base = OTHER; note = 2'-O-Methyl-adenosine
  modified_base 39: mod_base = OTHER; note = 2'-O-Methyl-guanosine
  modified_base 40: mod_base = OTHER; note = 2'-O-Methyl-cytidine
  modified_base 41: mod_base = OTHER; note = 2'-O-Methyl-adenosine
  modified_base 42: mod_base = OTHER; note = 2'-O-Methyl-adenosine
  modified_base 45: mod_base = OTHER; note = uridine phosphorothioate
  modified_base 46: mod_base = OTHER; note = 2'-O-Methyl-adenosine
  modified_base 48: mod_base = OTHER; note = 2'-O-Methyl-adenosine
  modified_base 50: mod_base = OTHER; note = 2'-O-Methyl-uridine
  modified_base 52: mod_base = OTHER; note = 2'-O-Methyl-adenosine
  modified_base 53: mod_base = OTHER; note = 2'-O-Methyl-guanosine
  modified_base 54: mod_base = OTHER; note = 2'-O-Methyl-guanosine
  modified_base 55: mod_base = OTHER; note = 2'-O-Methyl-cytidine
  modified_base 56: mod_base = OTHER; note = 2'-O-Methyl-uridine
  modified_base 57: mod_base = OTHER; note = 2'-O-Methyl-adenosine
  modified_base 60: mod_base = OTHER; note = 2'-O-Methyl-cytidine
  modified_base 61: mod_base = OTHER; note = 2'-O-Methyl-cytidine
  modified_base 64: mod_base = OTHER; note = uridine phosphorothioate
  modified_base 66: mod_base = OTHER; note = 2'-O-Methyl-uridine
  modified_base 67: mod_base = OTHER; note = 2'-O-Methyl-cytidine
  modified_base 70: mod_base = OTHER; note = 2'-O-Methyl-cytidine
  modified_base 71: mod_base = OTHER; note = 2'-O-Methyl-uridine
  modified_base 72: mod_base = OTHER; note = 2'-O-Methyl-uridine
  modified_base 74: mod_base = OTHER; note = 2'-O-Methyl-adenosine
  modified_base 75: mod_base = OTHER; note = 2'-O-Methyl-adenosine
  modified_base 76: mod_base = OTHER; note = 2'-O-Methyl-adenosine
  modified_base 77: mod_base = OTHER; note = 2'-O-Methyl-adenosine
  modified_base 78: mod_base = OTHER; note = 2'-O-Methyl-adenosine
  modified_base 79: mod_base = OTHER; note = 2'-O-Methyl-guanosine
  modified_base 80: mod_base = OTHER; note = 2'-O-Methyl-uridine
  modified_base 82: mod_base = OTHER; note = 2'-O-Methyl-guanosine
  modified_base 83: mod_base = OTHER; note = 2'-O-Methyl-cytidine
  modified_base 84: mod_base = OTHER; note = 2'-O-Methyl-adenosine
  modified_base 85: mod_base = OTHER; note = 2'-O-Methyl-cytidine
  modified_base 86: mod_base = OTHER; note = 2'-O-Methyl-cytidine
  modified_base 87: mod_base = OTHER; note = 2'-O-Methyl-guanosine
  modified_base 89: mod_base = OTHER; note = 2'-O-Methyl-guanosine
  modified_base 92: mod_base = OTHER; note = 2'-O-Methyl-guanosine
  modified_base 93: mod_base = OTHER; note = 2'-O-Methyl-guanosine
  modified_base 94: mod_base = OTHER; note = 2'-O-Methyl-uridine
  modified_base 95: mod_base = OTHER; note = 2'-O-Methyl-guanosine
  modified_base 96: mod_base = OTHER; note = 2'-O-Methyl-cytidine
  modified_base 97: mod_base = OTHER; note = 2'-O-Methyl-uridine phosphorothioate
  modified_base 98: mod_base = OTHER; note = 2'-O-Methyl-uridine phosphorothioate
  modified_base 99: mod_base = OTHER; note = 2'-O-Methyl-uridine phosphorothioate
  modified_base 100: mod_base = OTHER; note = 2'-O-Methyl-uridine

SEQ ID NO: 2553 - RNA, 103 nt, synthetic construct; identical to SEQ ID NO: 1643
  source 1..103: mol_type = other RNA
  modified_base 1: mod_base = OTHER; note = 2'-O-Methyl-cytidine phosphorothioate
  modified_base 2: mod_base = OTHER; note = 2'-O-Methyl-cytidine phosphorothioate
  modified_base 3: mod_base = OTHER; note = 2'-O-Methyl-cytidine
  modified_base 21: mod_base = OTHER; note = 2'-O-Methyl-guanosine
  modified_base 25: mod_base = OTHER; note = uridine phosphorothioate
  modified_base 28: mod_base = OTHER; note = 2'-O-Methyl-adenosine
  modified_base 29: mod_base = OTHER; note = 2'-O-Methyl-guanosine
  modified_base 30: mod_base = OTHER; note = 2'-O-Methyl-cytidine
  modified_base 31: mod_base = OTHER; note = 2'-O-Methyl-uridine
  modified_base 32: mod_base = OTHER; note = 2'-O-Methyl-adenosine
  modified_base 33: mod_base = OTHER; note = 2'-O-Methyl-guanosine
  modified_base 34: mod_base = OTHER; note = 2'-O-Methyl-adenosine
  modified_base 35: mod_base = OTHER; note = 2'-O-Methyl-adenosine
  modified_base 36: mod_base = OTHER; note = 2'-O-Methyl-adenosine
  modified_base 37: mod_base = OTHER; note = 2'-O-Methyl-uridine
  modified_base 38: mod_base = OTHER; note = 2'-O-Methyl-adenosine
  modified_base 39: mod_base = OTHER; note = 2'-O-Methyl-guanosine
  modified_base 40: mod_base = OTHER; note = 2'-O-Methyl-cytidine
  modified_base 41: mod_base = OTHER; note = 2'-O-Methyl-adenosine
  modified_base 42: mod_base = OTHER; note = 2'-O-Methyl-adenosine
  modified_base 45: mod_base = OTHER; note = uridine phosphorothioate
  modified_base 46: mod_base = OTHER; note = 2'-O-Methyl-adenosine
  modified_base 48: mod_base = OTHER; note = 2'-O-Methyl-adenosine
  modified_base 50: mod_base = OTHER; note = 2'-O-Methyl-uridine
  modified_base 52: mod_base = OTHER; note = 2'-O-Methyl-adenosine
  modified_base 53: mod_base = OTHER; note = 2'-O-Methyl-guanosine
  modified_base 54: mod_base = OTHER; note = 2'-O-Methyl-guanosine
  modified_base 55: mod_base = OTHER; note = 2'-O-Methyl-cytidine
  modified_base 56: mod_base = OTHER; note = 2'-O-Methyl-uridine
  modified_base 57: mod_base = OTHER; note = 2'-O-Methyl-adenosine
  modified_base 60: mod_base = OTHER; note = 2'-O-Methyl-cytidine
  modified_base 61: mod_base = OTHER; note = 2'-O-Methyl-cytidine
  modified_base 66: mod_base = OTHER; note = 2'-O-Methyl-uridine
  modified_base 67: mod_base = OTHER; note = 2'-O-Methyl-cytidine
  modified_base 70: mod_base = OTHER; note = 2'-O-Methyl-cytidine
  modified_base 71: mod_base = OTHER; note = 2'-O-Methyl-uridine
  modified_base 72: mod_base = OTHER; note = 2'-O-Methyl-uridine
  modified_base 73: mod_base = OTHER; note = 2'-O-Methyl-guanosine
  modified_base 74: mod_base = OTHER; note = 2'-O-Methyl-adenosine
  modified_base 75: mod_base = OTHER; note = 2'-O-Methyl-adenosine
  modified_base 76: mod_base = OTHER; note = 2'-O-Methyl-adenosine
  modified_base 77: mod_base = OTHER; note = 2'-O-Methyl-adenosine
  modified_base 78: mod_base = OTHER; note = 2'-O-Methyl-adenosine
  modified_base 79: mod_base = OTHER; note = 2'-O-Methyl-guanosine
  modified_base 80: mod_base = OTHER; note = 2'-O-Methyl-uridine
  modified_base 81: mod_base = OTHER; note = 2'-O-Methyl-guanosine
  modified_base 83: mod_base = OTHER; note = 2'-O-Methyl-cytidine
  modified_base 84: mod_base = OTHER; note = 2'-O-Methyl-adenosine
  modified_base 85: mod_base = OTHER; note = 2'-O-Methyl-cytidine
  modified_base 86: mod_base = OTHER; note = 2'-O-Methyl-cytidine
  modified_base 87: mod_base = OTHER; note = 2'-O-Methyl-guanosine
  modified_base 88: mod_base = OTHER; note = 2'-O-Methyl-adenosine
  modified_base 89: mod_base = OTHER; note = 2'-O-Methyl-guanosine
  modified_base 90: mod_base = OTHER; note = 2'-O-Methyl-uridine
  modified_base 91: mod_base = OTHER; note = 2'-O-Methyl-cytidine
  modified_base 92: mod_base = OTHER; note = 2'-O-Methyl-guanosine
  modified_base 93: mod_base = OTHER; note = 2'-O-Methyl-guanosine
  modified_base 94: mod_base = OTHER; note = 2'-O-Methyl-uridine
  modified_base 95: mod_base = OTHER; note = 2'-O-Methyl-guanosine
  modified_base 96: mod_base = OTHER; note = 2'-O-Methyl-cytidine
  modified_base 97: mod_base = OTHER; note = 2'-O-Methyl-uridine phosphorothioate
  modified_base 98: mod_base = OTHER; note = 2'-O-Methyl-uridine phosphorothioate
  modified_base 99: mod_base = OTHER; note = 2'-O-Methyl-uridine phosphorothioate
  modified_base 100: mod_base = OTHER; note = 2'-O-Methyl-uridine

SEQ ID NO: 2554 - RNA, 103 nt, synthetic construct; identical to SEQ ID NO: 1643
  source 1..103: mol_type = other RNA
  modified_base 1: mod_base = OTHER; note = 2'-O-Methyl-cytidine phosphorothioate
  modified_base 2: mod_base = OTHER; note = 2'-O-Methyl-cytidine phosphorothioate
  modified_base 3: mod_base = OTHER; note = 2'-O-Methyl-cytidine
  modified_base 21: mod_base = OTHER; note = 2'-O-Methyl-guanosine
  modified_base 25: mod_base = OTHER; note = uridine phosphorothioate
  modified_base 28: mod_base = OTHER; note = 2'-O-Methyl-adenosine
  modified_base 29: mod_base = OTHER; note = 2'-O-Methyl-guanosine
  modified_base 30: mod_base = OTHER; note = 2'-O-Methyl-cytidine
  modified_base 31: mod_base = OTHER; note = 2'-O-Methyl-uridine
  modified_base 32: mod_base = OTHER; note = 2'-O-Methyl-adenosine
  modified_base 34: mod_base = OTHER; note = 2'-O-Methyl-adenosine
  modified_base 35: mod_base = OTHER; note = 2'-O-Methyl-adenosine
  modified_base 36: mod_base = OTHER; note = 2'-O-Methyl-adenosine
  modified_base 37: mod_base = OTHER; note = 2'-O-Methyl-uridine
  modified_base 38: mod_base = OTHER; note = 2'-O-Methyl-adenosine
  modified_base 39: mod_base = OTHER; note = 2'-O-Methyl-guanosine
  modified_base 40: mod_base = OTHER; note = 2'-O-Methyl-cytidine
  modified_base 41: mod_base = OTHER; note = 2'-O-Methyl-adenosine
  modified_base 42: mod_base = OTHER; note = 2'-O-Methyl-adenosine
  modified_base 45: mod_base = OTHER; note = uridine phosphorothioate
  modified_base 46: mod_base = OTHER; note = 2'-O-Methyl-adenosine
  modified_base 48: mod_base = OTHER; note = 2'-O-Methyl-adenosine
  modified_base 50: mod_base = OTHER; note = 2'-O-Methyl-uridine
  modified_base 52: mod_base = OTHER; note = 2'-O-Methyl-adenosine
  modified_base 53: mod_base = OTHER; note = 2'-O-Methyl-guanosine
  modified_base 54: mod_base = OTHER; note = 2'-O-Methyl-guanosine
  modified_base 55: mod_base = OTHER; note = 2'-O-Methyl-cytidine
  modified_base 56: mod_base = OTHER; note = 2'-O-Methyl-uridine
  modified_base 57: mod_base = OTHER; note = 2'-O-Methyl-adenosine
  modified_base 60: mod_base = OTHER; note = 2'-O-Methyl-cytidine
  modified_base 61: mod_base = OTHER; note = 2'-O-Methyl-cytidine
  modified_base 66: mod_base = OTHER; note = 2'-O-Methyl-uridine
  modified_base 67: mod_base = OTHER; note = 2'-O-Methyl-cytidine
  modified_base 70: mod_base = OTHER; note = 2'-O-Methyl-cytidine
  modified_base 71: mod_base = OTHER; note = 2'-O-Methyl-uridine
  modified_base 72: mod_base = OTHER; note = 2'-O-Methyl-uridine
  modified_base 74: mod_base = OTHER; note = 2'-O-Methyl-adenosine
  modified_base 75: mod_base = OTHER; note = 2'-O-Methyl-adenosine
  modified_base 76: mod_base = OTHER; note = 2'-O-Methyl-adenosine
  modified_base 77: mod_base = OTHER; note = 2'-O-Methyl-adenosine
  modified_base 78: mod_base = OTHER; note = 2'-O-Methyl-adenosine
  modified_base 79: mod_base = OTHER; note = 2'-O-Methyl-guanosine
  modified_base 80: mod_base = OTHER; note = 2'-O-Methyl-uridine
  modified_base 81: mod_base = OTHER; note = 2'-O-Methyl-guanosine
  modified_base 83: mod_base = OTHER; note = 2'-O-Methyl-cytidine
  modified_base 84: mod_base = OTHER; note = 2'-O-Methyl-adenosine
  modified_base 85: mod_base = OTHER; note = 2'-O-Methyl-cytidine
  modified_base 86: mod_base = OTHER; note = 2'-O-Methyl-cytidine
  modified_base 87: mod_base = OTHER; note = 2'-O-Methyl-guanosine
  modified_base 88: mod_base = OTHER; note = 2'-O-Methyl-adenosine
  modified_base 89: mod_base = OTHER; note = 2'-O-Methyl-guanosine
  modified_base 90: mod_base = OTHER; note = 2'-O-Methyl-uridine
  modified_base 91: mod_base = OTHER; note = 2'-O-Methyl-cytidine
  modified_base 92: mod_base = OTHER; note = 2'-O-Methyl-guanosine
  modified_base 93: mod_base = OTHER; note = 2'-O-Methyl-guanosine
  modified_base 94: mod_base = OTHER; note = 2'-O-Methyl-uridine
  modified_base 95: mod_base = OTHER; note = 2'-O-Methyl-guanosine
  modified_base 96: mod_base = OTHER; note = 2'-O-Methyl-cytidine
  modified_base 97: mod_base = OTHER; note = 2'-O-Methyl-uridine phosphorothioate
  modified_base 98: mod_base = OTHER; note = 2'-O-Methyl-uridine phosphorothioate
  modified_base 99: mod_base = OTHER; note = 2'-O-Methyl-uridine phosphorothioate
  modified_base 100: mod_base = OTHER; note = 2'-O-Methyl-uridine

SEQ ID NO: 2555 - RNA, 103 nt, synthetic construct; identical to SEQ ID NO: 1699
  source 1..103: mol_type = other RNA
  modified_base 1: mod_base = OTHER; note = 2'-O-Methyl-guanosine phosphorothioate
  modified_base 2: mod_base = OTHER; note = 2'-O-Methyl-adenosine phosphorothioate
  modified_base 3: mod_base = OTHER; note = 2'-O-Methyl-guanosine
  modified_base 21: mod_base = OTHER; note = 2'-O-Methyl-guanosine
  modified_base 25: mod_base = OTHER; note = uridine phosphorothioate
  modified_base 28: mod_base = OTHER; note = 2'-O-Methyl-adenosine
  modified_base 29: mod_base = OTHER; note = 2'-O-Methyl-guanosine
  modified_base 30: mod_base = OTHER; note = 2'-O-Methyl-cytidine
  modified_base 31: mod_base = OTHER; note = 2'-O-Methyl-uridine
  modified_base 32: mod_base = OTHER; note = 2'-O-Methyl-adenosine
  modified_base 33: mod_base = OTHER; note = 2'-O-Methyl-guanosine
  modified_base 34: mod_base = OTHER; note = 2'-O-Methyl-adenosine
  modified_base 35: mod_base = OTHER; note = 2'-O-Methyl-adenosine
  modified_base 36: mod_base = OTHER; note = 2'-O-Methyl-adenosine
  modified_base 37: mod_base = OTHER; note = 2'-O-Methyl-uridine
  modified_base 38: mod_base = OTHER; note = 2'-O-Methyl-adenosine
  modified_base 39: mod_base = OTHER; note = 2'-O-Methyl-guanosine
  modified_base 40: mod_base = OTHER; note = 2'-O-Methyl-cytidine
  modified_base 41: mod_base = OTHER; note = 2'-O-Methyl-adenosine
  modified_base 42: mod_base = OTHER; note = 2'-O-Methyl-adenosine
  modified_base 45: mod_base = OTHER; note = uridine phosphorothioate
  modified_base 46: mod_base = OTHER; note = 2'-O-Methyl-adenosine
  modified_base 48: mod_base = OTHER; note = 2'-O-Methyl-adenosine
  modified_base 50: mod_base = OTHER; note = 2'-O-Methyl-uridine
  modified_base 52: mod_base = OTHER; note = 2'-O-Methyl-adenosine
  modified_base 53: mod_base = OTHER; note = 2'-O-Methyl-guanosine
  modified_base 54: mod_base = OTHER; note = 2'-O-Methyl-guanosine
  modified_base 55: mod_base = OTHER; note = 2'-O-Methyl-cytidine
  modified_base 56: mod_base = OTHER; note = 2'-O-Methyl-uridine
  modified_base 57: mod_base = OTHER; note = 2'-O-Methyl-adenosine
  modified_base 60: mod_base = OTHER; note = 2'-O-Methyl-cytidine
  modified_base 61: mod_base = OTHER; note = 2'-O-Methyl-cytidine
  modified_base 66: mod_base = OTHER; note = 2'-O-Methyl-uridine
  modified_base 67: mod_base = OTHER; note = 2'-O-Methyl-cytidine
  modified_base 70: mod_base = OTHER; note = 2'-O-Methyl-cytidine
  modified_base 71: mod_base = OTHER; note = 2'-O-Methyl-uridine
  modified_base 72: mod_base = OTHER; note = 2'-O-Methyl-uridine
  modified_base 73: mod_base = OTHER; note = 2'-O-Methyl-guanosine
  modified_base 74: mod_base = OTHER; note = 2'-O-Methyl-adenosine
  modified_base 75: mod_base = OTHER; note = 2'-O-Methyl-adenosine
  modified_base 76: mod_base = OTHER; note = 2'-O-Methyl-adenosine
  modified_base 77: mod_base = OTHER; note = 2'-O-Methyl-adenosine
  modified_base 78: mod_base = OTHER; note = 2'-O-Methyl-adenosine
  modified_base 79: mod_base = OTHER; note = 2'-O-Methyl-guanosine
  modified_base 80: mod_base = OTHER; note = 2'-O-Methyl-uridine
  modified_base 81: mod_base = OTHER; note = 2'-O-Methyl-guanosine
  modified_base 83: mod_base = OTHER; note = 2'-O-Methyl-cytidine
  modified_base 84: mod_base = OTHER; note = 2'-O-Methyl-adenosine
  modified_base 85: mod_base = OTHER; note = 2'-O-Methyl-cytidine
  modified_base 86: mod_base = OTHER; note = 2'-O-Methyl-cytidine
  modified_base 87: mod_base = OTHER; note = 2'-O-Methyl-guanosine
  modified_base 88: mod_base = OTHER; note = 2'-O-Methyl-adenosine
  modified_base 89: mod_base = OTHER; note = 2'-O-Methyl-guanosine
  modified_base 90: mod_base = OTHER; note = 2'-O-Methyl-uridine
  modified_base 91: mod_base = OTHER; note = 2'-O-Methyl-cytidine
  modified_base 92: mod_base = OTHER; note = 2'-O-Methyl-guanosine
  modified_base 93: mod_base = OTHER; note = 2'-O-Methyl-guanosine
  modified_base 94: mod_base = OTHER; note = 2'-O-Methyl-uridine
  modified_base 95: mod_base = OTHER; note = 2'-O-Methyl-guanosine
  modified_base 96: mod_base = OTHER; note = 2'-O-Methyl-cytidine
  modified_base 97: mod_base = OTHER; note = 2'-O-Methyl-uridine phosphorothioate
  modified_base 98: mod_base = OTHER; note = 2'-O-Methyl-uridine phosphorothioate
  modified_base 99: mod_base = OTHER; note = 2'-O-Methyl-uridine phosphorothioate
  modified_base 100: mod_base = OTHER; note = 2'-O-Methyl-uridine

SEQ ID NO: 2556 - RNA, 103 nt, synthetic construct; identical to SEQ ID NO: 1699
  source 1..103: mol_type = other RNA
  modified_base 1: mod_base = OTHER; note = 2'-O-Methyl-guanosine phosphorothioate
  modified_base 2: mod_base = OTHER; note = 2'-O-Methyl-adenosine phosphorothioate
  modified_base 3: mod_base = OTHER; note = 2'-O-Methyl-guanosine
  modified_base 21: mod_base = OTHER; note = 2'-O-Methyl-guanosine
  modified_base 25: mod_base = OTHER; note = uridine phosphorothioate
  modified_base 28: mod_base = OTHER; note = 2'-O-Methyl-adenosine
  modified_base 29: mod_base = OTHER; note = 2'-O-Methyl-guanosine
  modified_base 30: mod_base = OTHER; note = 2'-O-Methyl-cytidine
  modified_base 31: mod_base = OTHER; note = 2'-O-Methyl-uridine
  modified_base 32: mod_base = OTHER; note = 2'-O-Methyl-adenosine
  modified_base 34: mod_base = OTHER; note = 2'-O-Methyl-adenosine
  modified_base 35: mod_base = OTHER; note = 2'-O-Methyl-adenosine
  modified_base 36: mod_base = OTHER; note = 2'-O-Methyl-adenosine
  modified_base 37: mod_base = OTHER; note = 2'-O-Methyl-uridine
  modified_base 38: mod_base = OTHER; note = 2'-O-Methyl-adenosine
  modified_base 39: mod_base = OTHER; note = 2'-O-Methyl-guanosine
  modified_base 40: mod_base = OTHER; note = 2'-O-Methyl-cytidine
  modified_base 41: mod_base = OTHER; note = 2'-O-Methyl-adenosine
  modified_base 42: mod_base = OTHER; note = 2'-O-Methyl-adenosine
  modified_base 45: mod_base = OTHER; note = uridine phosphorothioate
  modified_base 46: mod_base = OTHER; note = 2'-O-Methyl-adenosine
  modified_base 48: mod_base = OTHER; note = 2'-O-Methyl-adenosine
  modified_base 50: mod_base = OTHER; note = 2'-O-Methyl-uridine
  modified_base 52: mod_base = OTHER; note = 2'-O-Methyl-adenosine
  modified_base 53: mod_base = OTHER; note = 2'-O-Methyl-guanosine
  modified_base 54: mod_base = OTHER; note = 2'-O-Methyl-guanosine
  modified_base 55: mod_base = OTHER; note = 2'-O-Methyl-cytidine
  modified_base 56: mod_base = OTHER; note = 2'-O-Methyl-uridine
  modified_base 57: mod_base = OTHER; note = 2'-O-Methyl-adenosine
  modified_base 60: mod_base = OTHER; note = 2'-O-Methyl-cytidine
  modified_base 61: mod_base = OTHER; note = 2'-O-Methyl-cytidine
  modified_base 66: mod_base = OTHER; note = 2'-O-Methyl-uridine
  modified_base 67: mod_base = OTHER; note = 2'-O-Methyl-cytidine
  modified_base 70: mod_base = OTHER; note = 2'-O-Methyl-cytidine
  modified_base 71: mod_base = OTHER; note = 2'-O-Methyl-uridine
  modified_base 72: mod_base = OTHER; note = 2'-O-Methyl-uridine
  modified_base 74: mod_base = OTHER; note = 2'-O-Methyl-adenosine
  modified_base 75: mod_base = OTHER; note = 2'-O-Methyl-adenosine
  modified_base 76: mod_base = OTHER; note = 2'-O-Methyl-adenosine
  modified_base 77: mod_base = OTHER; note = 2'-O-Methyl-adenosine
  modified_base 78: mod_base = OTHER; note = 2'-O-Methyl-adenosine
  modified_base 79: mod_base = OTHER; note = 2'-O-Methyl-guanosine
  modified_base 80: mod_base = OTHER; note = 2'-O-Methyl-uridine
  modified_base 81: mod_base = OTHER; note = 2'-O-Methyl-guanosine
  modified_base 83: mod_base = OTHER; note = 2'-O-Methyl-cytidine
  modified_base 84: mod_base = OTHER; note = 2'-O-Methyl-adenosine
  modified_base 85: mod_base = OTHER; note = 2'-O-Methyl-cytidine
  modified_base 86: mod_base = OTHER; note = 2'-O-Methyl-cytidine
  modified_base 87: mod_base = OTHER; note = 2'-O-Methyl-guanosine
  modified_base 88: mod_base = OTHER; note = 2'-O-Methyl-adenosine
  modified_base 89: mod_base = OTHER; note = 2'-O-Methyl-guanosine
  modified_base 90: mod_base = OTHER; note = 2'-O-Methyl-uridine
  modified_base 91: mod_base = OTHER; note = 2'-O-Methyl-cytidine
  modified_base 92: mod_base = OTHER; note = 2'-O-Methyl-guanosine
  modified_base 93: mod_base = OTHER; note = 2'-O-Methyl-guanosine
  modified_base 94: mod_base = OTHER; note = 2'-O-Methyl-uridine
  modified_base 95: mod_base = OTHER; note = 2'-O-Methyl-guanosine
  modified_base 96: mod_base = OTHER; note = 2'-O-Methyl-cytidine
  modified_base 97: mod_base = OTHER; note = 2'-O-Methyl-uridine phosphorothioate
  modified_base 98: mod_base = OTHER; note = 2'-O-Methyl-uridine phosphorothioate
  modified_base 99: mod_base = OTHER; note = 2'-O-Methyl-uridine phosphorothioate
  modified_base 100: mod_base = OTHER; note = 2'-O-Methyl-uridine

SEQ ID NO: 2557 - RNA, 103 nt, synthetic construct; identical to SEQ ID NO: 1700
  source 1..103: mol_type = other RNA
  modified_base 1: mod_base = OTHER; note = 2'-O-Methyl-cytidine phosphorothioate
  modified_base 2: mod_base = OTHER; note = 2'-O-Methyl-adenosine phosphorothioate
  modified_base 3: mod_base = OTHER; note = 2'-O-Methyl-guanosine
  modified_base 21: mod_base = OTHER; note = 2'-O-Methyl-guanosine
  modified_base 25: mod_base = OTHER; note = uridine phosphorothioate
  modified_base 28: mod_base = OTHER; note = 2'-O-Methyl-adenosine
  modified_base 29: mod_base = OTHER; note = 2'-O-Methyl-guanosine
  modified_base 30: mod_base = OTHER; note = 2'-O-Methyl-cytidine
  modified_base 31: mod_base = OTHER; note = 2'-O-Methyl-uridine
  modified_base 32: mod_base = OTHER; note = 2'-O-Methyl-adenosine
  modified_base 33: mod_base = OTHER; note = 2'-O-Methyl-guanosine
  modified_base 34: mod_base = OTHER; note = 2'-O-Methyl-adenosine
  modified_base 35: mod_base = OTHER; note = 2'-O-Methyl-adenosine
  modified_base 36: mod_base = OTHER; note = 2'-O-Methyl-adenosine
  modified_base 37: mod_base = OTHER; note = 2'-O-Methyl-uridine
  modified_base 38: mod_base = OTHER; note = 2'-O-Methyl-adenosine
  modified_base 39: mod_base = OTHER; note = 2'-O-Methyl-guanosine
  modified_base 40: mod_base = OTHER; note = 2'-O-Methyl-cytidine
  modified_base 41: mod_base = OTHER; note = 2'-O-Methyl-adenosine
  modified_base 42: mod_base = OTHER; note = 2'-O-Methyl-adenosine
  modified_base 45: mod_base = OTHER; note = uridine phosphorothioate
  modified_base 46: mod_base = OTHER; note = 2'-O-Methyl-adenosine
  modified_base 48: mod_base = OTHER; note = 2'-O-Methyl-adenosine
  modified_base 50: mod_base = OTHER; note = 2'-O-Methyl-uridine
  modified_base 52: mod_base = OTHER; note = 2'-O-Methyl-adenosine
  modified_base 53: mod_base = OTHER; note = 2'-O-Methyl-guanosine
  modified_base 54: mod_base = OTHER; note = 2'-O-Methyl-guanosine
  modified_base 57: mod_base = OTHER; note = 2'-O-Methyl-adenosine
  modified_base 61: mod_base = OTHER; note = 2'-O-Methyl-cytidine
  modified_base 66: mod_base = OTHER; note = 2'-O-Methyl-uridine
  modified_base 67: mod_base = OTHER; note = 2'-O-Methyl-cytidine
  modified_base 70: mod_base = OTHER; note = 2'-O-Methyl-cytidine
  modified_base 71: mod_base = OTHER; note = 2'-O-Methyl-uridine
  modified_base 72: mod_base = OTHER; note = 2'-O-Methyl-uridine
  modified_base 74: mod_base = OTHER; note = 2'-O-Methyl-adenosine
  modified_base 75: mod_base = OTHER; note = 2'-O-Methyl-adenosine
  modified_base 76: mod_base = OTHER; note = 2'-O-Methyl-adenosine
  modified_base 77: mod_base = OTHER; note = 2'-O-Methyl-adenosine
  modified_base 78: mod_base = OTHER; note = 2'-O-Methyl-adenosine
  modified_base 79: mod_base = OTHER; note = 2'-O-Methyl-guanosine
  modified_base 80: mod_base = OTHER; note = 2'-O-Methyl-uridine
  modified_base 82: mod_base = OTHER; note = 2'-O-Methyl-guanosine
  modified_base 83: mod_base = OTHER; note = 2'-O-Methyl-cytidine
  modified_base 84: mod_base = OTHER; note = 2'-O-Methyl-adenosine
  modified_base 85: mod_base = OTHER; note = 2'-O-Methyl-cytidine
  modified_base 86: mod_base = OTHER; note = 2'-O-Methyl-cytidine
  modified_base 87: mod_base = OTHER; note = 2'-O-Methyl-guanosine
  modified_base 89: mod_base = OTHER; note = 2'-O-Methyl-guanosine
  modified_base 92: mod_base = OTHER; note = 2'-O-Methyl-guanosine
  modified_base 93: mod_base = OTHER; note = 2'-O-Methyl-guanosine
  modified_base 94: mod_base = OTHER; note = 2'-O-Methyl-uridine
  modified_base 95: mod_base = OTHER; note = 2'-O-Methyl-guanosine
  modified_base 96: mod_base = OTHER; note = 2'-O-Methyl-cytidine
  modified_base 97: mod_base = OTHER; note = 2'-O-Methyl-uridine phosphorothioate
  modified_base 98: mod_base = OTHER; note = 2'-O-Methyl-uridine phosphorothioate
  modified_base 99: mod_base = OTHER; note = 2'-O-Methyl-uridine phosphorothioate
  modified_base 100: mod_base = OTHER; note = 2'-O-Methyl-uridine

SEQ ID NO: 2558 - RNA, 103 nt, synthetic construct; identical to SEQ ID NO: 1700
  source 1..103: mol_type = other RNA
  modified_base 1: mod_base = OTHER; note = 2'-O-Methyl-cytidine phosphorothioate
  modified_base 2: mod_base = OTHER; note = 2'-O-Methyl-adenosine phosphorothioate
  modified_base 3: mod_base = OTHER; note = 2'-O-Methyl-guanosine
  modified_base 21: mod_base = OTHER; note = 2'-O-Methyl-guanosine
  modified_base 25: mod_base = OTHER; note = uridine phosphorothioate
  modified_base 28: mod_base = OTHER; note = 2'-O-Methyl-adenosine
  modified_base 29: mod_base = OTHER; note = 2'-O-Methyl-guanosine
  modified_base 30: mod_base = OTHER; note = 2'-O-Methyl-cytidine
  modified_base 31: mod_base = OTHER; note = 2'-O-Methyl-uridine
  modified_base 32: mod_base = OTHER; note = 2'-O-Methyl-adenosine
  modified_base 33: mod_base = OTHER; note = 2'-O-Methyl-guanosine
  modified_base 34: mod_base = OTHER; note = 2'-O-Methyl-adenosine
  modified_base 35: mod_base = OTHER; note = 2'-O-Methyl-adenosine
  modified_base 36: mod_base = OTHER; note = 2'-O-Methyl-adenosine
  modified_base 37: mod_base = OTHER; note = 2'-O-Methyl-uridine
  modified_base 38: mod_base = OTHER; note = 2'-O-Methyl-adenosine
  modified_base 39: mod_base = OTHER; note = 2'-O-Methyl-guanosine
  modified_base 40: mod_base = OTHER; note = 2'-O-Methyl-cytidine
  modified_base 41: mod_base = OTHER; note = 2'-O-Methyl-adenosine
  modified_base 42: mod_base = OTHER; note = 2'-O-Methyl-adenosine
  modified_base 45: mod_base = OTHER; note = uridine phosphorothioate
  modified_base 46: mod_base = OTHER; note = 2'-O-Methyl-adenosine
  modified_base 48: mod_base = OTHER; note = 2'-O-Methyl-adenosine
  modified_base 50: mod_base = OTHER; note = 2'-O-Methyl-uridine
  modified_base 52: mod_base = OTHER; note = 2'-O-Methyl-adenosine
  modified_base 53: mod_base = OTHER; note = 2'-O-Methyl-guanosine
  modified_base 54: mod_base = OTHER; note = 2'-O-Methyl-guanosine
  modified_base 55: mod_base = OTHER; note = 2'-O-Methyl-cytidine
  modified_base 56: mod_base = OTHER; note = 2'-O-Methyl-uridine
  modified_base 57: mod_base = OTHER; note = 2'-O-Methyl-adenosine
  modified_base 60: mod_base = OTHER; note = 2'-O-Methyl-cytidine
  modified_base 61: mod_base = OTHER; note = 2'-O-Methyl-cytidine
  modified_base 66: mod_base = OTHER; note = 2'-O-Methyl-uridine
  modified_base 67: mod_base = OTHER; note = 2'-O-Methyl-cytidine
  modified_base 70: mod_base = OTHER; note = 2'-O-Methyl-cytidine
  modified_base 71: mod_base = OTHER; note = 2'-O-Methyl-uridine
  modified_base 72: mod_base = OTHER; note = 2'-O-Methyl-uridine
  modified_base 74: mod_base = OTHER; note = 2'-O-Methyl-adenosine
  modified_base 75: mod_base = OTHER; note = 2'-O-Methyl-adenosine
  modified_base 76: mod_base = OTHER; note = 2'-O-Methyl-adenosine
  modified_base 77: mod_base = OTHER; note = 2'-O-Methyl-adenosine
  modified_base 78: mod_base = OTHER; note = 2'-O-Methyl-adenosine
  modified_base 79: mod_base = OTHER; note = 2'-O-Methyl-guanosine
  modified_base 80: mod_base = OTHER; note = 2'-O-Methyl-uridine
  modified_base 82: mod_base = OTHER; note = 2'-O-Methyl-guanosine
  modified_base 83: mod_base = OTHER; note = 2'-O-Methyl-cytidine
  modified_base 84: mod_base = OTHER; note = 2'-O-Methyl-adenosine
  modified_base 85: mod_base = OTHER; note = 2'-O-Methyl-cytidine
  modified_base 86: mod_base = OTHER; note = 2'-O-Methyl-cytidine
  modified_base 87: mod_base = OTHER; note = 2'-O-Methyl-guanosine
  modified_base 89: mod_base = OTHER; note = 2'-O-Methyl-guanosine
  modified_base 92: mod_base = OTHER; note = 2'-O-Methyl-guanosine
  modified_base 93: mod_base = OTHER; note = 2'-O-Methyl-guanosine
  modified_base 94: mod_base = OTHER; note = 2'-O-Methyl-uridine
  modified_base 95: mod_base = OTHER; note = 2'-O-Methyl-guanosine
  modified_base 96: mod_base = OTHER; note = 2'-O-Methyl-cytidine
  modified_base 97: mod_base = OTHER; note = 2'-O-Methyl-uridine phosphorothioate
  modified_base 98: mod_base = OTHER; note = 2'-O-Methyl-uridine phosphorothioate
  modified_base 99: mod_base = OTHER; note = 2'-O-Methyl-uridine phosphorothioate
  modified_base 100: mod_base = OTHER; note = 2'-O-Methyl-uridine

SEQ ID NO: 2559 - RNA, 103 nt, synthetic construct; identical to SEQ ID NO: 1700
  source 1..103: mol_type = other RNA
  modified_base 1: mod_base = OTHER; note = 2'-O-Methyl-cytidine phosphorothioate
  modified_base 2: mod_base = OTHER; note = 2'-O-Methyl-adenosine phosphorothioate
  modified_base 3: mod_base = OTHER; note = 2'-O-Methyl-guanosine
  modified_base 21: mod_base = OTHER; note = 2'-O-Methyl-guanosine
  modified_base 25: mod_base = OTHER; note = uridine phosphorothioate
  modified_base 28: mod_base = OTHER; note = 2'-O-Methyl-adenosine
  modified_base 29: mod_base = OTHER; note = 2'-O-Methyl-guanosine
  modified_base 30: mod_base = OTHER; note = 2'-O-Methyl-cytidine
  modified_base 31: mod_base = OTHER; note = 2'-O-Methyl-uridine
  modified_base 32: mod_base = OTHER; note = 2'-O-Methyl-adenosine
  modified_base 33: mod_base = OTHER; note = 2'-O-Methyl-guanosine
  modified_base 34: mod_base = OTHER; note = 2'-O-Methyl-adenosine
  modified_base 35: mod_base = OTHER; note = 2'-O-Methyl-adenosine
  modified_base 36: mod_base = OTHER; note = 2'-O-Methyl-adenosine
  modified_base 37: mod_base = OTHER; note = 2'-O-Methyl-uridine
  modified_base 38: mod_base = OTHER; note = 2'-O-Methyl-adenosine
  modified_base 39: mod_base = OTHER; note = 2'-O-Methyl-guanosine
  modified_base 40: mod_base = OTHER; note = 2'-O-Methyl-cytidine
  modified_base 41: mod_base = OTHER; note = 2'-O-Methyl-adenosine
  modified_base 42: mod_base = OTHER; note = 2'-O-Methyl-adenosine
  modified_base 45: mod_base = OTHER; note = uridine phosphorothioate
  modified_base 46: mod_base = OTHER; note = 2'-O-Methyl-adenosine
  modified_base 48: mod_base = OTHER; note = 2'-O-Methyl-adenosine
  modified_base 50: mod_base = OTHER; note = 2'-O-Methyl-uridine
  modified_base 52: mod_base = OTHER; note = 2'-O-Methyl-adenosine
  modified_base 53: mod_base = OTHER; note = 2'-O-Methyl-guanosine
  modified_base 54: mod_base = OTHER; note = 2'-O-Methyl-guanosine
  modified_base 57: mod_base = OTHER; note = 2'-O-Methyl-adenosine
  modified_base 61: mod_base = OTHER; note = 2'-O-Methyl-cytidine
  modified_base 66: mod_base = OTHER; note = 2'-O-Methyl-uridine
  modified_base 67: mod_base = OTHER; note = 2'-O-Methyl-cytidine
  modified_base 70: mod_base = OTHER; note = 2'-O-Methyl-cytidine
  modified_base 71: mod_base = OTHER; note = 2'-O-Methyl-uridine
  modified_base 72: mod_base = OTHER; note = 2'-O-Methyl-uridine
  modified_base 73: mod_base = OTHER; note = 2'-O-Methyl-guanosine
  modified_base 74: mod_base = OTHER; note = 2'-O-Methyl-adenosine
  modified_base 75: mod_base = OTHER; note = 2'-O-Methyl-adenosine
  modified_base 76: mod_base = OTHER; note = 2'-O-Methyl-adenosine
  modified_base 77: mod_base = OTHER; note = 2'-O-Methyl-adenosine
  modified_base 78: mod_base = OTHER; note = 2'-O-Methyl-adenosine
  modified_base 79: mod_base = OTHER; note = 2'-O-Methyl-guanosine
  modified_base 80: mod_base = OTHER; note = 2'-O-Methyl-uridine
  modified_base 82: mod_base = OTHER; note = 2'-O-Methyl-guanosine
  modified_base 83: mod_base = OTHER; note = 2'-O-Methyl-cytidine
  modified_base 84: mod_base = OTHER; note = 2'-O-Methyl-adenosine
  modified_base 85: mod_base = OTHER; note = 2'-O-Methyl-cytidine
  modified_base 86: mod_base = OTHER; note = 2'-O-Methyl-cytidine
  modified_base 87: mod_base = OTHER; note = 2'-O-Methyl-guanosine
  modified_base 89: mod_base = OTHER; note = 2'-O-Methyl-guanosine
  modified_base 92: mod_base = OTHER; note = 2'-O-Methyl-guanosine
  modified_base 93: mod_base = OTHER; note = 2'-O-Methyl-guanosine
  modified_base 94: mod_base = OTHER; note = 2'-O-Methyl-uridine
  modified_base 95: mod_base = OTHER; note = 2'-O-Methyl-guanosine
  modified_base 96: mod_base = OTHER; note = 2'-O-Methyl-cytidine
  modified_base 97: mod_base = OTHER; note = 2'-O-Methyl-uridine phosphorothioate
  modified_base 98: mod_base = OTHER; note = 2'-O-Methyl-uridine phosphorothioate
  modified_base 99: mod_base = OTHER; note = 2'-O-Methyl-uridine phosphorothioate
  modified_base 100: mod_base = OTHER; note = 2'-O-Methyl-uridine

SEQ ID NO: 2560 - RNA, 103 nt, synthetic construct; identical to SEQ ID NO: 1700
  source 1..103: mol_type = other RNA
  modified_base 1: mod_base = OTHER; note = 2'-O-Methyl-cytidine phosphorothioate
  modified_base 2: mod_base = OTHER; note = 2'-O-Methyl-adenosine phosphorothioate
  modified_base 3: mod_base = OTHER; note = 2'-O-Methyl-guanosine
  modified_base 21: mod_base = OTHER; note = 2'-O-Methyl-guanosine
  modified_base 25: mod_base = OTHER; note = uridine phosphorothioate
  modified_base 28: mod_base = OTHER; note = 2'-O-Methyl-adenosine
  modified_base 29: mod_base = OTHER; note = 2'-O-Methyl-guanosine
  modified_base 30: mod_base = OTHER; note = 2'-O-Methyl-cytidine
  modified_base 31: mod_base = OTHER; note = 2'-O-Methyl-uridine
  modified_base 32: mod_base = OTHER; note = 2'-O-Methyl-adenosine
  modified_base 33: mod_base = OTHER; note = 2'-O-Methyl-guanosine
  modified_base 34: mod_base = OTHER; note = 2'-O-Methyl-adenosine
  modified_base 35: mod_base = OTHER; note = 2'-O-Methyl-adenosine
  modified_base 36: mod_base = OTHER; note = 2'-O-Methyl-adenosine
  modified_base 37: mod_base = OTHER; note = 2'-O-Methyl-uridine
  modified_base 38: mod_base = OTHER; note = 2'-O-Methyl-adenosine
  modified_base 39: mod_base = OTHER; note = 2'-O-Methyl-guanosine
  modified_base 40: mod_base = OTHER; note = 2'-O-Methyl-cytidine
  modified_base 41: mod_base = OTHER; note = 2'-O-Methyl-adenosine
  modified_base 42: mod_base = OTHER; note = 2'-O-Methyl-adenosine
  modified_base 45: mod_base = OTHER; note = uridine phosphorothioate
  modified_base 46: mod_base = OTHER; note = 2'-O-Methyl-adenosine
  modified_base 48: mod_base = OTHER; note = 2'-O-Methyl-adenosine
  modified_base 50: mod_base = OTHER; note = 2'-O-Methyl-uridine
  modified_base 52: mod_base = OTHER; note = 2'-O-Methyl-adenosine
  modified_base 53: mod_base = OTHER; note = 2'-O-Methyl-guanosine
  modified_base 54: mod_base = OTHER; note = 2'-O-Methyl-guanosine
  modified_base 57: mod_base = OTHER; note = 2'-O-Methyl-adenosine
  modified_base 61: mod_base = OTHER; note = 2'-O-Methyl-cytidine
  modified_base 66: mod_base = OTHER; note = 2'-O-Methyl-uridine
  modified_base 67: mod_base = OTHER; note = 2'-O-Methyl-cytidine
  modified_base 70: mod_base = OTHER; note = 2'-O-Methyl-cytidine
  modified_base 71: mod_base = OTHER; note = 2'-O-Methyl-uridine
  modified_base 72: mod_base = OTHER; note = 2'-O-Methyl-uridine
  modified_base 73: mod_base = OTHER; note = 2'-O-Methyl-guanosine
  modified_base 74: mod_base = OTHER; note = 2'-O-Methyl-adenosine
  modified_base 75: mod_base = OTHER; note = 2'-O-Methyl-adenosine
  modified_base 76: mod_base = OTHER; note = 2'-O-Methyl-adenosine
  modified_base 77: mod_base = OTHER; note = 2'-O-Methyl-adenosine
  modified_base 78: mod_base = OTHER; note = 2'-O-Methyl-adenosine
  modified_base 79: mod_base = OTHER; note = 2'-O-Methyl-guanosine
  modified_base 80: mod_base = OTHER; note = 2'-O-Methyl-uridine
  modified_base 82: mod_base = OTHER; note = 2'-O-Methyl-guanosine
  modified_base 83: mod_base = OTHER; note = 2'-O-Methyl-cytidine
  modified_base 84: mod_base = OTHER; note = 2'-O-Methyl-adenosine
  modified_base 85: mod_base = OTHER; note = 2'-O-Methyl-cytidine
  modified_base 86: mod_base = OTHER; note = 2'-O-Methyl-cytidine
  modified_base 87: mod_base = OTHER; note = 2'-O-Methyl-guanosine
  modified_base 89: mod_base = OTHER; note = 2'-O-Methyl-guanosine
  modified_base 91: mod_base = OTHER; note = 2'-O-Methyl-cytidine
  modified_base 92: mod_base = OTHER; note = 2'-O-Methyl-guanosine
  modified_base 93: mod_base = OTHER; note = 2'-O-Methyl-guanosine
  modified_base 94: mod_base = OTHER; note = 2'-O-Methyl-uridine
  modified_base 95: mod_base = OTHER; note = 2'-O-Methyl-guanosine
  modified_base 96: mod_base = OTHER; note = 2'-O-Methyl-cytidine
  modified_base 97: mod_base = OTHER; note = 2'-O-Methyl-uridine phosphorothioate
  modified_base 98: mod_base = OTHER; note = 2'-O-Methyl-uridine phosphorothioate
  modified_base 99: mod_base = OTHER; note = 2'-O-Methyl-uridine phosphorothioate
  modified_base 100: mod_base = OTHER; note = 2'-O-Methyl-uridine

SEQ ID NO: 2561 - RNA, 103 nt, synthetic construct; identical to SEQ ID NO: 1700
  source 1..103: mol_type = other RNA
  modified_base 1: mod_base = OTHER; note = 2'-O-Methyl-cytidine phosphorothioate
  modified_base 2: mod_base = OTHER; note = 2'-O-Methyl-adenosine phosphorothioate
  modified_base 3: mod_base = OTHER; note = 2'-O-Methyl-guanosine
  modified_base 21: mod_base = OTHER; note = 2'-O-Methyl-guanosine
  modified_base 25: mod_base = OTHER; note = uridine phosphorothioate
  modified_base 28: mod_base = OTHER; note = 2'-O-Methyl-adenosine
  modified_base 29: mod_base = OTHER; note = 2'-O-Methyl-guanosine
  modified_base 30: mod_base = OTHER; note = 2'-O-Methyl-cytidine
  modified_base 31: mod_base = OTHER; note = 2'-O-Methyl-uridine
  modified_base 32: mod_base = OTHER; note = 2'-O-Methyl-adenosine
  modified_base 34: mod_base = OTHER; note = 2'-O-Methyl-adenosine
  modified_base 35: mod_base = OTHER; note = 2'-O-Methyl-adenosine
  modified_base 36: mod_base = OTHER; note = 2'-O-Methyl-adenosine
  modified_base 37: mod_base = OTHER; note = 2'-O-Methyl-uridine
  modified_base 38: mod_base = OTHER; note = 2'-O-Methyl-adenosine
  modified_base 39: mod_base = OTHER; note = 2'-O-Methyl-guanosine
  modified_base 40: mod_base = OTHER; note = 2'-O-Methyl-cytidine
  modified_base 41: mod_base = OTHER; note = 2'-O-Methyl-adenosine
  modified_base 42: mod_base = OTHER; note = 2'-O-Methyl-adenosine
  modified_base 45: mod_base = OTHER; note = uridine phosphorothioate
  modified_base 46: mod_base = OTHER; note = 2'-O-Methyl-adenosine
  modified_base 48: mod_base = OTHER; note = 2'-O-Methyl-adenosine
  modified_base 50: mod_base = OTHER; note = 2'-O-Methyl-uridine
  modified_base 52: mod_base = OTHER; note = 2'-O-Methyl-adenosine
  modified_base 53: mod_base = OTHER; note = 2'-O-Methyl-guanosine
  modified_base 54: mod_base = OTHER; note = 2'-O-Methyl-guanosine
  modified_base 57: mod_base = OTHER; note = 2'-O-Methyl-adenosine
  modified_base 61: mod_base = OTHER; note = 2'-O-Methyl-cytidine
  modified_base 66: mod_base = OTHER; note = 2'-O-Methyl-uridine
  modified_base 67: mod_base = OTHER; note = 2'-O-Methyl-cytidine
  modified_base 70: mod_base = OTHER; note = 2'-O-Methyl-cytidine
  modified_base 71: mod_base = OTHER; note = 2'-O-Methyl-uridine
  modified_base 72: mod_base = OTHER; note = 2'-O-Methyl-uridine
  modified_base 73: mod_base = OTHER; note = 2'-O-Methyl-guanosine
  modified_base 74: mod_base = OTHER; note = 2'-O-Methyl-adenosine
  modified_base 75: mod_base = OTHER; note = 2'-O-Methyl-adenosine
  modified_base 76: mod_base = OTHER; note = 2'-O-Methyl-adenosine
  modified_base 77: mod_base = OTHER; note = 2'-O-Methyl-adenosine
  modified_base 78: mod_base = OTHER; note = 2'-O-Methyl-adenosine
  modified_base 79: mod_base = OTHER; note = 2'-O-Methyl-guanosine
  modified_base 80: mod_base = OTHER; note = 2'-O-Methyl-uridine
  modified_base 82: mod_base = OTHER; note = 2'-O-Methyl-guanosine
  modified_base 83: mod_base = OTHER; note = 2'-O-Methyl-cytidine
  modified_base 84: mod_base = OTHER; note = 2'-O-Methyl-adenosine
  modified_base 85: mod_base = OTHER; note = 2'-O-Methyl-cytidine
  modified_base 86: mod_base = OTHER; note = 2'-O-Methyl-cytidine
  modified_base 87: mod_base = OTHER; note = 2'-O-Methyl-guanosine
  modified_base 89: mod_base = OTHER; note = 2'-O-Methyl-guanosine
  modified_base 92: mod_base = OTHER; note = 2'-O-Methyl-guanosine
  modified_base 93: mod_base = OTHER; note = 2'-O-Methyl-guanosine
  modified_base 94: mod_base = OTHER; note = 2'-O-Methyl-uridine
  modified_base 95: mod_base = OTHER; note = 2'-O-Methyl-guanosine
  modified_base 96: mod_base = OTHER; note = 2'-O-Methyl-cytidine
  modified_base 97: mod_base = OTHER; note = 2'-O-Methyl-uridine phosphorothioate
  modified_base 98: mod_base = OTHER; note = 2'-O-Methyl-uridine phosphorothioate
  modified_base 99: mod_base = OTHER; note = 2'-O-Methyl-uridine phosphorothioate
  modified_base 100: mod_base = OTHER; note = 2'-O-Methyl-uridine

SEQ ID NO: 2562 - RNA, 103 nt, synthetic construct; identical to SEQ ID NO: 1700
  source 1..103: mol_type = other RNA
  modified_base 1: mod_base = OTHER; note = 2'-O-Methyl-cytidine phosphorothioate
  modified_base 2: mod_base = OTHER; note = 2'-O-Methyl-adenosine phosphorothioate
  modified_base 3: mod_base = OTHER; note = 2'-O-Methyl-guanosine
  modified_base 21: mod_base = OTHER; note = 2'-O-Methyl-guanosine
  modified_base 25: mod_base = OTHER; note = uridine phosphorothioate
  modified_base 28: mod_base = OTHER; note = 2'-O-Methyl-adenosine
  modified_base 29: mod_base = OTHER; note = 2'-O-Methyl-guanosine
  modified_base 30: mod_base = OTHER; note = 2'-O-Methyl-cytidine
  modified_base 31: mod_base = OTHER; note = 2'-O-Methyl-uridine
  modified_base 32: mod_base = OTHER; note = 2'-O-Methyl-adenosine
  modified_base 34: mod_base = OTHER; note = 2'-O-Methyl-adenosine
  modified_base 35: mod_base = OTHER; note = 2'-O-Methyl-adenosine
  modified_base 36: mod_base = OTHER; note = 2'-O-Methyl-adenosine
  modified_base 37: mod_base = OTHER; note = 2'-O-Methyl-uridine
  modified_base 38: mod_base = OTHER; note = 2'-O-Methyl-adenosine
  modified_base 39: mod_base = OTHER; note = 2'-O-Methyl-guanosine
  modified_base 40: mod_base = OTHER; note = 2'-O-Methyl-cytidine
  modified_base 41: mod_base = OTHER; note = 2'-O-Methyl-adenosine
  modified_base 42: mod_base = OTHER; note = 2'-O-Methyl-adenosine
  modified_base 45: mod_base = OTHER; note = uridine phosphorothioate
  modified_base 46: mod_base = OTHER; note = 2'-O-Methyl-adenosine
  modified_base 48: mod_base = OTHER; note = 2'-O-Methyl-adenosine
  modified_base 50: mod_base = OTHER; note = 2'-O-Methyl-uridine
  modified_base 52: mod_base = OTHER; note = 2'-O-Methyl-adenosine
  modified_base 53: mod_base = OTHER; note = 2'-O-Methyl-guanosine
  modified_base 54: mod_base = OTHER; note = 2'-O-Methyl-guanosine
  modified_base 57: mod_base = OTHER; note = 2'-O-Methyl-adenosine
  modified_base 61: mod_base = OTHER; note = 2'-O-Methyl-cytidine
  modified_base 66: mod_base = OTHER; note = 2'-O-Methyl-uridine
  modified_base 67: mod_base = OTHER; note = 2'-O-Methyl-cytidine
  modified_base 70: mod_base = OTHER; note = 2'-O-Methyl-cytidine
  modified_base 71: mod_base = OTHER; note = 2'-O-Methyl-uridine
  modified_base 72: mod_base = OTHER; note = 2'-O-Methyl-uridine
  modified_base 73: mod_base = OTHER; note = 2'-O-Methyl-guanosine
  modified_base 74: mod_base = OTHER; note = 2'-O-Methyl-adenosine
  modified_base 75: mod_base = OTHER; note = 2'-O-Methyl-adenosine
  modified_base 76: mod_base = OTHER; note = 2'-O-Methyl-adenosine
  modified_base 77: mod_base = OTHER; note = 2'-O-Methyl-adenosine
  modified_base 78: mod_base = OTHER; note = 2'-O-Methyl-adenosine
  modified_base 79: mod_base = OTHER; note = 2'-O-Methyl-guanosine
  modified_base 80: mod_base = OTHER; note = 2'-O-Methyl-uridine
  modified_base 82: mod_base = OTHER; note = 2'-O-Methyl-guanosine
  modified_base 83: mod_base = OTHER; note = 2'-O-Methyl-cytidine
  modified_base 84: mod_base = OTHER; note = 2'-O-Methyl-adenosine
  modified_base 85: mod_base = OTHER; note = 2'-O-Methyl-cytidine
  modified_base 86: mod_base = OTHER; note = 2'-O-Methyl-cytidine
  modified_base 87: mod_base = OTHER; note = 2'-O-Methyl-guanosine
  modified_base 89: mod_base = OTHER; note = 2'-O-Methyl-guanosine
  modified_base 91: mod_base = OTHER; note = 2'-O-Methyl-cytidine
  modified_base 92: mod_base = OTHER; note = 2'-O-Methyl-guanosine
  modified_base 93: mod_base = OTHER; note = 2'-O-Methyl-guanosine
  modified_base 94: mod_base = OTHER; note = 2'-O-Methyl-uridine
  modified_base 95: mod_base = OTHER; note = 2'-O-Methyl-guanosine
  modified_base 96: mod_base = OTHER; note = 2'-O-Methyl-cytidine
  modified_base 97: mod_base = OTHER; note = 2'-O-Methyl-uridine phosphorothioate
  modified_base 98: mod_base = OTHER; note = 2'-O-Methyl-uridine phosphorothioate
  modified_base 99: mod_base = OTHER; note = 2'-O-Methyl-uridine phosphorothioate
  modified_base 100: mod_base = OTHER; note = 2'-O-Methyl-uridine

SEQ ID NO: 2563 - RNA, 103 nt, synthetic construct; identical to SEQ ID NO: 1700
  source 1..103: mol_type = other RNA
  modified_base 1: mod_base = OTHER; note = 2'-O-Methyl-cytidine phosphorothioate
  modified_base 2: mod_base = OTHER; note = 2'-O-Methyl-adenosine phosphorothioate
  modified_base 3: mod_base = OTHER; note = 2'-O-Methyl-guanosine
  modified_base 21: mod_base = OTHER; note = 2'-O-Methyl-guanosine
  modified_base 25: mod_base = OTHER; note = uridine phosphorothioate
  modified_base 28: mod_base = OTHER; note = 2'-O-Methyl-adenosine
  modified_base 29: mod_base = OTHER; note = 2'-O-Methyl-guanosine
  modified_base 30: mod_base = OTHER; note = 2'-O-Methyl-cytidine
  modified_base 31: mod_base = OTHER; note = 2'-O-Methyl-uridine
  modified_base 32: mod_base = OTHER; note = 2'-O-Methyl-adenosine
  modified_base 34: mod_base = OTHER; note = 2'-O-Methyl-adenosine
  modified_base 35: mod_base = OTHER; note = 2'-O-Methyl-adenosine
  modified_base 36: mod_base = OTHER; note = 2'-O-Methyl-adenosine
  modified_base 37: mod_base = OTHER; note = 2'-O-Methyl-uridine
  modified_base 38: mod_base = OTHER; note = 2'-O-Methyl-adenosine
  modified_base 39: mod_base = OTHER; note = 2'-O-Methyl-guanosine
  modified_base 40: mod_base = OTHER; note = 2'-O-Methyl-cytidine
  modified_base 41: mod_base = OTHER; note = 2'-O-Methyl-adenosine
  modified_base 42: mod_base = OTHER; note = 2'-O-Methyl-adenosine
  modified_base 45: mod_base = OTHER; note = uridine phosphorothioate
  modified_base 46: mod_base = OTHER; note = 2'-O-Methyl-adenosine
  modified_base 48: mod_base = OTHER; note = 2'-O-Methyl-adenosine
  modified_base 50: mod_base = OTHER; note = 2'-O-Methyl-uridine
  modified_base 52: mod_base = OTHER; note = 2'-O-Methyl-adenosine
  modified_base 53: mod_base = OTHER; note = 2'-O-Methyl-guanosine
  modified_base 54: mod_base = OTHER; note = 2'-O-Methyl-guanosine
  modified_base 55: mod_base = OTHER; note = 2'-O-Methyl-cytidine
  modified_base 56: mod_base = OTHER; note = 2'-O-Methyl-uridine
  modified_base 57: mod_base = OTHER; note = 2'-O-Methyl-adenosine
  modified_base 60: mod_base = OTHER; note = 2'-O-Methyl-cytidine
  modified_base 61: mod_base = OTHER; note = 2'-O-Methyl-cytidine
  modified_base 66: mod_base = OTHER; note = 2'-O-Methyl-uridine
  modified_base 67: mod_base = OTHER; note = 2'-O-Methyl-cytidine
  modified_base 70: mod_base = OTHER; note = 2'-O-Methyl-cytidine
  modified_base 71: mod_base = OTHER; note = 2'-O-Methyl-uridine
  modified_base 72: mod_base = OTHER; note = 2'-O-Methyl-uridine
  modified_base 74: mod_base = OTHER; note = 2'-O-Methyl-adenosine
  modified_base 75: mod_base = OTHER; note = 2'-O-Methyl-adenosine
  modified_base 76: mod_base = OTHER; note = 2'-O-Methyl-adenosine
  modified_base 77: mod_base = OTHER; note = 2'-O-Methyl-adenosine
  modified_base 78: mod_base = OTHER; note = 2'-O-Methyl-adenosine
  modified_base 79: mod_base = OTHER; note = 2'-O-Methyl-guanosine
  modified_base 80: mod_base = OTHER; note = 2'-O-Methyl-uridine
  modified_base 82: mod_base = OTHER; note = 2'-O-Methyl-guanosine
  modified_base 83: mod_base = OTHER; note = 2'-O-Methyl-cytidine
  modified_base 84: mod_base = OTHER; note = 2'-O-Methyl-adenosine
  modified_base 85: mod_base = OTHER; note = 2'-O-Methyl-cytidine
  modified_base 86: mod_base = OTHER; note = 2'-O-Methyl-cytidine
  modified_base 87: mod_base = OTHER; note = 2'-O-Methyl-guanosine
  modified_base 89: mod_base = OTHER; note = 2'-O-Methyl-guanosine
  modified_base 92: mod_base = OTHER; note = 2'-O-Methyl-guanosine
  modified_base 93: mod_base = OTHER; note = 2'-O-Methyl-guanosine
  modified_base 94: mod_base = OTHER; note = 2'-O-Methyl-uridine
  modified_base 95: mod_base = OTHER; note = 2'-O-Methyl-guanosine
  modified_base 96: mod_base = OTHER; note = 2'-O-Methyl-cytidine
  modified_base 97: mod_base = OTHER; note = 2'-O-Methyl-uridine phosphorothioate
  modified_base 98: mod_base = OTHER; note = 2'-O-Methyl-uridine phosphorothioate
  modified_base 99: mod_base = OTHER; note = 2'-O-Methyl-uridine phosphorothioate
  modified_base 100: mod_base = OTHER; note = 2'-O-Methyl-uridine

SEQ ID NO: 2564 - RNA, 103 nt, synthetic construct; identical to SEQ ID NO: 1643
  source 1..103: mol_type = other RNA
  modified_base 1: mod_base = OTHER; note = 2'-O-Methyl-cytidine phosphorothioate
  modified_base 2: mod_base = OTHER; note = 2'-O-Methyl-cytidine phosphorothioate
  modified_base 3: mod_base = OTHER; note = 2'-O-Methyl-cytidine
  modified_base 21: mod_base = OTHER; note = 2'-O-Methyl-guanosine
  modified_base 25: mod_base = OTHER; note = uridine phosphorothioate
  modified_base 28: mod_base = OTHER; note = 2'-O-Methyl-adenosine
  modified_base 29: mod_base = OTHER; note = 2'-O-Methyl-guanosine
  modified_base 30: mod_base = OTHER; note = 2'-O-Methyl-cytidine
  modified_base 31: mod_base = OTHER; note = 2'-O-Methyl-uridine
  modified_base 32: mod_base = OTHER; note = 2'-O-Methyl-adenosine
  modified_base 33: mod_base = OTHER; note = 2'-O-Methyl-guanosine
  modified_base 34: mod_base = OTHER; note = 2'-O-Methyl-adenosine
  modified_base 35: mod_base = OTHER; note = 2'-O-Methyl-adenosine
  modified_base 36: mod_base = OTHER; note = 2'-O-Methyl-adenosine
  modified_base 37: mod_base = OTHER; note = 2'-O-Methyl-uridine
  modified_base 38: mod_base = OTHER; note = 2'-O-Methyl-adenosine
  modified_base 39: mod_base = OTHER; note = 2'-O-Methyl-guanosine
  modified_base 40: mod_base = OTHER; note = 2'-O-Methyl-cytidine
  modified_base 41: mod_base = OTHER; note = 2'-O-Methyl-adenosine
  modified_base 42: mod_base = OTHER; note = 2'-O-Methyl-adenosine
  modified_base 46: mod_base = OTHER; note = 2'-O-Methyl-adenosine
  modified_base 48: mod_base = OTHER; note = 2'-O-Methyl-adenosine
  modified_base 50: mod_base = OTHER; note = 2'-O-Methyl-uridine
  modified_base 52: mod_base = OTHER; note = 2'-O-Methyl-adenosine
  modified_base 53: mod_base = OTHER; note = 2'-O-Methyl-guanosine
  modified_base 54: mod_base = OTHER; note = 2'-O-Methyl-guanosine
  modified_base 55: mod_base = OTHER; note = 2'-O-Methyl-cytidine
  modified_base 56: mod_base = OTHER; note = 2'-O-Methyl-uridine
  modified_base 57: mod_base = OTHER; note = 2'-O-Methyl-adenosine
  modified_base 60: mod_base = OTHER; note = 2'-O-Methyl-cytidine
  modified_base 61: mod_base = OTHER; note = 2'-O-Methyl-cytidine
  modified_base 64: mod_base = OTHER; note = uridine phosphorothioate
  modified_base 66: mod_base = OTHER; note = 2'-O-Methyl-uridine
  modified_base 67: mod_base = OTHER; note = 2'-O-Methyl-cytidine
  modified_base 70: mod_base = OTHER; note = 2'-O-Methyl-cytidine
  modified_base 71: mod_base = OTHER; note = 2'-O-Methyl-uridine
  modified_base 72: mod_base = OTHER; note = 2'-O-Methyl-uridine
  modified_base 73: mod_base = OTHER; note = 2'-O-Methyl-guanosine
  modified_base 74: mod_base = OTHER; note = 2'-O-Methyl-adenosine
  modified_base 75: mod_base = OTHER; note = 2'-O-Methyl-adenosine
  modified_base 76: mod_base = OTHER; note = 2'-O-Methyl-adenosine
  modified_base 77: mod_base = OTHER; note = 2'-O-Methyl-adenosine
  modified_base 78: mod_base = OTHER; note = 2'-O-Methyl-adenosine
  modified_base 79: mod_base = OTHER; note = 2'-O-Methyl-guanosine
  modified_base 80: mod_base = OTHER; note = 2'-O-Methyl-uridine
  modified_base 81: mod_base = OTHER; note = 2'-O-Methyl-guanosine
  modified_base 83: mod_base = OTHER; note = 2'-O-Methyl-cytidine
  modified_base 84: mod_base = OTHER; note = 2'-O-Methyl-adenosine
  modified_base 85: mod_base = OTHER; note = 2'-O-Methyl-cytidine
  modified_base 86: mod_base = OTHER; note = 2'-O-Methyl-cytidine
  modified_base 87: mod_base = OTHER; note = 2'-O-Methyl-guanosine
  modified_base 88: mod_base = OTHER; note = 2'-O-Methyl-adenosine
  modified_base 89: mod_base = OTHER; note = 2'-O-Methyl-guanosine
  modified_base 90: mod_base = OTHER; note = 2'-O-Methyl-uridine
  modified_base 91: mod_base = OTHER; note = 2'-O-Methyl-cytidine
  modified_base 92: mod_base = OTHER; note = 2'-O-Methyl-guanosine
  modified_base 93: mod_base = OTHER; note = 2'-O-Methyl-guanosine
  modified_base 94: mod_base = OTHER; note = 2'-O-Methyl-uridine
  modified_base 95: mod_base = OTHER; note = 2'-O-Methyl-guanosine
  modified_base 96: mod_base = OTHER; note = 2'-O-Methyl-cytidine
  modified_base 97: mod_base = OTHER; note = 2'-O-Methyl-uridine phosphorothioate
  modified_base 98: mod_base = OTHER; note = 2'-O-Methyl-uridine phosphorothioate
  modified_base 99: mod_base = OTHER; note = 2'-O-Methyl-uridine phosphorothioate
  modified_base 100: mod_base = OTHER; note = 2'-O-Methyl-uridine

SEQ ID NO: 2565 - RNA, 103 nt, synthetic construct; identical to SEQ ID NO: 1643
  source 1..103: mol_type = other RNA
  modified_base 1: mod_base = OTHER; note = 2'-O-Methyl-cytidine phosphorothioate
  modified_base 2: mod_base = OTHER; note = 2'-O-Methyl-cytidine phosphorothioate
  modified_base 3: mod_base = OTHER; note = 2'-O-Methyl-cytidine
  modified_base 21: mod_base = OTHER; note = 2'-O-Methyl-guanosine
  modified_base 25: mod_base = OTHER; note = uridine phosphorothioate
  modified_base 28: mod_base = OTHER; note = 2'-O-Methyl-adenosine
  modified_base 29: mod_base = OTHER; note = 2'-O-Methyl-guanosine
  modified_base 30: mod_base = OTHER; note = 2'-O-Methyl-cytidine
  modified_base 31: mod_base = OTHER; note = 2'-O-Methyl-uridine
  modified_base 32: mod_base = OTHER; note = 2'-O-Methyl-adenosine
  modified_base 34: mod_base = OTHER; note = 2'-O-Methyl-adenosine
  modified_base 35: mod_base = OTHER; note = 2'-O-Methyl-adenosine
  modified_base 36: mod_base = OTHER; note = 2'-O-Methyl-adenosine
  modified_base 37: mod_base = OTHER; note = 2'-O-Methyl-uridine
  modified_base 38: mod_base = OTHER; note = 2'-O-Methyl-adenosine
  modified_base 39: mod_base = OTHER; note = 2'-O-Methyl-guanosine
  modified_base 40: mod_base = OTHER; note = 2'-O-Methyl-cytidine
  modified_base 41: mod_base = OTHER; note = 2'-O-Methyl-adenosine
  modified_base 42: mod_base = OTHER; note = 2'-O-Methyl-adenosine
  modified_base 46: mod_base = OTHER; note = 2'-O-Methyl-adenosine
  modified_base 48: mod_base = OTHER; note = 2'-O-Methyl-adenosine
  modified_base 50: mod_base = OTHER; note = 2'-O-Methyl-uridine
  modified_base 52: mod_base = OTHER; note = 2'-O-Methyl-adenosine
  modified_base 53: mod_base = OTHER; note = 2'-O-Methyl-guanosine
  modified_base 54: mod_base = OTHER; note = 2'-O-Methyl-guanosine
  modified_base 55: mod_base = OTHER; note = 2'-O-Methyl-cytidine
  modified_base 56: mod_base = OTHER; note = 2'-O-Methyl-uridine
  modified_base 57: mod_base = OTHER; note = 2'-O-Methyl-adenosine
  modified_base 60: mod_base = OTHER; note = 2'-O-Methyl-cytidine
  modified_base 61: mod_base = OTHER; note = 2'-O-Methyl-cytidine
  modified_base 64: mod_base = OTHER; note = uridine phosphorothioate
  modified_base 66: mod_base = OTHER; note = 2'-O-Methyl-uridine
  modified_base 67: mod_base = OTHER; note = 2'-O-Methyl-cytidine
  modified_base 70: mod_base = OTHER; note = 2'-O-Methyl-cytidine
  modified_base 71: mod_base = OTHER; note = 2'-O-Methyl-uridine
  modified_base 72: mod_base = OTHER; note = 2'-O-Methyl-uridine
  modified_base 74: mod_base = OTHER; note = 2'-O-Methyl-adenosine
  modified_base 75: mod_base = OTHER; note = 2'-O-Methyl-adenosine
  modified_base 76: mod_base = OTHER; note = 2'-O-Methyl-adenosine
  modified_base 77: mod_base = OTHER; note = 2'-O-Methyl-adenosine
  modified_base 78: mod_base = OTHER; note = 2'-O-Methyl-adenosine
  modified_base 79: mod_base = OTHER; note = 2'-O-Methyl-guanosine
  modified_base 80: mod_base = OTHER; note = 2'-O-Methyl-uridine
  modified_base 81: mod_base = OTHER; note = 2'-O-Methyl-guanosine
  modified_base 83: mod_base = OTHER; note = 2'-O-Methyl-cytidine
  modified_base 84: mod_base = OTHER; note = 2'-O-Methyl-adenosine
  modified_base 85: mod_base = OTHER; note = 2'-O-Methyl-cytidine
  modified_base 86: mod_base = OTHER; note = 2'-O-Methyl-cytidine
  modified_base 87: mod_base = OTHER; note = 2'-O-Methyl-guanosine
  modified_base 88: mod_base = OTHER; note = 2'-O-Methyl-adenosine
  modified_base 89: mod_base = OTHER; note = 2'-O-Methyl-guanosine
  modified_base 90: mod_base = OTHER; note = 2'-O-Methyl-uridine
  modified_base 91: mod_base = OTHER; note = 2'-O-Methyl-cytidine
  modified_base 92: mod_base = OTHER; note = 2'-O-Methyl-guanosine
  modified_base 93: mod_base = OTHER; note = 2'-O-Methyl-guanosine
  modified_base 94: mod_base = OTHER; note = 2'-O-Methyl-uridine
  modified_base 95: mod_base = OTHER; note = 2'-O-Methyl-guanosine
  modified_base 96: mod_base = OTHER; note = 2'-O-Methyl-cytidine
  modified_base 97: mod_base = OTHER; note = 2'-O-Methyl-uridine phosphorothioate
  modified_base 98: mod_base = OTHER; note = 2'-O-Methyl-uridine phosphorothioate
  modified_base 99: mod_base = OTHER; note = 2'-O-Methyl-uridine phosphorothioate
  modified_base 100: mod_base = OTHER; note = 2'-O-Methyl-uridine
